United States Patent Application Publication US 2026/0092266 A1 - sequence listing, part 21

SEQ ID NO: 3435 - DNA, 23114 bp, synthetic construct
  source 1..23114: mol_type = other DNA
  misc_feature 1..23114: note = Synthetic
tgtatctgcacgcctacaattgcgaagatcgtccagaccgcaaaacaggcagtaaaggcgaatgtcgtcaggccgagggcggtatttgcacctttgacggatggtccagcggtggatgtcatggatgcacttcccctgaaagcgcccgaagtttccgaagcgtccccaaaggtgtcactcgcgagaggcgcgaaccttgatatttgtgaagccaacgcttggcggatgtctgtccacctgcgcaacttgagatcaatcttgcttggcctgatcagaggagggttcgctcatgatttcatgcgcgaattttcatgaccgttgcaattagcacgattgacttttatcaagtgacaattaggctgactgaggtcacgaacccgtcttacgcaaaatcgccatgtggacgacttgcctgcaaagcgaccggggatttcatatgcctttgaagccatcagatgccacgcacgtccgggacctttccctctttcggtcagccggcggccagacctttgaaagggcaattgcaggtgccttcctgcagaaatttccagccgggacaaccctgctgatggaaggcgactcggtcgattttctttacatcctgttggaaggatcggtcgaactgggcgctggctggaaatcccgggatacgacgctggctgtcctcagacccgtatctacttttatcctcgccgccgtcgtgcttgatgccgacgcgctcatgtccgccgtgacgcttgagcgatccgaaattctcatgatgcccggcgagtcccttcgccgcgcaatgaaggaggacgcagaattctgcttcgccgtctccgaagagctcgccggttgctatcggggcctcgtccgctcgattaagaatcagaagttgcgggattcgacagaacggctcgcaaactatctgctgacccaacgcgcccagcagggaggcaagactgagatcgtgcttccgcatgaaaaacgtgtgctggcatcgcttctggggatgagcccggaaaacctgtcgcgcgccttctcgaaactacaggcacagggcgtcaccgtagtgggtgctcaagtgcgactggacaagacggcggcgcttgagaggttcgcgcgccccagcctcctcatagacaatcattacgcccagcccagaaatgaactcggcaaggcatatacagagcggcagaaagggctgctcgacagagaacccgggggttagccgcccgtctgcgcaaggttcataatatcgccaggatcggccgcgtggagcgcgtgcgaggccggcttgaacgcaagcgcatcggcaacgcgctgctggagagcgttcttctgctcgtcagacgccagaaggtccctcagatcgcggccaccttgaccaaagagacagagccgaagttgcccacgtgccgtcaccctgagccggttacacccgttacagaaaccgggcgcataaggcgctatgaccccgatacggccagcatgaccgggatgacaatactcgatcgccggcccgtcatctctgccgcgtggtcgcggtgtccagtccctgtcttcgagccatctgccaagaatctgtccacttacatgctggtcttcgaagaatgcccggttatcgccggttcgcatcagctcgataaaacgaatcgcaatggggcgatacctgacaaactcggtccacgctgaaaagtccgtatccagatcatctcgcaacaaaacggcgttgatcttgaccgccttgagcggaagcgtttgggcgcgctcaaggcctgcaagcacatcctcaaggcggtcatgcccggtaatcttcctgaacgtttcccgttcaagggcatcgacgctgacattgagatgggtgaggcccgacgcaacccaattgtcgatatggcgcgacaggttccaaccattggtcgtgagggcaaccttgtcgatgcctggctgcgctgcgacccgtgcgatcaggcccgcgatatcctttcgtaccgtcggttcgccgcctgtcaggcggacctttccgatccccagcccggaaaaagcgctaaccaggcgcccgatctcgtccatggacagaaaatccatagacccggctttctggaagccattggggagacaataggtgcaccggaaattgcagacttcggttactgatagccgcaggtatctgaacctgcgtccaaaggcatccgtcgcagctgcgccgggaactgtcatcgcaaggctcctttccaagcacgggaggcggcagggtttcccgctgccacctacggccggaacgccttgacgcagaaagaaggcgttttaggcggaccggctcggagcgattttgtttaaggtaaggtgccgacccttttctgtctttgaccgaccggacgctgacaattgatgtgcgtcaaggcgcacgctctggcgcatcaagccgaactcgcaggacggggcgcaagaagccgtggaccatagagcagcgcaaatcccacaaaggcggtggaccaaaaaacagcggcggcgtagttggcctgcatctgggcaggatattccataaaggctgccgcaacgcgcgttcccgccgcgaggttgatcagaacataaatgaggcaggtcccggagcctgctgtcagggtccggccagtatgcccaaggctggaccttgtcatcaccgcaagggtcatcacaccgacagcgcccacaccggctgcgtggaggccggcaaccggcggcacatgggacggcagcaggccattgagacccatcaggacgagggccagcgccgcccacgcataccccacatgcaggatgagcacgagcggttcggccaatgtgagctcgccgcgccaacgggacagacgtaccccgtttaagatccccgcagccagcaaagcaccgccactcatgggcgacggccccaaagctgaccatgccgcgagcgagagcgatgagactgccagcgcgacggaatcaaagcgccctgcaggttcgggaagcggcccgccctgccgggcgagccagttgcgtgtaaagcttggcgtaatgcgtcctccgatcaggaggatcagaaagaccagcacggcgagaccagtccggatcgctgtctgtggtaagccgcctgcattcagggaagcccaatgaaaggcaacatttgcaagcgccatcaccgtcacagctgctgcgaccttgagattccgcgtattctttccggcaatcacttctcgccacacgacaagagcgaagaggaccaaaaacgcgggctcaacaattgctggcagccaggcgggccccggctgcaacagcatcatgatccgtccggccagccatataacgaccagcataattagcggcgcgccacagactggaaggcggccggtccagtttggaatggcggtcaggaggaaccctgccacaatcgccgatccgtaaccgaacaccagttcatggacatggaaggcgagacccgctctcaccggaagcgtatccgggccgagcgcataggtcaggatccagagtggcacggacaccgccgcccagatcgcacccagaagaaagaatgggcggaagccgaagctgaacagggccggccccctgtatgcgcggatctgctcagctgatgttgccatgtgcaggtttccttctttgattccagccgcatttggagtggccccattccaggcaagtatcgctgccttccttccgggtcagggctttctgtccacatcccggacaacgggaagcatcgttcgctatgcctgacgaggcgggctcccgctgcccgagatactctacaacgatccggccggtcacggcgggcagcgacggcagatagtgcccgtcaagaaaagcacccgcacgataaaccggtcaaaaccttatcgcgggaacgtagtctccagcctgaaaggcgctccctcctgaccggagtcgcaccagcaggtctgcgtcaagcaggcttgcctggctggaagagtcctggcttccgagaggcaaggcaccttcaggtgtaatccgtgcccggacgtatgtctctcgatcacccgccgccgggacgtcggcggccagacgccagtcttcgaaagttacacttctggcggcatctcgcccacactgcccggcaagcagaggcgcgagaaggagcctcgccgtcacgagcgcggaggtcgggttacctggaagtcccatcacaagccggccacgaattctggcaagccagaccggttttccgggtttcatggcaaccctcggaaagatgtagtccggcgcctcaccgaacatcgttcgtgaaaggtcgcggtctccaaccgacgcgccgccgatcacaacgacgaggtctgcctcctccagggccgcaacagccagttctgaaagcaagcgggtatcatctgcgctgcgcctcgaccatagaacggcgccgccttctttcctgacaaatgctgcaattccgtaagaaacgctttcgggaatcgtgccgggtatgccggctgcgtttcccggagtggcaagttcgtcccccgttgcgatgattgcaacgttcggccggacaaacacccgcaggacaggctggtcggccgcagcggctgtcgtcaaggcgcgccagtcaagccggcgtccagctggaacgagtacatctccctcgcggaaatcagaccctgctatccggatgttacggcccggaccgtaaggccggacgatggccacgcaatcgccttcccgctcgacattttcctgcacaataacccggtcagcgccaaccggtacgggcgcacctgtgaagatgcggaatgcagaacgcggggggagcacttgccctggcggcgtgccagcggtcgactcgccttcaaggggcaaacgaacaggaaggtccccgaggtcacagtcacgcaccgcgtaaccgtccatagccgacacatcctgtctcggcatggacaggcgtgcgacgacaggttcggcaagcacccggtctgccgcatcggcgaaggcgatcgtttccaaagcgatcggggcggcgatttccagtacacggcgcaacgcctcatcaaagctgatcatcgcgccggctcgccggccgttccgtcacccgacttttctccgctcgtggcgtccagccggaaccctggcaagtcctcatcgagctcgatcggcaaggccagcgggatgagcgcatgcgtccgcctggccgccatgataccggcgatcactgccgtcgtaatgaccgcgccctttggcgcgcgccgttgcttggggaattgcaaggtcgcgcactggcatcggactcttcctgtggcaacagcgcagcgcagtgttgcgtccttgctgccaacatccaccatgtttacgcgcccgtcttcatcaagatgggtcagttttgtcatgggcagacccctctgtaccgctcgatctgaccgaccagcgaacagggacgatagcggctgtcgagttcgaaggcgaagacatggtcccaggcgtcgcggcaggctccggttgaccccggcacacagaagacaaaggtgtctcctgcctgcccggcaaacgcgcgggactgcagggtcgagacaccgaccgtgcccatgctcacctgatggaacacgacggaaaatccgtccatttcccggctgaagaggggcttgatcgcctcgggggtcacgtcacgcggcgaaaaccccgtccctccggtcgtcaacacgacatcgaccccgggatcggcgatccaatggccgatcgcggatcggatctcgtccacatcgtctcggacaacccttctttcaatgacgacatgaccggcgccccgtgcgcggtctgcgagcagggctcccgatgtgtctgtttcctccgtgcgcgtgtccgataccgtcagcacagcaaggttaagtggataaaaggcaagacttttatcaatccccggcactttcttcatttcatcatctctcgatcctgagtgtctctgtctgtcgattcaatccagcgctcaccgaaagtctcccgttcctgcttccagaagacagcttcggtcttcagccggtccatgagccgcaggaaatgcctcgcggcgacgatcgcgggcggccgcaacgaggacaataacctcgcccggtgtcatggccccggcttgctggacaattgtcagagcgtgcagatcgaaccgattgaacccttctgtcaattcgcgaagcggcaccataaggcgcgctggcgccgacaaatggtacccgtccgaattgcagccgtcccaccggtcgccacagcggcggccctccgaaggcagaggtcacacgttcgaatcgtgtcgggtgcaccattcacccacaaaagtaggtaccatggacggcgggagcggcttttcggccgtaagctgataagccagcacgtctttccggccggaaatcctcacccggtccttggcaaccgccacattgtccagcaaaagccggagataggccttgcggaaccccggctctcccccttcctgcaatcgggcccgaaggccctttgagaaggcctccagcttcgcaggcgtgacggcagagagaggtgagtcaatctcccggttgacgaacgagatcacccggttcacctgttcgcgctcattctggcgttgagtaattcgggttttgacggtatcgagcggaacgcccttttccagagcgtcggtcagcatttccagcttttgatccagctcccgacgttcccgcttcaattccttcagtctcgcttgcgcggccgcccgccgtcccgaattgcgagcaagcaatgacccgagcatgtactcaaggcgatccggttgaagcacctgaccgcatagggcgtcggtcacgattgcatcgagcttgcccataggcactgttacgcccgcgcatccggtcttacccatatcggccgaccgcgagcatgtgtagtaccagtactgaccgttcttgccggttcgcgtccgcatcggcgcaccgcaactatcgcaaatcgccacgcctgtcagcaatatgcggctgcttgcgatgcgaggcggtgtcattgtcggatttcgggcgtccagttgcgcttgtaccgcgtgaaaaatgctttcctcgacaatcggcggtaccgcaatctcgacccactcttcacgagggcgcggctttcgtgtccggctctccgtgcgattgaagtagtgcgttccaatataggcggagcgccgcaatgcttcctgaatgtgctggatgcggaacggctttccgttccggttctttacgccgcgcccattcagataggaaaccaagttcttgatgccgagcggcccggtcttgccgtcgccatagagatacagctggaaaatcagtttgacgatttccgcttcctgcggctccaggtcgagctttttcttgtccttgttgccgtgccgctcaacaatgattgtcttgtaaccatagggtgcggccgcgccgttccagaaaccgcgctttgcgttctcaatcatggagcgggtgacatgcttggcggtttcggcgctttgatactcgtcgaaggaagaaagtatctggcgcatcaaatctgcttgcgcaccttcgccagtttcctgcgtcatcgacataagccgagtaccgcttttctcaagcatccgtgaatagacggcaaagccgtaagcatcccgaaaaaagcgcgagaagctgtgaacgagaaccatatcggctcgtatcacccctgacttcacatcatccatcatgcgctggaattgaggccggttatcgtcgcgagccgatgcgcccggatcgacataggcgcctacgatctcgatatcgcgttccttgcaatagcgttccgcgtgagcgatttgatcgggaatggacaggtcatggtcagcctgccttatcgtggatacgcgcgcataaacaatagcattctgtcccatgacccatctcccaggccctatcgggccgcctcttctttcagcatttcggcaatgatatcccggagataggtctcaacgagagccagctcatcggacgttaccggcagttcatccgggatatcgagcgtaacaagcatgtcaaatttgcggctatccactcatggggcaccgcctttcttgcctgtatgggaccggcccatgccattccacgcctcagtcccgcccttaccgccgtggtcaaggagggtagcaatgtccgaacgcaggcccttttggcctagttcatccaacacgcaactccggaaaaactcgaatgtccgctcattcggaatcgccagctcggcgtatttgagaatctgattggcacgctcattaatccgcgcttcgagtgccttgaggttcaccatttgcctgactcgtagtcacgaatgcgctgctccacatcctgctgccatatggtggggatgtgatgcggctgaagcatgtcgaggatttcttccgccaaatcttcaagcgtaaccatccgtcgccaatgtcccgactccaggacggacattgccgcaagggcttttaggtagccgtacatggaagtaagggtcttgaacttccggtattgcagcgcgctatccggatcgtagtgccgcgccaatccaaggtggggcatttccacgattgcgtcctgaagtgattgccagaggggatgaagcggccaacgcgatttgttgctgtcgcctgtcggccgtcgaagcgtcgtgtgctcatgcgcgagctgtcgcagaatatcgccttgtagttcttccaagtcacccagcgtccggatcgcacccgtcttgaggcgttcgctccgtatctggaactcgatacgccacacattttcgctttggccccaaaggtcgaagaaccagaccttgccgctgctttgcctaatctcggcaaccttgtcatagacgcggattaccgtatggcccgccccaaggcggaaagtttggacgcgcccaccgtcgcgatatttggcgtccttatgagcccgcgtcgtgaaatcatcctcattgaaatccacttccggcaaatcgaaatcgaaggaccaatcggcacgggatatggtttccggcgcgatcattgtcgcgcctatcgagcgcgcccagtcgactatccgttgatggagtgcgattgcgcctgaccgccagagggcttcggatcggaactgggcacggagtgtcggttgcatgacttccgtcatgccgagagagaaggcgtcattctccaagagaaaccggtagggcttcgccccatgcggacgcagtgcgaagtcttcgcagcccagcgtcagcgtctcgaagtcgcgctgcccgtccctgatcatttccttgcggtattcgaggtccgggaaatcgagcgtcgatgtgcgcatgtcgagcgaatagcaaacatataggctgtcgaggccgttcaagagcagccgcggcctgtcttccgctttcgacgttccttctggatgagaaacgaaaggccggtcaggattatctatgatttctccgccactcatttcgcgcctctgtaaatccttgaatgccgcgacatgattgtcagtccggaaaatctcccaagaaaaatccatctccatatgaaaaatctttcatatgaaaaatgtaagttatggaatgtttttgggcgctcgccgtcggacgggtgtgcatttccggcgaatcatcgaagtgcaaggcccgccaaaagacaggccgattacccgccgcccgggccacatcaaggccgcgcgccgcttgcgcggcgtggcttcgccagccttgacccgtcccgttcggcaggccgggagccaggcatggccttcaagccgcattgcggcctgaaggcctgatcttgaggggggctgggaacttgagacgaaagagggaccgctaagggcttcccgatgtatcgaaagccccccgtgttactgctcacggggggaaagcaaaaaggcccacacgctgttcgcggtgggccttttcgataataaccggcagctgaccttgggatgccgagcccgcacaaggggtcaatttgcttgcgaaaagcgaccgcctctcgatttgctacagaacagaggctagcctttacccttattgggcgcaagggggattggtcatggagcgaattttcggcttcgatattggtacgacgtcaatcggctttgccgttgtcgactacagtccagagcaatctgccgggaatattctgaggctcggcgcgcgaatattcccagaggcgcgcgacccggacgggacacccctcaatcagcagcgcagacaaaagcgcatgatgcgccgccaattgcggcggcggcgaatgcgccggaaggcgctgaacgaggcgcttcgcgatgcgggcttgctgcctgcttatggctcgcccgattggccgattgttatgggcggcgatccttatgatttgcgaaggcgcggactcgaagagaagttgagcgcctatgagtttgggcgggcgatctatcaccttgcgcagcaccggcacttcaagggccgcgaacttgaggatagcgacacccccgaatctgacgccgacgacgaaaaagaagcgcagagcgagcgagacgcgaccctgaaggccctcaggaatgaacaaaccacgttgggcgcttggcttgcccgccgcgcgccgtcggatcgcaagcgcggagttcatgcacacagaaccgtagtcttggaagagttcgaaaggctttggactacccaatcggaatatcatccggtgcttcggagtgaggagctgaaagcaaagattggcgacacgatctttgcgcaacgtcccgtgttctggcgaaagaacaccttgggcgattgcaggttcatgccgggtgcgccgctttgtccaaaaggttcctggctttcacagcagcggcggatgctggaaaagctgaacaatctcgcaatagcaggtggcaatgcccggccgctggatgccgaagagagggctgcaattctttccaaactccagcagcaagcttccatgtcgtggccaggagttcgaggcgccttaaggccgctctacaaacagcgtggcgaaccgggggcggaaaagagcctcaaattcaatctggaactgggtggcgaaaacaaacttctgggcaacgtattggaggcgaaactggccgatatattcgggtcagattggccttcgcatccccaccagcaggcaatccgcgaagccgttcatgagcgcttgtgggcggccgactatggcgaaacgccagacaaaaagcgcgtgatcatcctgtcggacaaggaacgaaaagcgcaccgggaagacgcagcaaaatcgtttgttgccgattttggcgttgcggaagaacaagccgcgcaattgcaggtgctcaaactgccgactggctgggaaccctattccatattcgcgctcaacctgtttcttccggaacttgagaagggagaaaggtttggcgcgctggtaaatggaccggattgggagaactggcggcgcgaagtgttccccaaccgcgaacaaccgaccggcgaaattctcgacaagttgccaagtccggcttccaaggaagaacgcgagcgaatatcgcaacttcggaatccgacggttatccgaacgcagaatgaactccgaaaggtcgtaaacaatctcatcgctctttatggcaagccggatcgcattcgtgtcgaagttggtcgcgacgtagggaagtcaaagcgcgaacgcgaggaaattcaaagcggcattcgcaaagccgagagaagacgcagtgaagcaacgaaggatttgcaatcaaaaggaattcccagtccctctcgcgacgatgtcgaaaaatggcttctctggaaggaggggcaggaaagatgtccctacacgggggaccagattggctttgccgctctgttccgagagggccaatacgaggttgaacatatctggcctcgctcccggtcattcgacgatagtccgcgcaacaaaacgctctgccgaaaggacgtgaatatcgagaagggcaaccggatgcccttcgaagccttcggccacgatgaagaccggtggtcggcgatccagacacgtctgcagggaatggtatccgcgaagggcggagccggtatgtctccgggcaaggtgaagcgcttccttgcaaaggaaatgcccgacgattttgctgctcgccagttgaacgacacccgttatgcggcgaagcaaattcttgcgcagctcaagcgcctgtggcccgacatggggccggaggcacctgttaaagttgaagcggtcacgggaaaagtgaccgcacaacttcgcaaattatggaccctcaacaatgtccttgccgacaacggcgagaagacgcgcgcggatcaccggcatcatgcggtcgatgcgctggccgttgcatgcactcatcccggtatgaccaacaagctttcgcgctattggcaactgagagacgatccgcgcgcggcgaaaccgacgctttcgccgccttgggacgcgatccgcgcggatgccgagagggccgtcaacgagatcgtcgtatcgcatcgcgtccggaagaaggtgtccggcgcgttgcacaaggagacgacgtatggcgatactggcgacgacgtaaagacgaagacggggacctatcgtcaatttgtggcgcgcaagaaggtcgaagcgctgtcgaaaggagagcttgaggaaatacgcgacccccggatcaaggagatcgtcacggcacatgttgctgaccggggcggcgaccctaaaaaggcatttccgccatatccgcgcgtatcgccggatggaccggagattcgaaaagtgagacttacgacgaaacaacagttgaacctcatggcccaaaccggaaatggatatgccgatctcggctccaatcatcatattgcgatctatcggctccctaacggaaaggcagatttcgaagttgtgagcctgttcgaagcctctcggcggttgtcgaaacgaaagccggttgttcaaagaacacgggcagatggtgcgacgttcgtaatgtcgctttcggcgggcgacaccatagaggtgcccgatggagacagggccggacatcgcatcgttcaaagcatttggtcatccggggtggtggtgacgctggcgcatatcgacgcaaacggagataccatttggcgtccaaatgcaggttctctacttaagggaagggcacggaaagtctcggttgacccgataggccgcgtggggacggctaacgactgagggacgccacgatgatccgcaaaaccgtcgaattcgcaacgccgggtacgcgcctttcggtagccaacaagcaactagtgatcgaacgtcccgacttcccgaaagcgacgctgccaatcgaggatatgggcgtcgttattgtcgacgacttgagagcgacctatacgcaggcggtttttatcgaactgcttgaggcgggtgcgaccgtcatggtgacggggagggaccatctacccgccggaatgatgctgccgctcgatgcacatcatgtgcagaccgaacgccaccgcgcgcaagtcgaggcaagcgaaccgacgaagaagcgtgcttggcaggcgttgatccgaagcaagatcgcacaacagggcaccgttcttgcgcatttcaccggcgagcatggcgggctggcccccatgtcacgtcgtgtgcgttcgggcgatcctgacaatcttgaggcgcaagccgcgcagcgctattggccgcgcctgttcggaaaagacttccggagagaccgcgatctggagggcgttaacgccctgctaaactacggctatgcggttgtccgcgccgcgacggcgcgggcggttgtcgcggccggattgattccttcgcttggcgtctttcatcgcaaccgcgcaaatccgttttgtctcgccgacgatcttctggagccttacaggccatttgtggattggcgagtccggctgcttaccgatgaaccgagcggggcaaccccgagtctcgatgatcgagacacacgcgccgcacttctttctattttcaatgaaaccgttcttgtcggcggcagacgaatgccgctcctgctggcgcttcattcaagcgccgtgtctctctgccgcgccttgacgggaggcgaagccgcgctggcattgccagaaggcttgccgctggcacccgatcttctggacatagaaggggagggatgatggcgcatgcgcgccccattcctcaattgccctgggggtggcgctcgatgtgggttatcgccatgttcgatcttccgaccgatacgccgaaagcgcgaaaggcctatacgcgcttccggaaagaccttctggatgatggcttcacgatgatgcagtattcggtctactcgcgtcattgcgcttcgatcgagaatgcggaagttcatgtgaagcgaatgggcgctgtcgtacccgcgcaaggtgaggtccgattcctgacgatcacggacaatcagttcggaaggatcaaggtttatgtcggaaaaaaacgccagccaacaccgcaatcgccctcccagcttcagcttttttgaagcatggaaaggcgaaagcgtgtgccatttcaatggcttgccggaagggtaagagtagcaaatcgagagacggccgcaatccgcagccgggaagtcccgcagccgtcttctacggagagagtagcaaatcgagagacggccgcaatccgcagccgagtgccggagctatcaatagacaggaaaagagtagcaaatcgagagacggccgcaatccgcagcaacggcgctatcggaacgcttctcgatattaagagtagcaaatcgagagacggccgcaatccgcagcgcggcgatcgacaggctttgggaaaaggaaagagtagcaaatcgagagacggccgcaatccgcagcgttttctcctatccccgtaccggcggcggcagagtagcaaatcgagagacggccgcaatccgcagcgatgcgcggtgacgttcacgccgcctgctgagagtagcaaatcgagagacggccgcaatccgcagctaatcggcatcgttgtgacgcggcccgatgagagtagcaaatcgagagacggccgcaatccgcagcctcctgcgcgcgctgctccatgacctcttcagagtagcaaatcgagagacggccgcaatccgcagccaccctgccccgccattacttcgcccccttagagtagcaaatcgagagacggccgcaatccgcagcgaccggcgccggacggcggcgtcgacgtacagagtagcaaatcgagagacggccgcaatccgcagcacatgaaggattatttggcggacactaaccagagtagcaaatcgagagacggccgcaatccgcagcgaagcgcatggggatgccgacgtgaaaggcagagtagcaaatcgagagacggccgcaatccgcagcgagcgcggtgagtgtgaggttgcggaactcagagtagcaaatcgagagacggccgcaatccgcagcagagcgcaccgcgcttcacttccgcgcggaagagtagcaaatcgagagacggccgcaatccgcagcgatgagggtgatttcgaccgagcgaccctcagagtagcaaatcgagagacggccgcaatccgcagcgttcgcgcattggcggtggcaaccaactctagagtagcaaatcgagagacggccgcaatccgcagcgatatgcgaaacgcatcggcgctcgtcgctagagtagcaaatcgagagacggccgcaatccgcagcaagctggcgcgcacaggccagataggctttagagtagcaaatcgagagacggccgcaatccgcagccaaacttgccgatttgtcaccatcggaatcagagtagcaaatcgagagacggccgcaatccgcagcaacgtcttgagcgtgaccggcgactttttcagagtagcaaatcgagagacggccgcaatccgcagcgaaacctcgtgctggcccgcccatttgccgagagtagcaaatcgagagacggccgcaatccgcagccaccgcctcaacacgagcgatttccgcctccagagtagcaaatcgagagacggccgcaatccgcagcggagagcacgcacgaggcgatctattccgcagagtagcaaatcgagagacggccgcaatccgcagccgcttgacggtggcggatttttcgccgctgagagtagcaaatcgagagacggccgcaatccgcagccatatgaggcggcgctgtggagtccgagaaagagtagcaaatcgagagacggccgcaatccgcagctcctcgcagccagagcagacgcggaaaaagagagtagcaaatcgagagacggccgcaatccgcagccggggaggcgaacttccgttccgccagtgcagagtagcaaatcgagagacggccgcaatccgcagcgtgagatcgtgttcaggcccatcatcccgaagagtagcaaatcgagagacggccgcaatccgcagccaagcgttgcgccgcccgccgccgccgcgcagagtagcaaatcgagagacggccgcaatccgcagcgaaatgatggcgcgctcacccgcctatcagagagtagcaaatcgagagacggccgcaatccgcagcgctgggactacggtcccaccccgcgtcaacagagtagcaaatcgagagacggccgcaatccgcagcccgccgtctttggttcggcttcatcgaacaagagtagcaaatcgagagacggccgcaatccgcagcaagttggaccgggctattgccactttccgaagagtagcaaatcgagagacggccgcaatccgcagcgtgacggctgggcggctgctcatgagcgcgagagtagcaaatcgagagacggccgcaatccgcagcacgaagtacggtcttcgggacgcgctgaccagagtagcaaatcgagagacggccgcaatccgcagcaatcaccgtcaggggctatttgatctggtcagagtagcaaatcgagagacggccgcaatccgcagccggggtatcgcggccagctttcggcactttagagtagcaaatcgagagacggccgcaatccgcagcgcttcgcaccatcgatgaggtggaggacgaagagtagcaaatcgagagacggccgcaatccgcagccggcatcccctcgggtaatccgggtccgccagagtagcaaatcgagagacggccgcaatccgcagcgaagcatagatggaatccgcgattggtgtcagagtagcaaatcgagagacggccgcaatccgcagcctttcgcgcatcggccagctattcggaggcagagtagcaaatcgagagacggccgcaatccgcagcgccgtggaggctggttattgcgagcggagcagagtagcaaatcgagagacggccgcaatccgcagctgtcggcgcagaccaacggggatatgtaatagagtagcaaatcgagagacggccgcaatccgcagccgcgcgcgggtgcgcgagaacggtatacagagagtagcaaatcgagagacggccgcaatccgcagcgacgcgccgttccttctcattgcgaacagcagagtagcaaatcgagagacggccgcaatccgcagcccctgatagagcgggagttgccgggctttgagagtagcaaatcgagagacggccgcaatccgcagcgccggccaggcgggcggtgccgagatcaatagagtagcaaatcgagagacggccgcaatccgcagcgacgacgggaagtttacatgccacccggagagtagcaaatcgagagacggccgcaatccgcagcgaaatggtctaaacaacacttctcttttttagagtagcaaatcgagagacggccgcaatccgcagcgaggcatcatctatcacatagccgcgttgaagagtagcaaatcgagagacggccgcaatccgcagcgcgccgacgatggcgagcgttagcgtgagtagagtagcaaatcgagagacggccgcaatccgcagcgcgggacggccttgggatttcagtcgtcacagagtagcaaatcgagagacggccgcaatccgcagcgcctcaggttgacgccgttcgcgcgcactgagagtagcaaatcgagagacggccgcaatccgcagccgatctttcagagcaacggcgacccgaacgagagtagcaaatcgagagacggccgcaatccgcagcgggaaaacaagccgggattggcgaaggaacagagtagcaaatcgagagacggccgcaatccgcagcagtacctcacgaaaggaacggccgtggccgagagtagcaaatcgagagacggccgcaatccgcagcgggatgggcgcgagatcgaccaccgtttgtagagtagcaaatcgagagacggccgcaatccgcagcgctctcgaagccgtgaagatgatgccccggagagtagcaaatcgagagacggccgcaatccgcagcgtagaccatgtagatgcggtcgggctccggagagtagcaaatcgagagacggccgcaatccgcagctgtcggggctgaccaacggggatatgtaatagagtagcaaatcgagagacggccgcaatccgcagctttgatgtttagcacaagctgccgttaattagagtagcaaatcgagagacggccgcaatccgcagcggaaactccattctcatgatgccgcctctcagagtagcaaatcgagagacggccgcaatccgcagcaccggaggcaccggaactccgcgctattccagagtagcaaatcgagagacggccgcaatccgcagcgatgccgacggcgcggtgacttactgcaatagagtagcaaatcgagagacggccgcaatccgcagcccgcaaggccgcctgattttcgagcgtcatagagtagcaaatcgagagacggccgcaatccgcagcgtgctcgattgcatggagcgggcggcaaaaagagtagcaaatcgagagacggccgcaatccgcagcgtcgacattcacgtcgccgatggtgacgatagagtagcaaatcgagagacggccgcaatccgcagccctgatagtcgatgccatcgggaaggtcttagagtagcaaatcgagagacggccgcaatccgcagctgtttgggaacgacaacatcgagtccattaagagtagcaaatcgagagacggccgcaatccgcagctgcaaggggacatcattgataagaccagaagagtagcaaatcgagagacggccgcaatccgcagccgcatcggtgacacaaatccgggaaaggaaagagtagcaaatcgagagacggccgcaatccgcagcgtggagcgaagcctctccggagcgatacctagagtagcaaatcgagagacggccgcaatccgcagcgccggacattttgtccatactctatccataagagtagcaaatcgagagacggccgcaatccgcagcgttgtgttgtctctgacgatattcagaacaagagtagcaaatcgagagacggccgcaatccgcagccaatcatcggtgcttggctgaagttcgatgagagtagcaaatcgagagacggccgcaatccgcagcgacaacggccctcccgcctgtccgcatgcggacaggcgggagggccgttccgcgctaatcgcgcggcatttgcatgcaaagatgccagtactcatcctcgccttccccggtgcaccattcctccggaatggcaccctcttcatggataaagaagttcgaactctgttcgaacgggtgcaccattcctccctggaatgggcaaggcatggccgcgccggtcaggcagcggcgcgcagggcccgcatgtcgaggatcgtcagagagccccgggccaactgcatgataccttgcgttttcatggcagtcattacgcggcttacgtgaacccgggtcagaccgagcaggtcggcgatggtcttctgacgcagcacaaaggggatggtatttccgtcggcgaggccacgcttttcaagccgctcatatatgtcgagaacgagccgcgcgatacgttgctcggcgttgcggcgccccaggcccaccatcagggcttcgctggcttcatgctccgcgatttcaattccgacaaaggtccatatgaggcttggatccttttttgcgaactctttcaggtccgcgatgtcgaacgcgcagtatttgagcggcgtcgccagagcctgaacggacaagcgcgcttcctcgcgcatcaggaattcaccgccagcaatatcccccggcagcaagatcgacagaatttgcctgcgaccgtccggggtgaggacgaatctgatcgcccagccgtcgcgcaggaccacgatctggccgcgcgactctccggatttgtagatgtgctggcggggccggatcgatccaccgaccttcgagacgcggttttccgcatccgacccgataaccgcgcggcaaagctcgccctggctgaacggacatgcaccgcagtctcccggaaggccgtccctggccggatcgcttgcggcggggatatgcggatctccagccgtgtcggtgaggctggtcacataactatactttcgttttggaaacggcctgttcggcggcacgtctccccttaccccttgttcttctacctatcgtcctggggataactttgccagcacaaagactagtgaaatacttcatttttaacataggatataatcatcatatatactttatttttataatatatacattaaataatacccctgtattaactgttcatttctagttgaaccataaactcaagcttaatcgaaccgaattgcgtaccaatgtagcgagtatttgcagttgacttggctgcaaccggacgcaaggagggcatgaggcaggcagtgccggcctatttttggtggggaaaattatgacgcagaatcaagtatcgtcggtcgaccgcgaaggccgcttgcgttacatggaagtttccgagcggacgggcgatgcccttcgcgaattctggaaggtgatcgagccgcatctgccggaggttctcgacggcttttacgctcatctcagcaacgttcccgctcttgccaagctgatcggcgatcggacgccgagactgaaaacggcgcagggagcgcattggggccggcttttttcaggcaccttcgacgacgcttatatgcagggcgttcgcataatcgggcagacgcataaccgtatcggcctcgagccgcgctggtatatcggcggctacaagttcgtgatgaaccggctcgtcgagattgcggtcaagaagtatcgctggacgccgaagcgcctttccgaagtattgtgtgcagtgaatactgccatcatgctcgatatggatctggcgatttccgcttatcaggacgcgatggaagaagagcgcgccggccagcggaaactcgaaacggccatcaacgaattcgacatcgccgtgaacgagatcatcgagtcggtcgcctcggcatcgaccgagctccaggcttcggctcagtccatgagcgtcacggcagagcaagccagctcccggacgacgaccgttgcggcggcctcggaagaggcatcgacaaacgtgcagacggtcgcctcggccagcgagcagctgtcgagctcgatcgccgaaatcggccgccaggcgtcgatgtcggcccagatcgcgggtcaggcggtgcaggaagcgcaccgcaccgacgacaaggtgcagggccttgcggcggcggcgcagaaaatcggcgatgtggtcacgctgatcaatgacatcgcggcgcagaccaacctgctcgcactcaatgcaaccatcgaggctgcccgcgccggcgaggccggcaagggcttcgccgtcgtcgcctccgaagtgaagagcctcgccaaccagacggcaaaggcaaccgaggaaatcgccgaacagatcaaggcgatgcagggcgcaacgcaggaatccgtcgacgccatcaagtcgatcgagaagacgatcaccgagatgaaccagattgcgacctcgaccgccgcggcggtcgacgagcaggacgccgcaaccaacgaaatcgcacgtaacgtccaggaggccgcgcgcggcacgcaggacgtgtcgtcgaacatcgtcgcggtggcggaagctgcggccgaaacgggctcggcggccgcggaaatttccggttcgtccgacctgcttgcccgtcaggcggagacgctgcgcgagcatgtcgacaagttccttacacaagtgcgcgcggcctgagatagggcgatcgaggccggatatgttgaatagaatgcctgcaccgccccttccgcctgccgtcttcgttttcgacccggcctcggggacgctggtttcgcaaagctcgagtgccttcgaaatgctcgagaaaccgaacggctccccggccaagtcggcaacgctctcgacggtcgagcgattgctgaccgccgggggccgcaccgtcgtgctgcccaacgcgacaggcgccgcgcacgaattgaaccacgagttgcgccgcctctgctacctgccggacggaagcgagctggccctgacgcgggtctggtcgcccggcaccaacacaatcctgatcgcaagcgacgtgtcgcagccaacgcaggaataccggcgggttcgcctgggccagatggtcgtcgaccggttcatgcgcgcacctacattcgatgcggcgctcgccgttcttctgcgcgcgatcacgctatgcagcggatggatgcgtgcggaagtctggctaccgcaggacagtgacctgacgctgcggaaaatccggtctggtggcggggcgcgggacgaggacgccgccgcgaacctgccgtccggacagggtgacggcgttgccggcgaagcctggcggaccggacatatcgtcagccggttcggtgccgggacacatccggcggacgagagatcgcatccctggcccgacgccgcggtgcctctcaaggcgaacggcgaaacggtcgcggttctcgccttcacgaccggccgcacccatccgcgcgacacgttgatgctgaatttgctcgacggcatgtcggcccggctcgggctggcgctcaaatgccgcctcaacgccgaacgtggggacatcacgcaggcgaccagaggcgcagtcccgacggccggcatgccggccgggaagcattttatactttggttataataatatttctcgacaaatattttattaactaaacaaatgcctctgtattcgtgtttatttattactcattaaac

SEQ ID NO: 3436 - DNA, 23102 bp, synthetic construct
  misc_feature 1..23102: note = Synthetic
  source 1..23102: mol_type = other DNA
tggcatcaaacgccacaagaaagcgaacggccgcattttccgcggccgcacgtggaacgactatccggaactggaagcgccacagccttagaaactgaaagccccctggccttcaacgttggaggccgtgacccaaaacttgtgggcgagctcgtgcttagccgctaggagcagccaatacagcggctgattatggctgcccgtgagtaggctcatctcggtggacggccacactccaaggttggcaaccttatcgcgccagaattggattatttgccgccggagatcctgctggctgcaagcgatggacactttttctcgccatccaggagcgaaggtatcaaacgacgaattgtcggtagtcgcgtatgtcacggcatttcgctgcaaatccatctgggcgagatgaaccagcatgtcgatacgcttgagctttgaaagggtgaggatgataccgaagttcagcgttcccaggtcgaaagggtcgaggaaagcgaagtgcaagccatagggattgagcatggaaatgactttttccgccgcatcgagtgcggcgccatcaacttctacaaccggtgctcctaaagcgtgcaggcgagtagcggcggcgtgacgccgttggatgtcgagatcgccaatgaagacctgcgaaaacggcgcatggccttcttggctcttcttccaagccgcgacgacaccgccgtcaatccactctccggtgtcccgcacttggcatcggcctgggccgcagaacaggtcgatgtaggtcgcgcctgcctttccaggaccgagatacttcgcacgcgccccacgcgaaatatcaatatagcggcataggtagtcgtgtttctccttggcccacacaccaacgtcttcggcgggaagcccatcgtccccctcaaccagtttgcccaactcgcttcccccctattttccctaaggtacgtcacaagcatggatttagatccgccatcattcatggtggcgctcgataacactaacaccataacgatacgtcgaatatgtcaacttatgcacaggggtcggagctctggcgatgctccgcgatgtcgaaaaatgtcatatactcacgagtatatgacacgacataatgccattctcggcctgctgtgtatcattccccattcaggtcaccggggaccaccaggggacggacgcagacgttggaggccaaactctttgctttgatacgttcatccgttgacgcttacgggaaggtccgccccctcaggacgcgaagcagcgcttggcccctccccgcgcgaggggcgcgatccccttaggccaaatggggccggaagaagacggtctggtttcggaaagaaacgatggaaaccggaacgaccagctttagattggtggaccgacaaattgccatccccgtcatggcctaaacaggcatgacttggcgatatcggccgccaacggcggacatcagacgacgaaaggcagagaagaattgagcttgattcaggcgatagacccgagttcgcgttctatgtcgcggcatgctgcgacaatctcggagcgaaccaactgatactgctcggaaatctgctcttggcttttgttcgcgagaaagaagagcttgtctgagacggcgacgaccatgcgtacgattgccgcctgtgggttcaattgattggcgcgaacccacctgtcaattgctttggcggacaagccgaacagatcctcgacgggccaggattttcgattgatcaccctcagcagcactcgttgggtggtaatccgattgttaaattcatactccatagcctgacgcctttacctgcgatagaagctggatcatccattcgtcgatggctggaaactgtcggacggcgagttcgacctctgtgtcggtgatcgtcgtgccctgcccacgggtacataggacgcgagcccgttccagtatcttataggcatccgcaggtatcgccaaactggatgcgccgatacggatggcagcatgcctggagaaatcgggacgatttaggcatccaagtgagaaacacgttgcgaagttccgaatagcgaggaaaaccatcgacagatcgaacgccttggtagtcctgccactggccatggacgatcgggcatcaaggaacaattcttggaatttcttgcaatcgcgtgcgcatgcaccataccgcattggccgaccaagttcgcccaagaagtctgttccatccgaagaatgtagtagtcgagattctagcgagaggtgccacgcgaacggattgccctcagcccagatttcctggatgcgttggcgtgagtatatcgaataggcgtctagatcgaaccggtcatcgaatccctccactatggccaggaggtcgatgtcagagtccggcccgatatctccgcggcagaccgatccaaatgcgtaaatgtgcatcgattagcgcctattgaacttcttgaagacgatagagattaggaacgcgatagcaataagccgaaccaacgtcatgatgccgacatatggcttgggataatcgactggatcgaatggcacgcccatgaacaattcgaacgaacgaaggaaggacgttccccaactgctcgtcaaattgggactgccgaactccacgacgtcgaaggcggtcatcgcaagcaggaccagcagcacgcaacgcagcaggcggccaaggctctcgccgttaccccagacgaagtcgcccaaccggaagagcagaaggtcgtaaagagctttccaccacaagacacctgtgtatttcgatctgtagtacttttcgtcagagaacacggccttccggcaatgaataccggttgcttcaagctccaccctcatcgccttgttggctgatgcgacatcccccaactgggaaaagttcatgcggagcgtgcgggcgaagcgggcacgaaggttttcaggcttagggtattctgtgtcgaggatggtcggatcgatcgtggtcttctcgaacgacgaatagtcgaacgtgcatccggaaaacgtcgcgccgtggaaattggaaccgacgaaccgacagccggtgaaatcgcaggaattgaattgcgcattcctgaaataacaagcgtcgaacgtagaatatcgaaagtccacattcgtgaattttcttcccttagcggataaccgtacgaagacatggccgacgtagcgcgaggcagattcgtcctgatcaaatctcttgtccaggagaggagtcttgccgttatccgtgtacatcttccgtccagtgacattccggctgccagtaatcatgtcagattttacgagcttggccgagacaccacaatcaggaatgcatctcgatgtgaacgtgctgggagtgaattgaaccaagcaatctgaatggacgactgctccccgtcgcggcgatccaaattgcgaatgccgacaatgggcgcataggcgccggtgcgtcaaacgctgcaaccgagaaatcgttcagcccaatgcgacgacctctactacgcattgccataaccaatgtaaaactacagaagaatgcggggcacaactgaacctttcgcaatttcgatgcgagcacgtgcggatgccgaaagccgtcgcactccgaatttcctagaaatttcgacgggatctccttcgactgccgcaagctcggcaagcgcgatgaactcgatctgacgaatatcgttttccgtggccgggaaacgggcaaccgaccacgccagggaagcctgacgatccatccaaacgaaagcattgccgccttcttccttggtaacgtggtgctttcggcgcacgattttcatcacacgatccctgatgacccgtccggcgcgttggaagccgtgggctcttgctatccgctgaacgaggagaggttcggcgatcggcgcttcggtggcgaggacgtgatcgatcaagagttcaagggtcgcatcataggtcggctcgtaaaaatcctgcgggagaatctgggcttcgaagcccgcgaatgtggacacatggtagtgctcatccgtcaccggcgacgccgcccgtgcaataagctgcgcaggacgagtgtccggcggatcatcgacgatatcatcgtcgggcgcaggaaatagcgtgatggtgtcttccgtcgtttccaacatcggcgacggctctgcctcgtcgatctgaacgaccgacggatcgggaatggcggtttcctcggcggcatcgattccgtcatcggcaacggtcgccgcggcggctcgctcggcagcggcggtccgatcggcggaaaggaactcctcgatctgccggtggatccgatcggcggcgccccgtctatcgatccaccagtcggtcgaccaaattcgcaggagcttccagccgaggttctcgagaatcgcggcgcggaccttatcgcgatcgcgggccgtcgcggcgctgtgataggtcgcgccgtcgcattcgataccgagcaggtaatctccggggcggtccggatggacgacgccgaggtcgatccggaatttcgagaccccgacttggggcacgaccgtccatcctttccggcgaagttcgtccgccacggcttcctcgaatggtgaatctgccccgccgagcgagccgcgcacggcctccgcaatcgcccgcgggccgcgctcggcataggcaacgaaattcttgaggtcggtcacggcgcgtgcggtagtccgggtcagatcgatcattcccggctcgaaggaggtgaacaccaccatttcggaccgggcgcgagtgatcgcgacgttcaaccgccgctctccgccctgcttgttcagtgcgccgaagttcatcgacatcgttttgccggccggttccgtggggccgaacccgacgccgagcaggatcagatctcgctcgtcgccttgcactgtctcgaggtttttgacgaccacgggctcagagcactcgtcgctgaaagcgggctcgatttccgggtggcggcggcgttccctgtcgagaagatcttcgacgaggctctgttgctcggagttgagtgtgatgatccccagggtcagcggcttgccctgggaatcgacgaatcccggatcgcgcaatcgccttatcgcttcctcgacgagagcctgagcttcaatggggttggtcttccccgcgcccttcgcgtaaacgccatccacctttctccaactcaccgcgctcgcccgcgtcaccggagccgggaaggtcacgagcttcccgtcgtagtaagcatgattggaaaacgtgatgagactttcatggcggctccgataatgccactcgaggctatgctgcggcactccggcagccaggcattcgtccagaatgctttcgaggtcggcctccgtcccgtcgtcgccgtcggtatccgacgatccgcgaagaaagaagttcgtcggcggcatttgccgcgggtctcctgcgacgatcacctgcttgcctcgcgccatcgcaccgatcgcatcccacggcgtgatctgggaagcttcgtcgaagatgacgagatcgaacaaggcttgatccggaggaagatactgcgcgatcgacagcgggctcatcagcatgcacggagccagccgcgtgaaggcatcacccatctcggacgccagcctgcgaatcggcttgtgcgcgcgttgcaactgaagctgatgcttcaggactccgtagccgccgagcttcccgctttcgtctttcgacgggatcaaaccgcagagcctggcgcggatgtatcgaaccgagagttcgctgtgacggtccaccagttcccggtatcgttggatccggtcggcgtgttcgcccgacatgaagtggcggaggatcggctcctcgtcgatccgcgtcgcggcgaaccaccgtgcatatgcgacttcgaaggcacgaaccgtctcatttggcgcaacggctccgctctcgaccgcttcgaccagaggcatcaagccgagtgaaatcgcttcgctccgcgcacgctgccagtgggtccaggcgttgaggcgttccgcatgcgccgcgattgcttcggcctgcgcgcgcagggcgtcgaaatccatccgttcgggcactttcgccaacgtgccgaagcgttccatggccacgtcgaaagcattcaaagcctgcccgagacgagcggccgcccgcgcaatggccccattcggatcgagcagatcgttggcctcgacgacgagattggccaccgtcttgcgaagacgggcaaggctgtcgggatccggggcctgcgccgcgatggccttgcggagacggtcggctcgcgcgaacccctgagccagggtgatcgcttcggtcgccagccccgaccagcccggcacctgcgcgaggcgaggctcgaacgtgtcgaactggacgagaaggtcgcgaagctgtgcaagccgtggcaggtcggcccccgggtcgacggttccagccgtgcctcccgcctgctgaagcgcaagcgcaaccttgttgcgcgcctttcccgcgaagagtttcttctttccggcctcggcccattgttcccgtagcgcctcgatcgggacgcggcgggcggcctcgggcgcgtagggcgccgacagttcgtgctcgaccttgcgatactcggaaaccagcgccatcgccttgccggccgacgtattccgatccacgaagtcgggcacgaacgcaagccggaggtcatgcccatgcatatcgagcaggagctggacgaacgtcaggagagcagcgattgcttcacgatcgttcgcctcgatcgagagcccggtcgccgccagcaactcggcggcggacgccttgaagtcgtcgatcgccgacggaagacgggcggatgccgccagaatggcttcttgccagccgttcgaccattcggcctgcgatacgcccttcaggtcttgcgggagatcggcaaccacgttccaggcaattccgagccgtcgcgtgacgtcaccgaaacgggacatgtcgttggcgtcgtggtgtgctcggggggcgaacgtcagcttcaacgacgcggcttcggtgtcgcgaatggcgcgtccgatcgcccggtgaatcgtccaaccgctcggatcccgtcgatgcagcacgcggaccaagtcgttgagatcgtcgcgcaggcgcttcgcctccgtcgcctcatgccgccactcggcttcggtcagggcatcgcgggtcgtccacgcccgatcgagttgtttgagaacggcgaccttggtcgccttggccgaatgcagctcgaggcagaacggcccgaggcctttttcctcgaggcggcgctggaccacgtcgagggcggctttcttctcggcaacgaacaggacccgccgaccgaggcccaaattatgcgcaatgatgttggcgatcgtctgggacttgccggttccgggcgggccgtcgaggacgaaatggcggccctcggccgacgcgacgaccgctgcaagctgcgagctgtcggccggaagcggagtgaagagttcggccggatcggtctttccgtcgaggtcttccggtctcggaaattctcccgtctgatcgagcggggcgtcctcccgctcgatcaggtgccggaccagcgggctttccttcaggcgcgcggcacgatcgacgagatccttccacatcagatacttcgcgaacgaaaccgtggcgaggaccacctcgggaacgacctcgaagccggggatgtcgcgaatcgcggcacggacgacccgccagactcctgcaacgtcgatgccgttgtcatctttggggagttcgccgctcaatccgggaatgttcagggcgaaatcctggcgtagcagctcaaggagtgtcaggttgaatcgcggttcatcctcatggtgtcccatcaccacgcccgaaagcgcgctccgacgctccagcttgaccggcagcaggatcaacggcgcgcggtacactctttgttcggtggcggactttttccacttaagaaaaccgagcgccaggtagagcgtattcgcgcctccttcctcgatgtcgctacgcgccttgcgatacagctcgacgagagcggcgtcgagcttgtctttggagagaagcgagagagcttcaccgcgttccatcgcggttcgcgcaacctcttccttcagattttcccgattcctggcctcgtagaggtcttcgtcgcgtccaccgatctcaagatcgggcatcggtacgatgcggaccttctttccgctcgcgaggagatcttcgagcttcccagggtcggggcaaaggagacgcaccgccttcgcggcttccggtagatggagcagacggttgcgggtggtgaggtccagcagcttgcgttgccactgctcgatccggctgccggcggtctcttccggcgcctcaaccgccacatcgaatgctggcagaaacggcgcagcctccagcccctccaacacaaccggtttatcggcgctcatctcgccttgaccggtaatccccggcaccccgagtggacgaatcttctgcatccgtgcgcggtggacgtcgatgacggcgtcgaaccggtctttggagccttcggcgatctgcctctgtgccgcagccatcgcctggctgaatccggcgggggaagccgacgtcgcgagtgtcgtctcgaaaaccacgagatcggaaagatcgaggtgacggcggagcgctgcggcctcatcggtgacgagggtggcgaactccatcggctgaagccaaaccccggcaaatgcatggccttccgtgagaaccacgagcgggttgagccccgcctgctccaacgtcgccgcaaacagcagcgtagtgtcgaggcacgtcgcgacacgtccttccaaaatggcggacggggttcgaatcttctgcccggtacgttcgaagcttgcgggaggaaccgcgtaggaaagttggaaacccgcgatcgcggaccagatcgcggaggtgatttcccagacgcgttcccgcttgccggaagcgtagccgtcgagagcgtccggccgccccgcgcgccgcagaatgtcggacgccgtcttcaggacctgatcgaccgccggatcgttcggcatgatgaaggcgggcaacagctccaccatgctgtcggcaccgccccactcgtttcgtgcgagaatctccaccgcttgggaaaacgtcgcgagttccgtgccgtccgcagcctccagccggagcgtgatcgcgcctgacaggctttcccgcaaatctccgagcatctgggcatgcagcgcaacgtcgcgttccgaaacgcgaagctcgtctccttcgccgaggcggtcgattggccacgtccgcggcttcagaaatgctggatcggcgccgaggacgaggtgcagattttccagcgcagtatcggagttcgagagaacgatttctcgaatgatcgggacagcattctgatgcgacgcaaagccgatcttgcttgcgacagtcgcttgtatcgttagcgccatgttctagctcagattgctccgcacgggtgcggaaattgagggatcatgcggttaagtgcattttctgactgtatcgcgttatgcgcgtttgtggaacctgtcccaggggaatccctgccggttttgaagctcacgcgctacatgtctcgccccggtcagaaagtacatcagcagcgtcaaagcgttcgtcaggtctgtcgccaaagatcgctgccacgtttcctgagcaggactaatctgcagtagcaaaatttccggaaacgatcagaaaaaacgagtgcttccggtatcagcaaccatcgtcacgaatgaaggaagggggcgctctgcggaacgagttcaaaggggaccgaaaggggacgatccggtttcaggtgggagataggcgacagcaaacgctgcgttgcaacgatgtctttgacgactcacaacaaaaatccctgccattggcagggattgatgccggcaaacgaccttgggatgccgagcccgcacaaggggtcgaatttacttgcgaaaagcgaccacccctcgatttgctacacctaagttgatagcattgatgggtatttagcgcaagaaggacggcatcatgcaagagcgtgtgttcggattcgatatcggcacgacctccatcggtttcgcggtgatcgactacgatcccgatcagcagaccggccatatccagggtctcggggtgcgcatcttccccgaggctcgcgatccggatggcacgccgctcaaccagcaacgccgcgccaaacggatgatgcgccgtcagctgcgacgccgtaagcagcgccggcggtctctgaacgaagcgttgctggcggccggcttgctgcctcaattcgaccaggacaaggcttcggaatggtcgagggtgatgctggccgacccttacgatcttcgcagtcgcggccttacggagccgttgaccgctcacgaactaggtagggcattttatcatcttgccaaacggcgccacttcaacggccgcgacctagaggaaacagaaaacgaggaagcggacgaaaaagaagcgaggaccaatcgggaatcaaccctggccgccctgaagcgggagaacgtcacccttggcacctggttggcgaccaggcccgacggcgtaaagcggcgcggcgttcatgctgaccggcaaacggtagtggcagagttcgaggcgctgtggacagcacaggccccccatcatcccgtcctgcgagacgaatcattcaaggaaatgataacggacgcggtgttcttccagcgtcccgtcttctggcggaccagtacccttggacattgccggttcatgccggatgaacccttgtgcgccaaaggctcgtggctgtcgcaacagcggcggatgctggaaaagctcaacaacttggcggtggccggcggcaacttgcgccctctcgacgcggaggaacgggctgcgatcctggcgaagctccagacacagggaggaatgacttggtctggagtacgcgcggcgttaaagccccttttttcaatgcggggtgagaaaggcgccgaaaaaggactgaagttcaaccttgagctgggaggagacaaggggttgctcggaaacaaggttgaagccgaccttgctagggtctttggtgacgattggccgacgcatcctcataaacaggcgatccgcgaggccgcctacgacctgctgggcggcgccgactatggccacacgaccgacgataagcgtgtggtgatcctgtccaaggccgagcgccggaagcggcgggacgcggcagcgcaaatctttatcgatgaattcggcgctacgccggaacaggccgcgaagctgcgggaactgtctttccagccgggttgggagccgttttccatagccgctctccgcgctttcctgccgaagctggaggaaggcatccgcatgggcgaactactcagcggaccggcctacgacgattggcgcgataagacgtttccacaccgcgaccggcccagcggcgaaatcctcgacctactgcccagtccaaaggaagaggaagagcagcggcggatcgccaacctgcgcaattccacggtcgtacgggttcagaacgagctgcgcaaagtggtcaacaacctgattcgtgtctacggcaaacccggtcgcatccgggtcgaactggcccgccaggtcggaaaatccaaacgcgagcgggaggaggaacagaagcgtaaccgcaaaaacgaggcggagcggaagaaggccgagatcgccctgcgatcgcagggcatcaccgagccttcccgcgacgacatcgaaaaatggcggctgtggcaggaatgcgggagctgcgacccttactccggccagcggattggttttgacgacctgttccgcaatgacctgttccaggtagagcatatctttccgcagtcaaagtcgttcgacgacgggttccgcaacaagacgctgtgccaccgcgactggaacctgctcaagaacaaccggacgcccttcgaggcgtttggtcacaccgatgagtgggctgatatgaacgatcgcatgtggcggaacgtcagagaaggccggatgagcaagggcaaggcgatccgcttctgccgagacgagaaacttgacaacgatttcaccagccgccagttgaacgacaccggttatgctgcccggcaggcggtggcgcttctcaaacgcctgtggccggacttggggccggaagcgccagtgatggtgcaggcggtttccggccgcgtcaccgcccagcttcgccgactctggggccttaataacatcctctctgacaacggagagaaaacccgcggcgaccaccgccatcacgcggtggacgctctcgccgttgcttgtgcccatccgggaatgacccaacagctttcccgcttctggcaggatgccgacaatccctccgcccggcgtccccgcttgttgccaccctggccgaccatccgcgccgaggccgacaaggcggtgggtgaaattgtcgtttcccatagagtgcgcaagaaggtatccgggccgttgcataaggaaacaacctacggcgataccggagaagacattaagacgaagaccggcgtttatcgccagtttgttacccgcaagaaggtggaggcgctaaaatccggcgaactgaatgatattcgggacgaagaggtgcgtcggatcgtccaggaatgggttgcctcccatggaggtgatcccaagaaggcgttcgccacctacccgcacctcggctccaacggccctgaaatccgcaaggtccgccttaccacaaagcagcaattgaagctgatggccccagtgtccaccggctatgccgacctcggtgccaaccaccatatcgccatttaccgcaagccggatggcaaagcgggcttcgaggtggtgagcttgtatgaggctactcgccgtcttgcccgccacgaaccggtggtgcgacgggactgcggagaaggatcggcattcgtcatgtcgctggcaccgggagaagcattggagtttccgaatggagaaggcttctggattgttcaaggggtatgggcaaatggtcaggttgttttggagcacgccaacgatgcttgccatgcgaccacgacacgccctgcgcccagcgttcttctgaaaaaagcagccaggaaagtttccctcgatcccatcggccgcgtccggccggcatcggactgaggtgctccggtgctgcgtaagaccatcgagattgccacccccggcaaccggctttcggtcgctaaccgccaattggtgatcgaacggccggaccggcagagggcaacggtgccgatcgaagacatcggggtcgtggtggtggacgatatccgcgccacctacacccaggcagttttcatagatctgctggaggccggcgccactgtgatggtcacgggacgcgaccatcttccggccggcatgatgctgcctctggacgcccaccatgtgcagacggcacgccatatcgcccaagtcgcggccagcgggccgaccaaaaaacgggcctggcaaactctgatccgtaccaaaatcgccttacaaggcgaggtgctgaaaaactttaccggcgaggacggcggactcacgccgatgtcccgccgggttcgttccggagaccccgataacctggaggctcaggcggcgcagcgttactggccacgcctgttcggcccagcatttcggcgggatcgaacggcagagggcgtcaacgcgttgctcaactacggctatgcggtggtccgggccgccaccgcgcgggcagtggtcgcctccggactgatcccgtcccttggtgttttccacaagaatcggggcaacccgttctgtctcgccgacgatctgctggaaccataccgtccgttcgtcgattggcgggttcggcagctatacgatgaaggcgacgaaaaagccctctcgctcgaccatcggccgacacgagcggcgctgttgtcggtgttcaatgagacggtggtcgtggaaggccgccggctgcccctcctgctggccatcgaatccggtgcggcgtcactctctcgggcattgaccgagggaggcaaaaacctcgccttgccagaggggctacccgttcaaatggttcccgaagaagacgacagggaacctgactgatggcccatacccggccggtaccacaattgccttgggggtggcgctcgatgtgggtaatcgccatgttcgacttgccgaccttcaccccccaagaccgtaaagcctacgcccggttccgcaaggatctgatcgaggacggcttcaccatgatgcagtactcggtctattatcggcactgtgcctcgatcgagaatgccgacctccatgccaagcggatgggggatagggtgccggcagctggcgaggtccggttcatgaccatcactgataagcagttcgcgcggatcagggtctatgtcgggaaaaaacgccaacccacccagccatcaccttcccagatggagcttttttgaaccatccgggaaggcgaagagcgtgcgttttcagtttgttacccgaggggcagcaaatcgaggagcggccgcaatccgcagctatccggcgttgatcatccgggccgcgttcagtgtagcaaatcgaggagcggccgcaatccgcagcgaggagtgatgcagatgaagagggctcagaagtgtagcaaatcgaggagcggccgcaatccgcagccgttcttcgggcggatctcgccgccgccgtagtgtagcaaatcgaggagcggccgcaatccgcagccttcccgccagcaggatcccggccttgttcagtgtagcaaatcgaggagcggccgcaatccgcagctcggggatcagcctgttccacgcgggcggcagtgtagcaaatcgaggagcggccgcaatccgcagcgtgacggcaaccggcgtgacctcgcacaggagtgtagcaaatcgaggagcggccgcaatccgcagcggggcgctgggagcgcaccgagcgcctggcagtgtagcaaatcgaggagcggccgcaatccgcagctgctgatcaacgacaaccagtacgccagcgagtgtagcaaatcgaggagcggccgcaatccgcagcctcaaggagactctcaaggcgcaagggctgagtgtagcaaatcgaggagcggccgcaatccgcagctcagacgccttcatttcggcggtcatggggagtgtagcaaatcgaggagcggccgcaatccgcagcaacgaagttgaagtggtcgatccgaagttgagtgtagcaaatcgaggagcggccgcaatccgcagcagtgccaccgcaaggcgaccctcaaggaggagtgtagcaaatcgagcggccgcaatccgcagcccccgatcgaacttgtagagcgcatctgtgagtgtagcaaatcgaggagcggccgcaatccgcagcgggcgtttcggacgacctcaggctgcctgggaagtggcattgaggaacggctggtcacttgctatctgggctacgggcgcgaagcggcgcttggctgttcctcgcgcgaggggcgcaaggccccttggtcctggtgttattgggggctactgagcgaacatctggcgctcagtagcccattcccatcccgtgttcgagagccgggatttttgccgcctgaacccatctcggcagattgattgacgacgccttctcgcgaccttgctccaaggtggcgaccaggcgcggtcgcctgctcgaattgtcgatgagccacgcgcgatcggccaacgccacgccttcggcgaggttttcgaggctgcggtagtatcgccgttcgatatctcgactcgccacgaaatgcccgccgtcctctacgcggccagctacgcggccagcggaaaccagcggggataccgtggcgacgaagaagagattcaccttgtacccggaagccttggcctctcgcatgaacgcgagttcgctgttgcccgagaacgtcgtctcgattgcgaagttctccttggcggcgaggaactggcggcgacgggcaatcgccgcacgcccggccctcagggcaacgtccggagcttccgggcgagacggctcgatctcccgtgcgatctcgtcaggatttacgacgggcagccgacctgcaaggtgacggcgggtgaacgtcgttttcccgctcccgttcggaccggcgacgatccagacttgagggcgcatcacagattccggatgaaaacttcggtgtcgccctcgaacgtgacgagctggcggctgccgtccggcaactctttcaccaaggcgtcgcgatatcgatcgtcggcatagtagatcgcccgaccggcggcaaggcggcgctctgcttcctcgccgcgatcggcctcgatctcgcgagtgaacgcggccatgaaccggcattcttcggcgtcgctcatggtccccaacttgctgaagtcgagatcgggcataccaaacctccgtgtgcgtgtcgtgtaggagctcgtgcctgcacgacgaaaagtaacataggaaaagttgcagttcggggcaaaaagttgcacttcccctccccctatgatgcggacatccgaaccggatcacacgccgcgagcaaaggcagaggctcgaagttggtcaagatggcttcgcgcttggcggtattgccgccgccaacaacgcgggtttccgtcacggtccagtcggcgagggagagttcgaggagagtctttatttcgcccatcataccacctcgaacatgtcgatctgcgccgagggcgtggcctcgggctgtggccgttcggaagcggctttcttggcctttccgcgcaacagcccgaccgccccggtctggtgagcgatcgaccgcttgagcgcgtccagccccgcaaatccgccatcttcgagaatgcgacagaaggtttcgaccaccggcacgccttccggcgtcaccatgtcaaggatcgcgggtgcttcttccatcaccagggtcttgggccgcatctcgacgatgaagcgggcgtattcgaagacgaggctgttgcgcgggtccatgacatcctgcttccccgcccggctgaagccctggcacggaggtccgccgcagatggtatcgagttcaccgacgcccagaccgattgcttcgagaattcggttgctcgtgagcttccgcacgtcgccgacgaagatgtgtttcacgcccggcgtcgtggccggctcgcgcgcgatccagccggaacccgcgtgaaagatgttgtcgagccgcagtttgctgctctgcgacaaccctccggcggcgtcgaacctgattccctgacgccgatatgacttccgtagctccttttccatccgcttgcgatcggacggttccacgtaatgcatggtcacttcgccatcccggcacaggttcatcatgtaggtgatgactgcggacacatcccactcgacggccgcgacgacttcgtaaccggcctggatgaagccgagggaaaatcccccggctcccgcaaagaaatccacggccttcggcttggcctgttgcgtgacctgcgcccggacgacgtgctccgggagaatgaggccggagggcatcccgacgtactcagcgccgaggaggaacggaggcttattcatcgccgggcctccggcatgagtgtgcagtcgcgccagcggcgagcgcgtccgcagcgaccttggcgggatcgtcgatgtccaccatctcggtagtgccatcgtcgcgccgaacctcgcgacccctggcgatcagccgcaacgtttcttcgaggaaagaaatgcgggcgtgagggaaaggcgtggcggcgatcgccagtgcgtcctggatcagatcaaggttgagatcgccgtacagcgtaagagcggaatcggagagaatgctgccggtctgcgccgccttgagttcgtcgatgtgctggctttccagcaagaacctgttggtcatcgcctcagccctccacgttctggagttcaccgatggcgtcctcgacgcccgaggcggcattctccatgctgtcgatggccgtctgcatggcgtcgccgcgctccctgccctggaaactatcgggcagattgtcgaacgcctcctgttcttcggcgcagatatcctggatggcctcggcgagggtggaaagctgctcgcggatctcgctcaagcggctccggcggtccttgttcacggtctttctcctggacttgacgacgggagaaaggggccttccgaccccttctcggtgtggggtcagcgtttgatttcgatgatgatgttgttcaggtccgtcgagacgtgaacgtcatcgaggccgctcaggtatccgtcgatgtagaagtccatctcgggcgtgccgtaacgatagccacgcttcatgcctgcgggagctgcgccggaaaattcgcttcccacctgaagggcggcggcatcttcacagcctttgtcgcgagctttgacacacgccagaatttcttcttcggtcagtaccggcattctcagtttctcccgcatgcgcctcgggaccatccctcggcgcgaccttttccccgtcgtccactcgggggtagcaaggggaagggctgaacaccccggagggggatcgcccgccctgcacggagccgaaggcgtaggaagggtggggagaccggggtgttcacgacgcgaagcggcgcttggcccttccccgcgcgaggggcggagccccttaggcttgcaggcggtcgggccgctgcggcgggaggaaaatcgttaaatttcatgcaacttcgtgaaaccgaagccacagaaccgttaaacatcgtgcaactttttgaaactcgggctgtcctggcgcgctcatgcgtcatagcgcaccccgcttccggcctcggccgcataaaatccccggatggccgcgcgctcctcggcggcgcggggattggcgagtgcgcgtatcgagcggtcgaggtggagctttccggccggtgcgcgtcggatcgagttgaggaagtagccgccgatcgacgacacctcgccttcggcggtgcggcggtccgcgatcagcaggcagagcgcggcggggtaagcgccgatcagctcgcaagcctgtcgccaagcccacacccccacatcaacctcggcccacaagctccgcgcagcctcctcgatgtcgccgaccgatgggcggcggcaaccggcgggaatgtgggcgcggaagcgatcggacgccgcggcaagagcgacgacgggggaaaccatgtaggcccccgtggcttcggggggcatgaaggcggggccgcgatattcggctgcatcggcgtcgggctcgggccataccgcccgctccctccgcgaaagcccggcggagcgcgtttcgcgcaccgacccggcgggctttcgcgcggctgtctccccctcgggactacagcaccccgtaaggggtgtttataggttaagttctttttgtaagtgtcggcagttttcttccgacgcgtcggaagttttcacgtccgatccacaggttttccccgtcagcaacagggcctcaagctcccgtgcgacgcgctgcgcgacgacgatcagggcttcgagttcgcgcacgtcggcgagctggcgcgcagtgacgcgctcggcgatcggcgcggcgatctcggcggcatggtcgcggtcggcctgcggcacctggtgcaacgattgcaccgccaccagcaaccgccgcacccgggcgcgctcgatcgtgagcagccgtttccgctgacggcgttccgcctcggcggcgtccagcttcgccttctccttgcgcagcttcggcagcttctcggcgatgccggtcaactcgaagccgaaggcgtggacgatccggccggtaattggatcgcgttgcgcatagcggcggccgttgccgctgcgtgcatccggtagatcgaggacggcgatgatttcgcggtcgtaggtgttgatttgccggacgctgacgcggccggggtatcgcgcggcgaggtcgccgacgttggcatacaccacggcgcgagcgccgggttcccagtcctcggcgcgggtgcagttctcaatcaaccatgacaggtatcggagtgccgccctcccgagattgaatgtgtggcccacctcgggcagcaaacgcagcagttcgcgccgaatcgacgtgtcgcaaggcattgtccctcctcaaggagggcgtgacgacggaaggaaaaaaagccgaatcgaggcgttcggaaaagcaggctttcccgttgacactgcggtccgctacagggtaaaaaagaagtcgccaaacattctttttacctcagtagcaggccgctaaatcgctcgatttggcggccttctcgcttctaagtcattggcgccacgcccttttcccctcttcgattcgtgccccggcttcgccttgcgaaatcagcccggctgtgctattatagcctcacgaatctgcggggattattgggcttattcgccccccggaccccgcacagggccgtggaccctgtgtacccgttcactgatttttccgcgaagcgggaccgaatcctcacgcgacgtgacggatgccagccgccgcgcggcggaagaccgggaacgggatccaagggcccgaggccctcggcgggtgtgggcggagcccacgcctggttttcccgcccgccccgcgatcacggcagcgcgtccagcggcacggcggcgacggcttcgccggggtcggcgccggtatcgagggcgacccagcggtcgacgtcgtcgtggatgatctggtagaggcggagcttgcggttgatttcgtcgaggaacgcctgctgttgggcgatcgaccacgacgaccacgtctgctggtcgagatcgaggatcttcgagcggtacggcagatcgtcgaggtattcgccgagcagaccgagatcggcgagcttggcggccttgggatcgttgacggcgttggggtcgcggccgagggtggcggcgaccgagcgcatccgcgagaagaagtcggcgggcgcgagctgcgccgcctgcccggcctcggcgatgcccttcagcacctgctgcatgtcggagagctgattgcgggtcagcagcacccgcacctcggtggtcggtacttcgggctgggcgagcgaacggtcggagatccacgccttgaacagcggcggcgcctgggtgccctcgacgcggccgaggtaggcgagttgcatcgcgtggccgagcatcgcggtatcgagtttgatgcggtcggcgggattgtccgcgcccttgagatattcggggtcggaggtgcgggccgcgccgggcgtggcgtcgccgcggtaggcggcgttgacctgggcgacgatggcgtcgccgaggctgtcgacgatccggccgtaggcgtccaccgcgcccaccggcacgtcgtagtagagcggccgcggcaccaggggatggctggagagttccttgtactgcgcctccgcctccgcgtggttggccttgccctcgggggtcttgaggtgcatcgcgtagatcgcgacgccgcgatgctgggcttcgagcttgacctgcggcgcgtcgagcatggtggaggagagcggatcgttgcccttgagcgcgcccgcgtcggtgatcaggacgacgtagcggccgccgaagttgttccaggcgacgtcgttgagcgcggtcatcacccccgcgtaggcgtcctccgagaagcgcggggtggagacggtggcgggcttgaccgccgcgaccttctccaggaattccttgcccgacttcacctgttccgggtcggcgtagagcttcgaggtgtattcgagcttcggtgcggcctcgaggttggagcggtaggcgaccaggccgaagcgcacgcgatcggcgatcccggccttctcgacccgttcggtgatgcgcttcaccgcctcgcgggtgcggtcgatgtatggccccatggagatcgtggtgtcgatcacgaacaccaccgcggcgcggaagttgcgcagcgccggggtcgggtcggcgggcttgccgccgggtttggcgtcgtcctgcttcgacaccgaagcgatctccagcacccgcgcacgatggccggtgccggtgaaggtctcctcggccgagagaatcggcagcaggtagaagttcttggtgatgtcgacgtaggtcgcgggctcgatcgagaccacctgcggcgccggctggcccgccagcgccgccttgcggagcggcgcttcggccttgccggggtcgtcggcttcgagcaggccgttcagatcggcgcggctgcggaacagcagcgcgcggtcgcgccccgccggattggtgaaggcgagcgcgagctgctgcttccacggcaaagtaaagtcggcggagagccagccgtcggtgcggccgcggctggtgaggccgacttcgagccattcggtcttgccgacggtcttgcgatcgtagacgtagaaccgcgtcagcgccggttgcgccgcgcccgggccgtcgccgggcgagcgcttcagcaccgcgcccgggcgggtgagcacgcgctgatagagggtcttcttgccttcgagcagcagcggcgcgcgttcggcggcgaacgccaccggcgcgccgagcgccaccgcgaccccgagcatcagcgcgaccagccccttgcgcatcgcgtaacctcctatttcgcctgttccagcagagccttggcctcggcgtcgccctgcgcggcggctttgccgagccaatccttcgccttgtcgcggttgcccgcgccgccctgcggcaggtcgagaagaatcttgccaagacggcgctgcgcctcgacgttgcccgcctgcgccgccggttcgtaccagtacgcggcggtttccgcgtcgggcttgtccatcgggctcgcggccttgctccaggtgtcggggtcgtacatatggccgagcgccagcgacgcctccgccgaaccgaggcgggaggcgtactggtagaccagcatcgcgaaatcgagccggccctgcccggccagttccttcgccttcgccaccgccgcgtcggcggcgggatcggtggcgagatagcgagacagcgcgtcgcgactgtcgatcggaccgtcggcgggcggccggacggcgggcgtcgccaccggggtttcggcaggcggctgcggcgcttccagccccttgccgaacggcggcagaccggcgaagtaccacccgcccgcgagcaggatcagcaccagcaccgcgccgagaccgatcaccc

SEQ ID NO: 3437 - DNA, 22925 bp, synthetic construct
  misc_feature 1..22925: note = Synthetic
  source 1..22925: mol_type = other DNA
gtcaggtcggcgatatcacgacggcctcacccgctgccggacgatatgtgtgggaaagctccagccgggggcttttcatccggctgggcagtaaaaatcgctatgccatcacctgcgattttgtgggggattttccgatcggtggtgcggtatcggcgccgctcgatatcgcccggttgctgctgacggaaacgctggcgctgccatcctcgctgatcgatctggcagcgtttgcagcatccgggccgtatcaatcgtatgtggctgggttttatctggacggcggcagcccggaaaacggcgatgccctggtcggcagaatcatggcctcgatcggggcgcgactgatcacgtcccgtgcggggaaactgcgtccctatctgctgcgaagtcccatccgtatggggacggaacctcggctgaccacgacgcatatcatggatctgaaggcggtcgcgttgccggaaacgctatccccgcctcccctgcggatcgcggtgggatatgcccgcaacagcacaatccagacaagtggtctcgatccggatgttgccgctgatcggctgcagtttctggcggatgagtatcgggaagccggggcggtgaatgcgtgggtggggctgtcctatcgacgcccgaatatgccggatcgcattccatcggtgttgctgcgacagcaggatgcgcaggcggtggcaagcgattttatcacgctatggggtcaatctcgtgcgctttatgaggtcacactgccgattgaggatgcgctgtccttcgatctgaccaacgcggtgatcctgcaatacccggtcgctgatctggggaacgggaaaatcggtcaggtcgtggcggaatcaatccgcagtcatgacgcgacatcgacaatacgggtgctggtctgatgggaactatgctgctggcatggaataatctggtgccgggatctgtgctgtctgccggatcggcggagcccagcctgcctccacagaacctgcagacggatcacggctccgctgatgccgggtggcagacggcggccggcgtcgtgacggcatcggcaggcgcatgggtggaagttgatctgggtagtatccgtcctgtttctgttctggcaatcgcacacaccaatctctctgtcgggtctggaaaggccactgtgcgatggaccatcagaaccgcgcagtccggaaccgtcgtctatgacagcggcactgtcgatgccggcatcgtcgccgggatcgggcagagcatacgggtgatcccgaacgcgcccgtcacgggcaggatcgtgcggcttgaaatcaacgatgcgggaaacccggacgctttcatcaatatcgggcagatgttcatcggcgatgcctggatgcccgccttcaatttttcctatgaatcgaccatgtcccgtgacgaaagcgcgatcgaaattcgcagtcgtgccgggcttcttttcccacgcatcgattggacggcccgcgtctggaatgtcgtgcaaaagactgtacgccgctccgaaatgggtacattactggatctggatatggtcgcgcgtcgtcgaggaaatgtactgttcattcctgaccggacaagcaccgacatgaaccgctttgcggttctaggcacgctgaagcccacacagatcggatacggcgctcagtcgggcgctttccgcacatggggcttcacaattacggagcgtttataatggccggtcttgtcgcgaatatggtggtggaagcagcgtcctcgcctggtaatggggccaccgtttccctgctgggtccgctgaccgggcgcgtcggctttgtagcgtcattcggatcgggcaagaaatgcgcctacgtgatcgaggatgatacgcaggcggaaatcggcatcggcaccgttacgtccggcagtccgaatacgctgtcccgcgacaccgtgctgtggaccacgcaaaagctgaacagtgccccacagagactgaatttttccggatcagtccgcgtaagatcggcagccccggcagaatacttgccgctgctttcgcctgaaggaaatctgacggtccccggaaccgtcaatgccgctggtatggcagtatcgggtaatgccagcgtttcaggcgatctgactgggatgtcgacgattgaactgggttcaacgtccgtccagcgcgccacgtttatcgattttcatacagacggtaatgcatccagcgacaacaacgcgcgtatcttcgtatcgcctgtttccagtggtctggcagatatgacgctctatgcggcatccgtttcattcagttgcagcgtaaaagtccaggccgggtcgaacttctatgcaaatacaatttttcctgtttcaggaacgcaaataagtttgagcgccgatacggtatctacctccaaagatattaaatgcactggaaatctggctgctactggcggcgtgaattctgataaatgggtgtatgcgaaagagtggatatcggcagatggcggcatggagtcaaaagggaatgtcatcattcgtgatacattgacgtttgataacgccaattatttcaggttttataaagggtctgcaaatacgccatctgtctggtttaatggaaccctcaactatattccatggtcaccgaacgtaacgcaattcaagatggtctggcccagtagcggcagcccgtatctcgaaatacagtccggtggcacatatggcgtgacggttttttcctctacgaaagagtggaaaaaagatatttcggctccagatattgctgatccgctttccgtggtacggaaaatgccggtctcggccttcacatggcggcagaatgaggcgcgtattccaatcggattcatcgctgatgatcttgctgaaatcgcgccggatgccgttttcgaaatcggcgatcagaagcttaagaacatcaatcttttgtctctatctgcctatgtaattgcggccattcagtcgctagccaccgccgtggatgaatacgaaaagcgcatcgcgtctctcgaagatcgtatcgccaaactcgaaacacgctaattttttcgtgagggttccatgagattgtttctgacggtttttgccgtgtggaccgctgtgatggcatcgcccgccgcattcgcggatggcccgcctgtccgtgattcttattgtgtcagcgccggttgtgcgtcccggattgatgcgcacgttgtcgatactattgatcctggaaccggcttcccggtgcctgtttcatcagcatcgcctttgccggtggttggtacgcctgcatcggcaaccggtggcgcggcagcagcatctgctacgacatccggcgcttatcaggtcgtttttgcagcaggctcgatcacgcgcggatgcagcgtgcagaacccgaccggcaatgccgtgtcgctctgggtggattttgccggagcaacaggatctacccgcgctgccacctcactggaagtcgtgccgggggcatccatacgctgcgatttcgtgccgaccggtgccgtgacggtgttctctaccaacccgatcactttcaacgcgctgaggtggtgacatgatgtgtcgtatttttctgatggcatcttgcctgctgccctgcatcgcctcggcccagacggttacggctccgccagcgcgatccagcgtctgcacggtcatgacggcaggtggcacatacacggtgccgccatgggctgtgacgctggatatcgaggcatggggtggcggctcttccggcggcaacggcactgtcgccgcatccggcacggccaccagtggcggggccggaggctctccgggatatcacgcccggatgccgggcgtgcgagtggcctccctgggagcgtcatccctctcggtggtgatcggggctggtggtggccagccatctggtgccggtgccgccgggatcggcggtggtgagacgaatatcatcggtggcgcgctcaatatccgtgccggaggcggcggcgctccggctggcggctccaccgcagcctcggccagtggtggcagcggtagtttcctgatcaatggcggccccgccagtggcgcgacagccggtcagggctatccctttggcattggcggcatgaccagtggtcagagtgccctcaatctgatcagccccggtttcggcgcatctggcggcagcggcgcgccgggggcggctggtggtggagccggcgtcaccatggcctcgacagccggagcggctgctggtggtggggtcgatggcaatggcgccggcaaggccgggggagcatcaggccttacagccgacagctatccgatggggaatatttcggggggcgtcgcgcccggtggcaatggcgggacgatcccccctcgcgcacagcccggtcaggaatcgatcggtggtgcaggcggtgctggcggcaatgcctccaccaatggcggcaatggcagccccggtgccggcttcggcgcgggtgggggcggtggtggctccacgatcacggggcggcaatacgggcttggtgcgccgggtcagtcgggaggcgtagtgatatgcgcgtatccatgatcgcaaccgtgtcctttcttcttggagcgtccgccccggcttcctacgccgagctctgcgtcatgccgtgcatcgcgcaggatggtacggtccaaccatccggcacggtgctgaaccgcgccgtctgggttgtgcctccggccactgacggcatcacggaatggcagcccgatcgcggccagccgctctacctcccggagctaccggcttccccgcctccggatgatccggatgatcccgcttcgcgttgatcggaaagaaaaatggacagctctcacggcgatcatccgcttgtcgcgcgggtggaaaaactgacgccgcgggcagcggcctggctggtggcggcgctggtctcctgcggtgtgccaacagccacattcctgctctcacgggagaaagaatcggtggttacccatcgggatgcggacgatgtccgctcccgtctggcagcggtcgaggatgcgcggaagctggaaaatgcgagcgagcgtctgcgtgatctggaagaaaagctgctggaaatgcgcggcgccatcgatcgggccgcgcaggagcgcgcggccctgagtgaaaaataccatgcgctggaccggtttctggccggtctggccatacaggtcgatgccgcgacacaggaaatacgtgagatgcgccaccggggtgggagatagccatgagtatctgcgcacgtctgatcctgtatctggtgatcctcggctcatgtgccgcgccggtcggcacgatatccggcggcatcgtttccatggcgcccgtctccagcgccgcggatcatgagcatccccacccgcaccaccacgggacgggcgatcatccatgcccctcccccggcgcgtgcgagctgcaagccagtctctcgcgcctgatccatgctgccgcgcaccggtaagcgcacattcataccacatgaggtcattatgagctttgaacaggcgttgacgctcaccatgagcgcggcgatcgagggcggctatacccgcagcgccaccgatcccggtaactggaccggcggtagagtctatgccggtcagttggtcgggacgaatcacggcatcagcgcgcccgtgctgtccgcatggctggggcggacagcaactgaaactgaaatgcgcgccctgacgcgggacgaagcagcggcgatttatcaggtccgctactggcgcgcctgtgcctgcgatcggctgccgccttcaatcgcgggtctgattttcgatgccgctgtcaatcagggtgaaggcttcgcccctcgcctgctccagcaggctctgtccgtgccggccgatggtcagatcggcccgctcacgctagccgcagctgtccgtgctgatcctgctgatctgcatgcggaaatcgcccggctccgggccgagcgataccgcgcttctaccgactggccccgcttcggcaccggctggctgcgccgcctgatgcgcgtcgtcgcagccaccgcttctttttcataaacggagaatcgaacaatggattggacaccgattacgaatgccgcggcccagacgggggccgagattgtgacgacgatcgtcatcccccttgtcctggcatgggctgccaggcgctggaacctcaacacacagtggaccagcgcgatccagcaggcatcgggtgctgcctacgcggcggctgtggccaccggacgtcccatcacagacccggtggcacggggtgcggcggtggcggcgggtgtagagtatctgcgggatcgtgtgcgccctgctgtcctggcgtccgccgggatcaaaagcgtcccagcggctgaagctgctgtcgaggcgggtcttggccaacttctggcccgtgacccgtctgtgacggtcggctctaataacgtgccgaccaacacagtttatggccaccagagcaagtaaaaatatagttatacacaaatatatgcatggtataacctaataaaatagatcaactatgtagttaaattattaaaatgattttaaaaatagatttttattatttattttttagaacatttttatataaaatattccaaaaataatctccgaatgaaaacggcaataaacataaaaaagttgaaaacataaataaaagcccataccccaaagcaactaattttataaataaaataattttacaaatatatattgcaaatttaccatttacaggcccaaaagatattatatttaggctaaatgacactgctgccgcactcatgaccgctgccaaaatattatattttttattgtgctcttctttcacagattttaaccagagatccgcggacaccagtccggatataactcctaaaatgccaactgcccaagatggaatttgcaatccccaataccaactacataataaactaaatataaccaaaaatgaaattaatactttttgcataataaattacactgttaaattatttacaatataaaccaaaataaacaaaaataatgtgcagcatatttttcaaaatatgctgcgctacaataaaaattcacggagaatgatgtaagccaaagctaatccagcttccaacaatcttcaactttaaatactattcagccacccaaaggctctgacgctgactgtgatgcgaatacgtatcccaggtaatatcgtattcctcggcctgattgccccatgcacaccacccaggccttgtcccacgggcaaacaactcaagataaggaccgggactgcaagcctccacgatatcatagaattcatcaggcttacggctatgctcacgcttctgcgtcgccagcagatttacttgacgacggccgggcgcttcagtgcgggcgttctttcctttgaccccgaacagcaccagctcggtcacattacggaaataaaaaccgacgcctcgcccatcggatccgccatccttgcggattttgtgccagacaagattagatttgtagttaaagccccatgcctgcatcactgccagcccctccggcagaagtgcattcggaacccatagatacagatgagcggttttggccgttacctcggaaacgggtaaagccataatctctggcagctccattgttccatagcgactaagccgacgatgctcgggcgccattttgcctgtgcggttctgaaagcgccatggtgggtctgccagcactgtcgcgaagttgccgccattcagctgattacggaattcagcgatggggtcaggctgcttcgtcatctgcgttccaatcgcttacacatgctggagttattccaatggccaaaaccggacaaccaccgttccgcccggcattcaggcgatagagcagcttccccatccaggtagtgctggctccatatttctccattgtcggccggtcggcaccagatttcttcttttcagcggtaccgtcctttttcaaggctggcccaaccccacgaaaaaccttgtttaaagacgcgctgcgtgtaaccagcactgccgcatccacgacgccacactgcgcgaaggcgctgaatgcgtagagatcccggtcgaacgtctgatctttactgttccattcaaggtcgaacgcgaccttacccttcacatagtcaatcttatggccgtccagatatttggcccggcgaatttcgcgctgacggcgttcaacaattggcttaccggtttttccaatgccgacctgctcacgccacacaagctgaaccagcagatcaccctgcacgatagtctcatgccaacccaaagggcgcagcgtcttagaaaacatcttaggaatgtcggattcattcccgcctgccgtccggatcatggtcgtcgtgatactgaaatcgcgcagtgcttgaaggatttcattgaactcgtccgcccggctttcgctcaaaatcacggccgcattgcgatagctgtaaatttcataacggtcacgaatatcctgcgggattttactatccaccagttgctgtgcatctgccgcctcattgggagcgaatgctacttcctcccgggcaatctcctcagcaagatcactcccgtctgtatcgtctgccacaatcacccctttgtcctcatgaatcgccttgtcgctcatgcaggaccacttgccaacgcgctacggccaccaggaatatgccggtatagggttgattgcgtgatcccgagctgctgcgcaacctcaccaaccgacatctgcggatcggccagcatggctttggcccggcgtatctcctcctctcctagggcggccggacggccgccacgcctgccacgcacgcgcgctgcagccaagcccatctgggtccgttcagtgatcaaggctttctcaaactcagcaaaggccccgaaaatctgatagatcagctggccatggggcatcgtagtatcaatcgcagcttgctggagcaccctgagaccaatacctgccttctccagcttcttaaccaccttgatcagctgatggaaggaccgtgccagatgggcgatgctccagatgcccagcgtgtcccctgctcgcatgtagcccaaggcagcttccagctgagacccatccagattcgtgccggaggtcgcttcaatgaaaatacgttcacaaccagcagctttgagcgcatcaatctgcaaagccggattttgatccagaggcgaaacccgtacataaccaacgaacatgctgcctcctgaaccgaagagaacaaaagcagattctgcaactacaaacaagagtatgtttcgggaacctcttccctactctgaaaagccagggtcatctggctgctataaacataagcccccaaaccacgtcaaaactgtgccgtttgatgtgccgacccgcgttgcaagttagcggtttgttcttgttattgtcttatcaccaaaaaaaataaccgtttgatttatataattttttcccaaaaaccaccctcggccccggttttgtaaaccgaaggtcggggatcaaatccctcaccgcaccagttcaagtggttgggtgcgttacattttccagaaaattgatcactccctttcatcaggcgcacggcaagcgatgaatggggtgtgcccaaaagggccggaacttcctcagtggcaacagcgaggggcttgaaactgatgacctcgccatctctggcgaggtcatagtcggcgattgacctttgggatgccgagcccgcgcgaagaggtcatttgcttgcgaaaagcgaccgcctctcattttgctaccccaacaagatagactattaagaacgtagtggcaagggggatatgacaatgcgaatctacggcctcgatattggcacgacctccatcggctgggccgttgtcgagtatgacgtgacgcaggccattggccgcatattggcaatgggcgcgcgttcttccccgaagcccgcgtttcggacggaactccgctcaaccagactcgacgacaaaagcgtcttgcccgccgccaattccgacgccgtcggcaaaggcggcgagatttgaacatgctgctctctcagcatggtctccttccctcgttcagtaaggaaaggaacagtgagtgggcggaaatcatgaaatcgcctccacttgctttgcgcgccaaaggcttgaccgaggctttgtctccctttgaactgggccgcgccttctatcatctggcccagttgcgacactacaagggtcgggagatcgaagaagacaagacacgtgaaaccgaagaatccgctgacgaaaaaaaggcgaagccaggtcgcgaccaaacgattcagacgctgaagaaaagcggcctcaccctgggccagatgttagccgaagacgcgccggccgatggcgagatgccgacagcgcgaaccagaggcattcatgccctacgcagccatgtcgaggatgagttcgacagattagtgacggcgcaagcgccgcatcaccccatcttgtgcgacatcgcatttatggcgcggtttcgggataccatctttgcgcagcggcccgtcttctggcgtaaaaacacgctcggacaatgccgcttcattcctggcgggccgctttgccccaaaggatcatggctgtcgcagcagcgacgtatgctggagaagctcaacaacctcgcacttgtcggcggcaatatgcgcccgctcgatgatgaggaacgggcagtgattctggataaactacaaacgcaggcgtctatgagttgggccggcgttcgtgccgcactcaaaccgctctacaagaagcgcggtgaaccgggcgaagaaaaaacgctcaggttcaatctggaactcggcggcgaggccaaacttctcggcaacaccgtggaggccaagctcgtgggggtattcggtgacgcctggaacgatcatccgcacaagcaggcaatccgcgacgcgattcacgagcgcctctggaaagccgactatggagaaattggcgaacagcgcgtcgtgattctgtcggaagacgagcgccgggaacggcgaacagcggaagcaaaaagattcgtggatgatttcggcatctcgcaacaggaagcctcagcgcttgctgatttgaagcttccggccggctgggaaccctattcaatcgacacactgaaggcattcctgccccggctggaggaaggcgtgcgcttcggcgcactgaccatgggaccggaatgggccgattggcgcaaagcgaattttcccgaccagcaacagccaaccggagaaatcctcgaccggctaccaagcccagccgaccgcgacgagcagaaacggcaggcgacaatccgtaaccccaccgtcatccgggtccaaaacgagttacgcaaggtagttaacaacctgatcggcgcctacggcaagccggacctgatccgaatcgaattggcgcgacagatcgggctgtcgaagtacgaacgcaagaaaatgaaggaaggaatcgacaaacaggagaagcgccggaaagaggcagaggacgacctgcagaagaagggcatctcgccgccgtcgcgggccgatgtcgaaaaatggatgctctggaaggaaagccaggagcgttgtccatacactggtgaccagatcggcttcggtgcactatttggaacaagggaatttgaggtggagcatatctggccgcgctcccgctcactggacaacagctttcgcaacaagacgctttgccgtcgtgatgtgaatctagccaagggcaaccgtacccccttcgagttctaccagggttcgccggatgcatggtccgccataacaggtaggctccagaatctggtcgcgcgcaagggctctcccggcattcctctggcgaaggtgaaaaggttcctggccacatccatgccggacgatttcgccagccgtcaactcaacgataccggttatgcggcgcgccaagcgatggccttcctcaaacgcctctggcgcgatgtcggacctgagacgccagtgagggttcaggccgtcactggccgggtaacggcacaactccgcagattgtggggcctcaacaacattctttcggaggatggcgagaaaacccgcgccgatcatcgccaccacgccatcgacgcactggttgtggcctgcaccgatcccggcatcaccaaccgtctgtcatggtattggcagcagaaggacgatcaaaccgccgaatgcccacatttgccgccgccatggcctggcatccgcgacgaggcggaacggactgttgctgcgattattgtctcgcaccgggttcgcaagaaggtatcggggccattacaccttgaaacaacctatggagatacgggtaaggacattgttcgtaaccgggtgaaatatcgacaatttgtgacccgcaaacccatagtttcactcaccttcaagcagcttgaagcaatcagagacgggcatattcgaaagacagccaaagattgggtagccacgaatggcggcgaccccaagaaggcattcggctcctttccgaaaaactcgccggatggacccgaaatcagaaaggcacgaatcattgtcgagcaacagccagggctgatgactccggtttcgacgggatatgcctctactgacaacaatcaccacctcgcaatctatcgatcagaagacggaaagatagattggaagattatcagcatgatcgaggctgcccgtagattggcgcggcaagaaccgatcgtctctaaatcattaccgaatggtagccgactcgtcatgtcgattgcgcttggtgatactattcgcatcgatcaaggtgacaaagccggctactgggtggcgaaggccctctcggcaaacggtcaaattttcttccgccacgtggaggatgccatcggggcaaccaaatgggggccaaaagccaatacactcttgaaagaaggagcgaaaaaggtctccgtcgaccccatcggtcgcgtccgcccggccaatgactgagcgcggtcgcgtcgtccgcaggacagtcgagttttcaacccccggtacacgactgtccatcgcgcatcggcagcttgtcgttgagcggcccgcactgcccaagttcacttgaaacggatgggcagcatgatcccaccggagggggaagtgcgtttcctgacgatcaccgaccgacaatatgggcgaatagcggtgttcaccggaaaaaaacggcaactggccccgctctcgccctctcagctagagtttttttaatgctgagaagtcaaaaagcggttccagttctatgggttatgagagcccaagtgtagcaaaacgagaagcggccgcaatccgcagctgcgcggtgtcgcgcgtgtgcctgtcagccagtgtagcaaaacgagaagcggccgcaatccgcggcaatcttctggacgagaacataaggtgattccattctggcgcacgtgtgccagaacagggcgaaaaacccgctcaatgctgtatatttcaatgcatacgcctatatggaaaataaataaattattgatatatatgagttttccaagccctttcacggcggtaacaggggttcgaatcccctacgggacgccattcaaatcattgaatattttgttttctccacatatggctcagatgctccatagaccatctaaagggccaaagtgcgggttgccgggaataactccgccggtttcttaaagtgatcaattgcccaagcatcaacagattgagcagaagaacagccactggctgatcgggcggcccttgattctggaaacattatgaaaaaaactttgcggccagcctgaccatccatagtttgatgcgttagtggaaaaattccgtttccgcttccaagggcagcagatcatgaactcagcctggctctatcccctgattctcattgccggcgcattacaggcctgggggccgccgatgaacggtgccctgcgggtttcgctgatcaatccatggctggcgagcattgtctccttcctgccgattcttgccgcccttctggtgctttggctgtgtatgccgaggcccatgccaaccgtggaaggcattgccgccatgccatggtgggcacctttgggtgggctgatcggtgccttcgccgtcgtggccgggctgatgtttgtgaacaaggtaggggctggaacttttgcaggcctgaccatcactgccaatattctgatgtcgctcgccattgaccatttcggtctgctgcatgtgactccgcatacaatgtcaccgctgcggatgctgggagcagtcctgatggtctccggaattgccctgatcgccagattttaaagagaaattctctccgcttacaaattctgcttacacaaaatactttgatgccggatttttcatcacaaaacgcttgaaatatttctctgtcgaaaaatgatatccctgctgcaacgtatcaaagctgatgggcctgagcagggagtatccattgatgcatgtgccacgtattcactggctgctgaatcgtatcctgacccggatcgtccggagcggacatctggaagtccgcttttctgacggagaaatccgtcaatacggggccggttcttctccctcggcctctatggtgctccgttctcctcaggcggaaaggcgtctgaccctcaatcccatgctggctatgggcgagctttacatggaaggtgaactggagacgccgggatgcacgatctatgatctgctggatgtgctgacgcgtgactgtctgaataccggccagccctggatcataaggctctttaacatgctacgccaggcacgaaagcggttggatcagttcaaccccgctggccgttcgcgacgcaatgtcgcccatcattacgatctggacgggcggctttacgcacattttctggatcaggacaggcaatattcctgcgcctatttccccaccgggcaggaaacgctggaagaggcgcagcgcctcaaaaaacggcatattgccgccaagttgaagctggatcgccctgatctggatgttctggaaatcgggtctggctggggcggtatggcactgcatctggcccgtaaccatggtgcgcgcgtgaccggactgaccctttctaccgagcagttggacgtttcgcgtcagcgcgcggcagaagccgggctgagtgatcgtgtccgcttcgaacttatggattaccgtgcatggcgacagccggccgaccgcatcgtttcagtcggtatgttcgagcatgtcggcattggccactaccagacattttttgagaccatacgtgacaggctcagaccggatggtatcgccctgattcacgcaatcggtcgcgccgagggtccgggcgccaccaatccatggatcgcaaaatacatttttcccggcggatattctccggccctgtcggaagttctgcctgcggtggaaaaatccgggctatggacgaccgatattgaaatcctgaggcttcattatgcgctgaccctctcgcactggcgtcagcgttttcaggaggcgaggccgactattacctcgctgtatgacgagcgtttctcacggatgttcgagttttatctggccggatgcgaacttgctttcagaaatatggggcatattgtctggcaattgcaggtctcgaaatccctgaccgcccttccgctgacacgcgattatatgttcgaggcggaacggcaggcagaagggtgaaaaccacgcctgcaggcaacagaaagcttaccagccaaagctgcgataatacgggccaccccaaccccattgctgccagccaaaaccgggatagccccacccccatggaaccccgccccagccccagccccagccccaaccgcgataatagggatatgccaccccccaaccgccaccaaaggtggctccgaatacggtggctgcggcaatggtccatgccagataaggagccgcatatccaccataggccggaggataggcgggtggataagcgggcgggtaagccgtgccatcatatacggggacagaggccggttgaggctgagcaaagggactaccccccgccccggtcacaacgcctttgcctgcctccgggcccgtggtttgcgccacggccggcatgggcacataaacaccattatatccgaatgaatcataggtgcagcccaccagcaaccctgacagcatcaaggccaatatcggcgtgatcggaaccgcctttctgcgccactgctgcaagaccggcatgacagcatctttcctctttgcctgcatgaagacatgctacccggtcagccgatcagaagcgacttactgatcggacatgcattttcctgttgcatggggtgattgtcctgcatccacgctcatgaggccacaaaaccatatcgtccgcgggggcttgcggctatggtgggcatgcggggcagaacttcaaaaacttgatacactttcttctgcaagccgttgtatctactagcgcttgtcagtgatccaagcattctggacgggtttatgatctcacggttggctcgcttctttcttctcatcgggctgaccctgccgggtgcggtgagtcatccctcaaccgcacaggccgagggactggcttttgtcatcaacagcaacgacgcgaccatcagcctgatcgacatcaccagccgtcaggaagtgaagcggatccccgtcctgcgggagccgcatcatatggcgctcacaccggatgaaaaatccctgctggtcggggatacggccggtaatacgatgttcttcctcgatcctctgaccggggcagagcagaagcgtatcgttttcagcgatccataccagatccagttcagcccggatgggcgttggctggtgtctgcggcgctcgcccgtgaccagatcgacatctatgacgggcacagcttcaagctgctgcaccgtattcaggcgccctccatgcccagccacatcaatttcacgccggacagcaaggtcgccttcgtctctcttcagaaaaccagcaaggtcgtggccttcagccctgagacgggtaaaatcctgtgggagcagaaatccggccgcacccccgccggggtgctttatctgaacggaaagctgctggtcggtgatatgggcgaagacactatcaccgtcatggacccggtcaccggaaagctggaacgcaagatccgcaccggtaagggagcccataacctgtttctctcccctgatggcaaggttctgtatgtctgcaaccgcgtgggcggcaccatcagcctgctcgaccccgcaaccctgacagtgaagaaggaattcgccattcccggcggcccggatgatctggatttcgccccggatggatccatctgggcgacgcgccgctgggcccatacagtggccatcatcaatccgaaagacggcagcttcaccacgatcccgaccggtcgttcgccgcatggaatctggctgaacacgcatctggccgctcccgttagagccgcctccacccgtgcaccataaaagccgatcacaggtttctcgatgttcgatccctttgacagcgcagcaggctggcttcaggaacatctgctgatccccctgctctggcagttcaatctgatcgaatgggaggatgtatcctacggatgggcgttgatcgccatgtatggggtggcgcaggtcatcctgatgtatgcgatctgcgtcccactggagaaatggcgcccggtcgaacgatgggaaaataaccacgctgtgttgaccgatgtgctctacaccgtcatctcgcgcgtcggtgtgctgccactggtcagctttgtcgggttttatcaggtacaggtgctgctcaatggctggctgaccgatcatggttacgtgccccccacactggagcggttcatcccatccctgaccggccatccctatgtgacgtttgcgatctatgcactgattctggattgcgccgattactggcgacatcggctcagtcatcagttccgctggtggtgggcgcttcattctttgcatcatgcccagcgacagatgacgttctggtccgatgaccgtaatcacctgctggatgatttcatctccgcactctggtttggagccatcgcactgatgatcggcgtaccgccccttcagtttccactgctggtgctgctgcttcgcctgatcgagagtctggcgcatgccaatgcacgaatcagcttcggccgcatcggggacagactgctgatctcaccgcgctttcatcgtgcccatcacgggattctcgccgcgggacaaagaagctgcaattatggtgcggtttttccttactgggacatgctgttcggcaccgcggatttcagccgggtctatgtgcgtaccggcgatccatccggtgaggaggcattgcataccggcacctatgtccagcagcagatggccggattacgtcgcttcatccgctccctgcgaaagaaaaagccacaaccttcctgagcattttggctcatcaggaaaagcgggcggccccctgacaggaccgccctgcccccgttatttcgcctttttggcaatgcccgccaggccgccttcataaataccagcgatcaccttggctgcttccgcatccgatgcacccttggcatcgaaatgcccgacccatgtcacttccgagccgcccttggcaggagttacgctgatggtggatttgtaattagccaccggcaaagggctttcctgaatcgtgtaggtgtaggattttttcgcatcattgcggtcaacctgctgctccacgatggttccaccacctttcagcgacaaggtacgctgctcagcaccagccacatcgaccagctcgcatttggtcacggccggatgccatgtggcgatgccacagaatttgccgatcgtgctccatacttttgcgggtgacgcggcaatatggatcgacttggtaacatccacggccaaagccggggtggcaatcagggaggccagcacagcaggcaccacgacacgctttaacattcaacgtcctccagacattttttgacctcgaccggaatggccatggcgcaacccttccgggctgacttgctggcagcatggaccgtatcattacggtttcaaagtgtaaaaatcgtgccattgataaagcctgccggagggtcattgaggccccggcgtcctgatgagtctgactaggcgactaaaaaaataaaactttcagatcactgagtactggcgcttcttatattaagaagaaaattaaaataactatgcacccaataaaaaaaacccgccaaaaaatgacgggtttatcagagttcagtgggctgatctaatgatcagccctagtcattagccttatgccaaaagcatcaggcactcagagcaaacgccttcatttcctgataaacttcatgctccatcaggcgcatgcgaatggcttctagctgtctcccatcttctacacgcggtgcgcagtagcgtgcaacagccacaccgttccgcttccttccacgagctttcaccttcgctgcaccttttccagtataggtatgtgcattgtggaacatgctccggttgttatcctccacatagctttcagaggcagcaccctcggcaaacaccacatcatgcgtatcaagctcgatatgcacgtagctcactgtctccacatgctgttcctgaacgatggagacaccgttcaccagacgaccggccggaaccagaacaccgtcaatgaacatcgcatgtagcggggagaccagcaggtcacgcttcggcaacacaccgtccaaagccccctgacggatacgaaccggcagaacatcacgacggccctggataaagcgaccattgtagctccgacggcccagccagcggatcggacgaactgcctcacccgctgtgatcacgtgatcaccgatctgcagatcttcaaccggaacctcaccacgatccgtcaggatcagcgtgccatgcacatagcagggcgtgccgtcatcatagaccgttaccccattcccgccctgagcctgacgcatcttgtagttctgatcatgtgcgttcggatcaagcttgatcgagtaatactgggtcttggtcccgtcactggctacatgagacaggatcaggaagacatttcccccattactcaccacatccaccacgtcggaagcctgagaagccaatcccatcagcgtaatggattcaccgttaccaaaatcggaaacagtcgcggccaatgctgtgcctggcgtgctgatgataatgttaccagacccaacacccgcagaactcgtgccacccaacgtaatcgtgttggaggaatccagcgcttgcgagaccgtcaaggtgccggtcgtctgcatcaggatattcgtgttggtcagcgtatccgccaacacccatccatcacccttcacgttgatcgtctggaacccggtatattgggtcccaaacccgctcagagtggtgccagcaccatcaagctctagaacgttgccggtgccggcagcgacaacatttccacgaatggaactaccgctcgttatcgccaaccggctgttgccagcaccaaagttaatcgccgtacgggttgtaccggctacaatctgagcagcaacagaaccggtattaataaccgttccgccagcggtcagtacaatagcctgaccaaacgcacctgcagcgcttatggtgccactattcgaaacagttgcaatcccacttgcagaaataccatttgaaaaagcaaaatcagacctcaacaatccagcattattgaaggtgccggagaccatttggactgctgtattactcgtgttgttggctataatcgttccactgtttgttatggaagcatttaggccagcagcaataataatggcatttgctccactgccctgaagcaggccaccattgctgagggtagaagaagcacccaatgagataagcgtactctgcggctgccctcccaatattgtaccattattgacaacatttacagaagtacccgtagaaacaatagcaggtgagaatgttccattaccaatattagctcccacagcgtttgtcagagcagcaccggaaatcatcgtaataacaccggctaatgttcctgtgttattaatagtcccactgttagtaagcacagtcgatgaggcaattgaattactacctgcgaacgaccacgtagctcctgcatcgacagtagcgttctggaagccgagatattgcgtgccgataccgctgatcgtgccggcggaggctccggaaagcaattcgagtgtattagtcccggcactattggccgtaacgcttcccgtgatctgggaactgacacccagctgaagcaggttgataccgttaccctgcagggcaatagcgggcccagaagaacctatgatagtaccgtaattggcaaccgtgccagccaaagcagagacgataccggtggtgccaccagagatgtatccacccacctggttggtgatattggcattgccggctgcactgataccgaaaacgccacccttgatagtaccgccgctgttcagaacgctctgcgccagggtcgtgccggtgaactgaaccccgattgaattaccggcaatgatcgcagaagcccccatattctggatagaccctgctcccatcacaacgcccgtgctggcgctggtaatagacccggaattagtcagcagattggatgcattaacatccaagaaggctgcgcctttgccataggtagcattagtggcgttaagtgttccgacatttacaatcgtgcctgaattcataccaaggccagcccaaccgccctggatcagggcacccgaactgttcgatacatagttggcagcccccgaagtatcgaggaaggcaccagcattcgaaccacttaatgaaataatggaaccattattgtatacggtgccaagattataagtatgaagcgcatcactattaccacgcaataggccagcattgcttacaacgtttgaagtgcctttaaggataatagcccatccagttccaccggcctcgattgttcctcctgcattattggtaatattaacactaccattatcgatgaagacgcccagaccattaatgatgccactgttattgatgctagctccagcagcccccgtgatagcctgaagagaaccagagattgttccaccagcctgattagtaacaatcagacttccagcagcgctaataccgatattaccacccgtaatgagaccactgttgttaaccatacccgttccagaggaggtaacgaaagcaacaccaacagtggagccattaagaacagcgctagcggcattcgtaattctgccaccacccatccaaacggcactattaccactagtaatagttcctgtattattcagaagattagaattatcagcagagaaaatatttacgcccataccatactgggcattgctggcattaatcgaaccagcattggagacagtgccggaattcattccaatgccgtaattgccaccctcaaccaaacctgtgacgctattagatgcatagtttccggtaccattcatatacacaccactgaatgaaccaccgttcgaagtgattttaccagtgttttgcagtgtattgccgccaccggagcctagattagcaccatcagtaaaggctatgatagtgccgttattgacaagaacatttcccgttccagcggcagtaataccaaaagtacctccagtggtaacagtcgactggatcaaacctccggcattgttggtaatatgggcattaccagagagagaaatagccttatatgaggtaatatttccgctattaataacagtagcaccagtgccatttgattggatggcagcatactgagttcctgtattagtaatagaggaagttatagcattttgaataacaccactacctacaataataataccatttgtagcggccagtgtccctgtattggtcaggtttccattattggtgaaggaagtgaaattagtgttattc

SEQ ID NO: 3438 - DNA, 20569 bp, synthetic construct
  misc_feature 1..20569: note = Synthetic
  source 1..20569: mol_type = other DNA
tgataacctgatggaccgtgtatgtatggatgtgcgagacggcgtctctgacttgaagccggaggacgtgtccattctcttcttcgagcgccgtggtctggatgttcggatccactcccttggccttgacaaggaaggtaacgtcttgggtgctcctgacggttaccggcagttcttcatggatgagatgacccgctccctgtggccggagcgctcttcggaacgctccaaggtggaggcttgaccaatgtgcgccattctcgatgcaaacgccgcccatgaagtgtttggcgccaatgccggacaagccactgaggcgggggagggattctttcaatggctcaaggatggcaagggtaacctggttgttggaggacagcttggagaagagcttgatcgggttcctggattccgcaaatgggcctaccaagcgaaactcaaaggtaagccattgttgaaaataagcgattatcatgttcatgatgagactaaaaaaatcgagaaacgcgacgacttgaaatcaaatgatccgcacgttatcgccttggcacaggtgagcggcgccagacttctgttctctaacgacaagggcttgcatgaagatttcgggaatcctgagatgatcaatcatcctcgcggcaaaatctactctactttagagaacaagagttttacagaagataagagaaagctgctgaaacggcaccgctgcaggctggggagttgacagccactcaaccggcttatccgagactcgggacggcgcagcgctgccgggtgggttcatggggctggcggatgagttggcggccacggtggcgcaactgctcaccgggaaggaaaggatccgcttgggactgtgccgccatggtgagaagaccatgcccatagcccgccaacggcgcccttgcccaatccacggcgcgctacgggtcagggatgatcgtgggttttggtcttacggatcttgaaccggtctgcattgaatttgcagtttctcaagagacctgctacgatttcagcccccttggcgcccccaatggtgcgagctttccatccttcccgctggcctctctggttctggctcctcctcgttctcgttggttgcgttggtctctggcaatcaggtagccattcctcgtccacatggaacggtttaaccattgcaccggaaaacaggtgttctccttacgacagggagagacaatacccttacagttcaaagattgagccaaaaatcgttgctgcttccgatttaagaccaggaaaaatctacgctccttattccaatgttgttttgggaagtttcaaggatactgatattgaacacattgttgcagtatcagaagcccatgacagtggtttatgtgccgccagtgacgagaccaaaagaaagtttgccaatgacttgttaaacctgactttggctactcctgatgtcaataggtctcaaaagtcggacaaggatttggcagattggcaaccggagaacaaccagtgctggttccttgatcgagtggtagccgtcaagaaaaaatacggcctgaccatagattcgagagaggcagcagctatgaagagattagccgctcagtgttgatgggattgattcccacccgaagtcctggatcagcagaccaggaaaagctacagcttccccatctaaccattgctcctccttcgcgccgtcacatcctcttcgctattcccgtaaaagcgggaatccattcttgaaacagtttcaagccagtagtagtcacagggtcaattccaccttctactgctaatgcttgcgagtaatataagcagtgaaggaagcgcaggcctaaacctgaagataattttgtcaaggctagtatcagcagaatttttttaattatcttaagaagaagggagcgaaggagaggatggttcctttaattcaaaagcgttaatagattcaatctcatctttatattttttaattatttgaaaaaagttaataaaatcactttttcctagccaaaacaacatatcttgaggttcggtgtcgatactaagccatattggttcttcgcctaaacgactataacttctatttttaaaatagaaacaagtatttctatacttaaaattttctcttttttcagtatccatagagccgatatattggatcagtttttctatatcatcaagatctaatgcaagtttaagaaagcttttgtcactcacaataaatctttgaaattctcctaagccaaataaaggcattctaatttttctaagttgatcaaaagataggataattccttttctatgctgcaattctatacaaaagccaaatctattttcttgacaacggaaataacgagactctattttttgcttttgtctgcttcgccagcctttatattcatatgttagcactgtgaaaataacaccaagaacgaagttgaaaatactgtgaaggagagtgtccatgaagaaagaaaatggagttgggacttttgggaatctttttgtttgagattcctgccgggtagcctcaaggtccatcatagtagggttactggaaacctggattgtccagaaaaccgaactttcaaggcccttgttggtacttacgtatctaagccctctttcgtcattcccacaaaagcgggaatgacgaaaaaaggtgtgggaaggaagaggtggggaacagggcaatgagccagcgccagcaaacaccacaccacccatcccgaagggcattcagcaatgccggagggatcttaacgccttggatcttcatggcgcttgccctcccggacttggtgatgatccctctaccacagcaatctcctcgcttgtcagcccgtagagttgataaaccagacggtcaatttccgcctccagtgcgctggtgtcggctgctgggttggtggctttggcttgcaggatgttgtctatcaactggataaagggcttccaccggcggtggagattttggggattggtaggcgttcaacaacaaatttcttccattgaagcactcctaatccagttgttaaagcagtattttctaccaaccacttgataagagtgctgttcagaaccgcacagagatatttcagagatttgcctgtcaaaataaatctcttgtcattgcaatacatttccatttctgaataggcaaaccgatttgtgtttgacatgtccatccaaaatagcttctctttggcaaattcttcatggtaagcgcaggcatcttgcagctcatgccatgcattgtttgtcttctttctggatttctttccatcaggtaatttctttcctgattgctctaatcgtgctctaccaaaagaaagcagatattctctcaccgctggatactcattaatgttagtgttcaatgcagggagcgttgcgattagccatagccctttccaatcaactcgatagcgctgtatatcccgtccccgcaacaccggcttgaggatctcggcagacttggggtcagcagcaacaagtgcagcgcgggtgttctcatcaatgatgaaggcttcgttgaggccagttgtcaccccccgatacatcgccacgtcccactgacgtagaggcgttccttttgtacgcatcttctccagaacgccgcgctcaccaacagacaagatactccagggagcatcaccttccggcgccacactgccccaaagccgggccggaggcgggaagtccgtggtttccacttgatccagatccacagccgggaacggcttggcgttgcctccttgtcgcagcagcagaatgctggaatccacaacggccgactcgaaaacgtccttgcccagttccaacagggcagtgggggtgtggtttttggccaggtagcggcgggttttcttgccgtattcggctttcagccaactgttggaggtgatgtaggccagaatgccttgctgcgcccgcaacatctcgcaaccccgttcatagaagagttgataaatgtcgccggtcctggcaaacgtcacgtaaccggctttcttgtacaggttccccagtttgccgccgtcttcctgaagctgattgtacggcggatttccaatcaccacgtcaaatttattggccacgccaaacatgtaaccggcatcaaaccaatcggtgctggcgttctgatcgtagggattccaggcggcgagttgagcggcggaagcggctaggtaatgaaattcggtctgcaagtgacttgccaattgctgccgtattttggcgtctttacggcgacatgtcatcttgatggagcgggtgttggcgtggaagtatttctcacgattggcagctagtttcgcttgcagctttgagacctcgccggtttgaccgatcttcatctgggacggtttttctaaaccgcgtagcgtgtccgccgccacaaaacgggtttccaggttgggcaggggtttgacgccgtagttggcgctggggtcgttgttgggttgttgctcaatggccagggagataaagaagcgcagcttggcgatctggcaggccaccggctggatgtccaccccgaagacgctgttctggatcaggtagagcttgcgcccgaaatccccggaataacgctcaaaggtctggctgatgtccagcagttcggcgtcccgctcctgttggtctttggtctcgaacgccgcgtttgccctggcgctggcccgctctttttgcagggcttgccagcgggtgttgtgggggtcgaggcgttgcagggccagggtgagtttatggaggatgcccatgggaaaggcgccggagcccactgccgggtccaacactttgagcgaggcaatggcccccacaatgcccttggcttcgccgtcctcaaacagttccctggcgtcgttgaaggcgtcttcatagtccagcagatagcgcaaacgctcttgcaaccagtccctgtccccgtcgtggggttgtatctttgtggccagtgccgccaccaacgcctcctccaccatggtgtccaccacgaggcggggcgtgtagtaggagccggtttgccggcgggcggtctcccgggtttccgggttgatagcggccaacaggttctcgaacactttacccagcagttccgggtccagggccacttcctgctcgacgggggtgttttcctccacggtgaatttgtagcggttgaagatgctcaccaacccgtcagcagcaaagaacaggcggttgggaacgctcagcaggttgcgatggccgggattgtcggagaagcaatcgatgcggtagccgccatcgctggtggcgtcgaagctgtccagacaatcaaagaggccgccgttgataaagggcgtttgcttgaacagcgccagtagtcgttcagggtcggccatctccttctgatgacggtagcgggagaagtcccggtgcgttgtttgctgcctggcgctgaagccacgctggctgatctcggtgttgagggtggcgaagaacaggttttgcaacacggcgcggtaataggaatcgcctttggccgggtcgtagttcttcagcagggaacgcacttgttcttcaatgaacaactcctcggccaccagccccttctccttgataaaccacacgaacagcagacgggtgatgaggcgaatcacgtgctcctgcggcggcagattgcgcctctggttcgcggggaatctggcctccgccacggcgctattgaaccagccgaacaggtctttatagaaacgtttgttgagttcctgggtgtccaggctggccagcagggccgccaacaggccgtcgaagttgccgggcttaccgtacttgcccatccacgccaggcggtgggcaagggaaagctccttcagaatcgaccgatgggcgcggtggggttgcctggggtcaatgtcccgaatgagagacacgctccccaacacgcggcgctgatcgtcccgtttgtggcggcggcgctgcacaaaagccaaggtgacgaggccgcttgaaccacggaacagcaggaaggcgggcatggggaagcgcttgttgatttcccgggtgaattcggcgtattggctgcgggaagttctggactggttgagttcaacggcaaggaaaaggtagcttttgttgaggccttggtcgaagtttcttgtatcgaacaacccgccctggctaccgctcgaacattcttcgttgatttcctcgtccgtcacttgaaacaggatatgaacggctgctgcgtacttctggagattttcctccgatgcagtgccagccgtaggcgctggaaactgggcaataaaatcttccacccggccactctgccccgccaacacccgggtgctgcgataacccaaagcgccaaacagtgcaggagcgacttgggggagatccccagcggccagggtagcaagggcggctttgacggcggcatccggatccgggttccgttccatcattgcccctcctggatcaccagccaggtgaccagttcaaaatccccggcgccccgcggcgtttccgctgcccgcagcagcttgaaaccggcgtcgccggagcggcccaggccggcggtttgttggcggtggtgggcttggcgaatctgggcaatgcaagcgttcaagaggctctcgtaacggtccatgcggcggccgtttcgggtgtcctggtcgaagcggtggcaaagccgggtgatgggtcgggtttggccggcggctgcggcctcgaaggccatgagaatgttccgggcgctgccgcaaccgtagcggacggcgccgttgccttggacgtgaaccaggtagtggggatggagggggctggcggtgcggggctgcttgtccgggttggcgttgcgttgccggaggcagaaaatcacgccgggttgagccttgggggccttttgggtggcgtcttcggtgacggcatagacgccggaaggcatggcttccagggcggcccggttgcgctccaggtagcgcagaagctgggtgaggaaatcatccagggtgaagtccgccaatacgggagcatcgtccaggtcctccaggtgggggacttcctcccggagttggagaagctgggcgtcccggaagcgcagatcacgggccatgtcctcctcgctgaaggggtcttcgtcgccgctggcggtgagatccgccaaggccatgcgggcctgcacccggttttgcagacgcaagtaggtttccatgtcctccgtgggccagtagtgtaccatccgcacggacgggctgcggctgccgatgcggtcaatgcgcccgaaccgttgcaccagccgcacaggattccaatggatgtcgtagttcaggaccgtgtcgcagtcttgcaggttttgcccctcggagatgcagtccgtggcgatgagcaggtcaatgtcacggttggcgtccgttgtggatcgctggcgggccgtgggagcaaagttgctcaagatgtcgttgaaattgttgaggccggccgtggcgtgggtttcatcgccggagaccatggccatggcgatgcccagctttttggtcaatgattgcaggttgtcgtataaatacttggccgtatccttgaaggtggtgaacaccagcagcttgcggttgggctggccggccttgcggcggatgcgttgcttgaggtcttgcagcttgccgtcccgttccggcgtgacggcggccacccggtcccgaaccatggacagcatggccttgtcctccttgaggtgggaggtccagcgggggaggtccagttcagccagccggtagggatggcggctccggttcacagcaaactcctcgtcttcgttgtcatcgtcgggcagagtctccccatggatcaggccatggatttgggagtcatctccctgctcgtaccgctcaattttcttcagcagattatcgatcttcttgatggtgcgctccatggtgagttgcagggcgtgggcggagctttccagccgtttgagcaggttgacgcgcatcatgcccaccaggaagcgttcactgtctttctggttgaagttgtgcgcctggcgtctgctctccaactcgtcaagccgtcccggatcaataacgtaagcgctgggctgatacaccgccagcgtgaacgcgccaatccgctccgcaagatcctggtaggaaagttcttcgttgatgtcggtgtgggggtacacgttctcgggttgggcgcgccggggaaaccggccgatgcgctccatttcgtcggcgtagaattgctcgatctggcggcgggagcgggagatggacaccccgttcagcagccgcaggaaatccgcccccaacgagtccaggagttgagccttgtcccgtctcttgccctgggattgctgctgttcccactgcttgaactctttttgtgctcttgccatcaaggcgcgaatgcttcccacccccaggctgtcttgaaacgcctgttcccgcccttcggtcatcaagtagatctgattgcgtagatccatcagggaggtgttcaccggtgtggccgatagcagcaacaccttggtttgggcgcctgcctggatcacgtccttcagcagacgttcatagcggctgctgccgtcgttgcggaagttatgggattcgtcaatcaccaccagatcgtagttgccccactggaaattggccaggtcaacgttgccggagcgtccagagtcgcgggacaaatccgtatgggccaggagtgtataaccaaaacggtcctgggggaacgggttttgcggatggccgttgctggcggggcagagggaccagttgtcacagagcttgcgggggcacaacacaagcacctgctgattgcgcagttcaaaatacttgatcaccgccaaagcggtgtaggttttgccaagaccaacgctatccgccaggatgcaaccgttgtgatccatcagcttggcaatcaagctcctggcgccgtcctgctggaattgatagagcttgttccacacctggctgtctttcaggcccgtggtggtggcgctgtcgtccccagcctggcgcgctgcaatctcctggcggaagatttcgtagagggttttgtaatacaccgcttcgggagcatagtccttgcccatgtgggccagggcggccagcacctgctgtttcacgtccctggtgtacccgtcgtccgcccaaagccggtcgaaccagtcttgcaactcctgtaccgtctcccggtcctcggtggccaggttgatttccaggttgggctgggcgccttctcccagcccacgccgggtgaaattggaactgcccaccactcctgtggcgccatggggcgagacggtgagatacatcttgccgtggagaaagttggcgcggctgacggagcgaatctccaccgtgctttgccgcacccatgcagcacaacgccgggcaagggccttttgcgccagaacgtacctgggttccaagccgccctcggtcagtgcaaacgccttgggctccttctgccccggatcaagatcctccaccgagcccggatcgccaaacaggaaccgggtccggcccacgccctccaactggtccgccaggaggctatagccgtggatggtgaagtaggcggagacaacgctgaagtcttccccgccggccagggcctgcctcagataggccgccaccgtgccggtccggttgtccaggacgtggcgttgatcttctccccgttctggagggcagggattccttctcaaattcggcagactacctccctgggtattgcgccatcaagcatcgcacatccaacaccgctctgagcagcggggcttggatcccagggcagctgcggtcatctgctgaaacctatggcagctttaccgtgatcatggactgatgcaacaaaccctcgccctggggcaagggtttggattgccggcaattgaccttgggatgccgagcccacacgaagggtcgttttgctgcgaaaagcggctgcaagcagccggtcacaagcgggaccccttctcggtttgctacatggaggatggtagcattctccttcagcttgtgcaagggcttgctgcatggcgttggtttttggcttcgacattggcaccacgtccattgggttcgctgtcattgatcatgatcctggccagggaaccggcaaaatccatcggcttggggtgcgcatttttcctgaagctcgcgacccaaaagccttggtccctctgaaccaggatcgccgtgcagcacggatgcggcggcgccaattgcggcggcggcgccagcggcgtcaggagcttggcacgctgctacaccagaacgggttcttgccaaggcgagattcgtgcgcgtggaacagggtcatgggaactgacccttacctgctgcgcaaatgggcattcaatctccagcggacagattcccatgagtcacgcaaccaggtgtttgcagccatgcaggccgagcaagccaagctccccgaatgggcctttgagggtgagcgcctgtccccccatgcggtggggcgggccatctatcacttggcccagcggcggcatttcaaagggcgggacattgacgagattgctggtgatgacgggactgagaccagcagcagggatgcggatcaggaggaaacagacaagcaggtaatgtctgcgcgagatgacactcggaaagccctgcaacaggagggcaaaacccttggcgcttggttggcggaacgggaaccaaacaagtgcaagcggggcgtccatgctctccgacaaaacgtggaggatgagtttgaccaggtatgggcgccctgtttgcccaatgaccagatcagggaagaggtgcgcagagccatctttgatcagcggcccgtcttctggcgccggaatacccttggcacatgtcgcttcctgcctggagaagaactttgcccacgggggtcctggctatcccagcaacggcggatgctggaaaaactgaacaatctccaacttgtgagcccggaacagcgctgcctggatccagaggagcgtcaagccatcctggccaagctgcaaacccaggcctccatgaaatgggcaggagttcagaaagcgcttgctcctctttatcgagaacggaatcaggatggagagcaaaagcggctgaaattcaacttgcaacagggtgaagaaaagaagctgctcggcaattcaattgaggcgaacctggcgaaaatctttggcgatgggtggccagagcatcctcatcaacaagccatacgagacgccttgcataagcgtctctgggacgcagattatgggacttgcggcgggcagcgtgtcgtcatccgtccggccgaggagcgcaaagagcacagggagcaggcggcacggtacttcattgaaacgtttggcatatcccatgagcaagcggaggaaatcaagaatttgaaactgcccacaggctgggagccttactcgactgaggcgttgcagaagattctccctttactgaaaacaggggtgcaatttggtgaaatcatcaacgggccggatttggtgtcatggcgggaagaaacatttcccaaccatcaagggcaaaccaaccagaaaggctgtgatcgcctgccaagcccaaagaacaacaaacaagagcgcgagcatctggccagcttgcgcaatcccactgtggcacggacacgcaacgagcttcgcaaagtggtcaacaacttgattgacatgtttggcaagcctgacctgatccgcgtggaactggcgcgggatgttggcctgtccaagcgggagcgggaggaaaagcaaacgggaatgaagcgccaggagaggcgccgtaatgcagcccgtgaaaacctgcaagaaagaggcatatctgaaccatcacgtgaccacattgagaaatggatgctgtgggaagagtgtggccatcagtgtccttacactggtgaccatatttgttttgaagctttatttcagaaaaacgaatttcaagttgaacatatttggccatgttcccgctccctggacgatagctttcggaataagactctatgtcgtaaagatatgaacatcaagaaaggaaatcaaaccccattcgagtgttttggccataaccatgaagcatgggaggccattaaagatcgagtcaacggcatggaagcttcgcaggaaggaggtgttggtatgtctcctggtaaaatcaggagattgttgtctgaaaaaccaatccctgatgacttcacttcgcggcaactgaacgacaccgcctatgccgccaagcaggtggttgcccaactccggcaactctggccggatccgggacccaaggcgccggtcagagttcaagcggtatcaggacgaatcacggcgcgcctgcggtggctatggggtctcaacaacattctgggagataccggcgagaaaaaccgtgccgaccaccgccaccatgctgttgatgcgctgacagttgcctgcactcaccctggcatgacacaaaagctctcccgttattggcaagaaaaagacagtccccgccccgccgtcgagaagccaaatctcccacctccttgggaaacgatccgcaaggatactgaagaagccgtatcagccattgtcgtttcccatcgcgtccgcaagaaagtctctggacaacttcataaagagacaatctatggtgatacacgtaaggaggaaacgaaaggagaggtaacttatcgattctttgtcacacggaaaaatgttgaggcattaagcaagaaagagttgaaagagcagatccgcgacgatgaggtgggcaggattgtcagagactgggtagaaaagcatggtggcgatccaaagacggcttttaaggactcttatccgactcttggagagaatggccataaaatccgcaaggtacgcttactcgtgaagcagcagattgagacaatggctcaagcgtctactggctatgctgacctggatggaaatcatcacatagttctctatcgactacctaatgggaaagtggactgtaaagttgttagcttactcagggcttcgcgacgtttagcgagaagagagcacgtcattcagcgtgagcgcagcgacgatgcacagttcatcatgtctttgtctaagggtgatttattaaatctcatacaagacaatgaaaataaagtagtggtagttgagggtatttggtcaccaaataggatagtgatccttgatcataatgacgccaaaggtagcagcagaacacgaccaacggctagctctttattgttaaaaagtaacgcaaggaaaatctccgtcgacccaatcggtcgagttcgccccgccaatgactgagcgccttatcaatgctccgtaaaacagttgagttctccacgcctggaacacgcctctcggttacccatcgccaactggtgatccagaggcccgatctccccaaggcaaccttgcccattgaggatctgggggtggtgattgtggatgatatccgcgccacctacacccaggcagtctttctggaattgctggatgcgggcgccacggtgctggtcacagggcgcgatcatcttcccatcggcatgatgctgcccctggatggccaccatgtgcaagccgagcgtcaccgtgcccaggtgcaggccagcgaaccggtgcggaagcaagcctggcaagccattgtgcgggccaagattaaccaacaagctgcagtgctggcccggttcaaccaaggccacaagaggctgtcagccatggccaggaaagtccgttccggcgatccggataacctggaggcccaggctgcgcaacggtattggcccctgctgtttggcccgggatttcaccgggatcgggaggccgagggtgtgaatgccctgctcaactacggttatgccgtgctgcgggccacagtggcgcgggccattgtggccactggcttgatcccttccctcggggtccaccatcgccatcgcaacaatccattctgccttgcggatgatctactggagccctacaggccttacgtggattggcgggttcgcctgctggtggacagcaatggcgccaccgctctgcccagggtgtccgaacgggaaacccgtgcggcattgctttcgttactgaatgaaaccatttgcgtggggcagcggcgtgaacccctgttgctggccttgcacaccagcgcggcctccctctgccgcgctctgaccggtggggatcgcgccttgtctcttcccgcagggttgcctttgcagttgaactcccttgaaggagcagaaccaggggatgactaacctgtgacgtcggggccggtgcggcaaattccctggggatggcgttccatgtgggtgattgccatgttcgacctgccaacggatacggccaaggcccgcaaggcctatgcccaattccgtaaagccctgttgcgggacggcttcaccatgatgcagtactccgtgtacatccgccactgcgcctccattgagaacaccagaatccatgtggcccgcattggccggcgcgtcccctccgcaggggaggtgcgcttcctgaccatcacggacaagcagtttggccggatcgagacctacatgggaaaaatgcgccaagcgccaccagcttcacccgctcagttggagtttttctgagcttgaaatgggtgaaaccagtggcgctgagcggcttttggggatcggtagtgtagcaaaccgaggaagggccgcaatccgcagcgggccggggagtgggcctccatgagcgcctagtgtagcaaaccgaggaagggccgcaatccgcagcagcatgtcggacgatcatgccgccacctccagtgtagcaaaccgaggaagggccgcaatccgcagcaggcttgctgcaactgtccgttgaccttggagtgtagcaaaccgaggaagggccgcaatccgcagcctagtcgatcaagtccccaccgaccatgtgagtgtagcaaaccgaggaagggccgcaatccgcagccgtctcgatctgggggtggggggcagacttcggagtgtagcaaaccgaggaagggtcgcaatcgcagttggacgtggttatggtcccgccttcctggcacccggaggaaactgtgccgccccaggcaggctgaggctgacggttgtgtggcccaggttcagggtggatgcccccagccaggcgcggcgcacgacggcaagccccacactgcccggccccagggccagccgggaggtgatcaccccggcgcgggcgccgtcttcaccctggatcaggttgtcctcgggcaaggcttcaaggggggtggggctccgccagaggcgaagctgttgcttgacgccgtcataggccaccaacctggccaacacctcctgccccaggtagcaccctttgtcgagggccacggcaccggcaagacccaactcaaaaggattgaagtcgccgttgatctcgttgggccatgccggtatcccctgctgaagccgcagcaactccacctgtgtggccgtcagccgggggcagcgctccagccatgggggtggacacggggaatcctccggcagcagcagccgcactcccggtacgccgtcgccaaagtccgtgccccgcaccagcaacgcctgggcatccctcagggaaaccggaccccagccggcaccggcggcgtccatggcgatgccctcggcagccagcagagcggcagcgccctcccccaacagactcacctgccgggcctggaccatgggcagcagggtgacctgatccgcgggaaacagatggcgatcaaaacgctgatgcagcgccggcccgtcaccggccagcaccatcaaccgggcggcctgctggtccaccaacacgtccagaagggccgtgagtcgcgctgtggcggtcactgcgcaactgcgccgcagacgaccgggtggggcgctgcccaggtcctgggtggtctggtcatggagaaaacgcaggctatcgacgccggtcaggcgcagaatccggacggtccggtccgtccgcaccggccaggcgcggggctctggtagagcctggttcagccagtgggggaagggcagtggggcggtcatggctggcgctccaatggtgcagggtgggtgctgatgtgctccagcaggaagagggacttgaggcgcagccccgcagcggccagggcggcgtgccccccctcctggcggtctacaacggccaccacctcctgaacggcatagcccgcctcccgcaaccgctgcaccgccttgaggcaggagttgcccgtggtcaccacgtcctccagcaccgtcacccgggcgccggggggcggcagtgggccttcaatccaggcgccggtgccatggcccttgggctccttgcgcacaatgagggcatccagccggcggcccgccagatcggcggccatggccacgcaactcaccaggggatcggcccccagggtgaggccggccacggcccgggttccggagtggacctgctccagcaggagcggcgccagcagtgtggcgccggcgccactgaggctgacgggtttgcagttcacgtagtgttcgctgcgccggccactggccaggaggaaattgccgcgcctgtaggcctggcgggccagcatctgccgcaaggcttcacggcgccgggcggatggggtgttgaacagtggagcaggcggctggatgtccatggcgccgaggggggagcttctatagtgaaggttcacggctgacgtgatggccccttttgctccactgctacccttgctgctgagcgccatgcccccgtcagcattggtcatggctgcggattgtggacccacgccaccctctcaagccggcgctgttccgtgggtccggtcctggatgcccccggcgttgcaccaccagttcggcctcctctcctctcccgaggctcaccagaacacagccccggagagcggtggggacgaacaaccgttggcggccacaggggaggggaatgaccctgcgttttgccccctctagtcgggttcagcgcgtctacgtcacgtccacatcacaactccgatacgtggcggcctccgccaggtgttcggcttcgatgcgttcggaatccgccagatcggcaatggtgcgcgccacccgcatgaggcgatcaaggctgcgcatcgagaggccgagacggtcggcaaggcgatccagcagatgccgggcggcgctgctgagggggctgcaaaggcgcaactgacgaccgtccaggagacggttgtcaaacagttggcggccaaaacgctggctggtgttccggcggctgacggccaggcgctgccgcacctgggcggtggtttccgcggcgacgggacggctcacctccgtgggggagagccgtcgcaccggcacgtggagatcaatgcgatccagcagggggcctgacacctgtcgccaatagcgacggcgcacggcatcgccacaactgcagctatggacctgatccccccaccagccacaggggcaggggttggccgccgccaccagttgaaactggcaggggaagcgcagtcgctgcccggcccgggcgatgtcgatggcgccctgttccagaggttcccgcaggtggtccaggcaatggcggccaaattccggcagttcgtcaagaaacaggaccccgtgatgagccaggctgatttccccgggcagggggtggggtgagccgccccccaccagggctgccggggtgcagctatggtgcggagcgcggaaggggcgctgactgcgcaggcccgcttccggctgggcaaaggccaccgaatggacccgccgcaccgccagggcctcctccatcgagagcggcggtaacaaatcaggcaggcaccgggccagcacacttttgccgcagccgggtggacccaccagcagcatgtggtgaccgccggcagcggcaatttccaaggcccgccgcccgtggctttgcccctgcagatccctgagatcaaaaccgaactcatccgccgttgtcgagaaacccccttgatccggggcgggttgcgcctggggattgttcagttgttcctgggcctcgttgagatccgccgctgccaggacggaaagcccgtcaatctgggccgcctcggccccgttggccttcggcaccagcagatgcctggcccctccagcctgggccgcctcggccatggccagcaccccacgcaccggccgcaagctgccgtccagccccaactcccctgtggcccagagtccctccagccaggcgaggggaatacgcccagcggcggcttgcagggcaagggccatgggcagatcaaagctggggccctgtttgcgcagggccgccggagccagattcaccgtgagacgagacaccaacgggcgctggccgctgttgcgcagggcggagcggatccgctcacgggactcctgaaccgccgtatccggcaagcccacaatctgaaaggccggcaagccggggcctaaatccgcctccaccaccacgggacaggcctccaccccgacaatggcggcactggtgcaacgggcaagcatggggttgagcggtcaagtgtccggcccagtgttcccacgcttcggcccagcgctccatgggaagacgtcaccccgacacccggcaacgggccagggcgcgggccaggctgggagccgcttggctggcccgcacagggcgccatttgtcctgcacaaactcgatcatggttgctgtgtagccagggcccacaggacgaccactacgctccgacggcacaacagcatctttcaccacagaagaacgtgattggcgcgccagattcacaatggtctgcttggggtcgtccacctcctccggcctggcagggattttcccctgggggatggacagataccgagccaacgccccccgatcagccatgaaccaggcctccacagcccggactgcgatgcaaacatgcagtccgggcgattgtccatccgggaaggcccggatcatgtcatggtggagacttggcgcacagggcttccggtcaaggtcgcatacaacaaaccacggcaagcgttttgcactctggttgtaactcggcagtttcttgagcaaattgccgacaccgttctgaacatagatggttccacattgaatcccggtttcagcaaataatttcctgacaacagcagcatcaatgattccctcaaccacagcatggacaggctgattgatgttcatcttgtgaactccctagtctgccatatgaaaccgatcaacttgctccggggccacggccggcatgagaatctcgccaagggacaactgcccatcttcgctgcagagggaagcggtgggttgatgctccgtggctggaatcatctccgtaccctggggaccaggtttcaggagatgcacttcgtccaggccgatgccaggatcattaaggaggtggggtgagtgggtggtgatcagcagttgccgtggcgagcggcgatacaggcgcgtcatcaggctgggcaatcggctgaccaaggcggtatgcaaacccagttcgggctcctccagcagcagaggtccccctttctccgccagggaccagagcaggccaatgaggcgcagggtgccgtcggagaaggcccgttcatcctgtttggccggacgcttgcgccagtggacaaagcgaacctgtaaatgccagtgccccccctcgtcctgctccagggtgaggtcctgaagctggggaatggcaatctgcagggcctggctgattttgcggagccgggcatcacgggtgcgctggggcgtagcagcaacggcctcaagaaagtcggccccgaagggatcgttgcggcgcccggcgaaacgatccagatctctcatcaactgaggaacaatgtgtaaatagcggatggaggttagaaattccgtcaggggccgaaatttctggttggccaccacttgctccaaatgggtttgccgcagccggtcgggatcatctttatcttcccgttttgggcggcgcagcacctgacgcccttgagcatccgttaccctttccgccaccacttcgggcacatgcttttgtgggtgactgcgaacctgcagcgagtacttccattgctctggctggtttctgttgcccacggtgacggccagcgtgaaccctggcggtcgccgggcatggaggctacgaattgcccccattccaccccggctgccgatggcggcttgcaagcctttgtccgctgtatcccgcagaaagcgcagggcatccagcacgttggacttgccggaagcattgggacccagcaaaaacacccgtggggccaggggtatgtccacctgtccgtgaaagttgcgccaatgcaccatctgcaaggacgtgaaaaagagcccaccgctttggccctgtcgcttgtcacgggggacttcagggttgcgggtcgacatctgttcctggtgcctggttcttctgagggtagctggtgggcgctgctctggcggctggggttggcgggtaagataagggccaccccgcctgggccttctatcgcctggcatggttcttgcttctgggcaccagggaaaccaagagaagcctggaaccagactggaagcatgtgcccagaggagagccgctgttttctcacgacaagggtgtgtgaaagtgtgtgaccaaatcagaagaatact

SEQ ID NO: 3439 - DNA, 18217 bp, synthetic construct
  misc_feature 1..18217: note = Synthetic
  source 1..18217: mol_type = other DNA
tctctgcccctccttcgtcccaccgccacccctttcctcattcccacgaaagtgggaatctatcgattagcctggcgccagcaagataagtccctctggtgtggtgcgctctctctggctacctggtggttgtggctgtggaagctgtgaggtgttggaactggcaatggattcccgcttctgcgggaatgacgagatgagggacatagcaacacgccagcgccaacaaacaccaccaacccccatcccgaagagcgttcagtaatgccggaggaaaaacaatgcctttgatgttcatggtccttcctctcttggacttggcgatgatccttccaccaccgcgatctcctcgcttgtcaacccgtagagttgatagaccagatgatcaatttccgcctccagtgtgctggtgtctgctgatgggttaggggctttggcttgcaggatatggtctatcaattcgataaagggcttctgctgagcatcggagattttaggaatgggaatttgctcaactgtatgcttgatccatcgcgttactcccatgccggagttaagtgcagtggtccccataaaccaggttgccattgtggaattaagcacggcacaaagatacttgattccgtacccagttatcataaatgcagtgtttagacaaaacgtttcgccaacggcatacgcaaaacgtcctcgctctgtcagatccatccaaaatagcttctctttactaaattcctcgtagtaagcacaggcatcttgcagctcataatacgcattgtttgttctctttctggatttctttccaccagataacttcttccccgattgctccaaccgtgcttttccaaaagagagcagatactctctcactgctgggtaatcatcaatgttgatgcccagagcggggagcgttgcgattagccatagccccttccaatcaactcgataacgctgtatatcccgcccccgcaacaccggcttgaggatctcgccagacttggggtcagcagcaacaagtgcagcgcgagtgtcctcatcaatgatgaaggcttcgttgagaccggttgtcactccccggtacatcgttacgtcccaatggcgcagcggcgttccttttgtgcgcatcttctccataatactttgctccccaacagacaatatgctccagggagcgtcaccttctggcgccacgctgccccagagccgggctggaggcgggaagtccgtggtttccagttgatccaggtccacagccgggaacgacttggcgttgcccccttgccgcagcagtagaatgctggaatccacaatggcagactcgaaaacgtccttgcccaattccaacagggctgtgggagtgtgtttttgggccaggtagcggcgggttttcttgccgtattcggctttcagccaactgttggaggtgatgtaagccagaatgccaatctgcgcccgcaacatccggcaaccccgttcataaaagagttgatagatgtcgccggtcctggcaaacgtcacgtaaccggcatccttgtagagttttcccagtttgccgccgtcttcctgaagctggttgtacggcggattcccgatcaccacgtcaaatccattggccacgccaaacatatactcagcatcaaaccaatccgttttggtgttctgatcgtagggattccaggtggcgagttgggcggcggaagcggctaggtaatgaaattcggcctgcaagtgacttgccaactgctgtcgtattttggcatctttacggcgacatgccatcttgatggagcgggtgttggcgtggaagtacttctcacgattggtggctagtttcgcttgcagattgtagacctcgcgggtgtagccgatcttcatctgggacggttttttcaagccgcgtagcgtgtccgccgccacaaaacgggtttccaggttgggcaggggtttgacgccgtagttggcgctggggtcgttgttgggttgctgctcaatggccagggagatgaagaagcgcagcttggcgatctggcaggccaccggctggatgtccaccccgaagatgctgttctggatcaggtagagtttgcgcccgaaatccccggaataccgctggaaggtctggctgatgtccagcagttcggcgtcccgctcctgttggtctctggtctcgaatgccgcgtttgccctggcgccggcccgctctttttgcagggcttgccagcgggtgttgtccgggtccagccgttgcagggccagggtgagcttatggaggatgcccatggggaaggcgccggagcccacggccgggtccagcactttgagcccggcaatggcccccactgttgcttcggcttcggcgtcttcaaagagctcgcgggcatcgttgaaggcgtcttcgtagtccagcaaatagcgcagacgctcttgcaaccagtccctgtctccgtcgtggggtggcgcctttgcggccagggccgccaccaacgcctcctccaccatggtgtccaccacgaggcggggggtgtagtaggagccggtttgccggcgggcggtctcgcgggtttccgggttgatggcggccaacaggttctcgaacaccttacccagcagttccgggtccagggccacctcctgctcgacgggggtgttttcctccacggtgaacttgtagcggttgaagatgctcaccaacccgtccgcagcaaagaacaggcggttgggaacgctcagcaggttgcgatggccgggattgtcggagaagcagtcaatgcggtagccgccggcgccggtggcgtcgaagctgtccagacaatcaaagaggccgccgttgataaagggcgtttgcttgaagagcgccagtagtgattcagggtcggccatctcctcctgatggcggtagcgggagaagtcccggtgtgttgtttgccgtctggcgctgaagccccgctggctgatctcggtgttgagggtggcgaagaacaggttttgcaacacggcgcggtagtaggaatccccttgggccaggtcgtagttcttcagcagggaacgcacctgttcttcaatgaacaactcctcggccaccagccccttctccttgataaaccacacaaacagcagacgggtgatgaggcgaagtacatgctcctgcggcggcaaggtgcgcttctggttcgcggggaatctggcctccgccacggcgcgattgaaccagccgaacaggtctttatagaaacgtttgttgagttcctgggtgtccaggctggccagcagggccgccaacaggccgtcgaagttgccgggcttaccgtgcttgcccatccacgccaggcggtgagcaagggaaagctccttcagaatcgaccgatgggcgcggtggggttgcctggggtcaatgtcccgaatgagagacacgctccccaacacgcggcgctgatcgtcccgtttgtggcggcggcgctgcacaaaagccaaggtgacgaggccgcttgaaccacggaacagcaggaaggcgggcatggggaagcgcttgttgatttccctggtgaattcggcgtattggctgcgggaagttctggactggttgagttcaacggcaaggaaaaggtagcttttgttgaggccttggtcgaagtttcttgtatcaaacaatccgccctggctgccgctcgaacattcttcgttgatttcctcgtccgtcacttgaaacaggatatgaatggctgctgcgtacttctggagattttcctccgatgcagtgccagccgcaggcgctggaaactgggcaataaaatcttccacccggccactctgccccgccaacacccgggtgctgcgataacccaaagcgccaaacagtgcaggagcgacttgggggagatccccagcggccagggaagccagggcggctttgacggcggcatcgggatccgggttccctggcatcaggttgcctcctggatcaccagccaggtgaccagttcaaaatccccggcgccccgcggcgtttccgctgcccgcagcagcttgaaaccggcgtcgccggagcggcccaggccggcggtttgttggcggtggtgggcttggcgaatctgggcaatgcaggcgctcaagagggcctcgtagtggcccatccggcggccgttttgggtctcctggtcgaagcggcggcaaagccgggtgatgggtcgggtttggccggcggctgcggcctcgaaggccatgagaatgttccgggcgctgccgcaaccgtagcggacggcgccgttgccttggacgtgaaccaggtagtggggatggagggggctggcggtgcggggctgcttgtccgggttggcgttgcgttgccggaggcagaaaatcacgccgggttgagccttgggggccttttgggtggcgtcttcggtgacggcatagacgccagaaggcatggcctccagagcggcccggttgcgctccaggtagcgcagaagctgggtgaggaaatcatccagggtgaagtccgccaatacgggagcatcgtccaggtcctccaggtgggggacttcctcccggagttggagaagctgggcgtcccggaagcgcagatcacgggccatgtcctcctcgctgaaggggtcttcgtcgccgctggcggtgagatccgccaaggccatgcgggcctgcacccggttttgcaggcgcaagtaggtttccatgtcctccgtgggccagtagtgtaccatccgcacggacgggctgcggctgccgatgcggtcaatgcgcccgaaccgttgcaccagccgcacaggattccaatggatgtcgtagttcaggaccgtgtcgcagtcttgcaggttttgcccctcggagatgcagtccgtggcaatgagcaggtcaatgtcacggttggcgtccgttgtgggccgctggcgggccgtgggggcaaagttgctcaagacggcgttgaaattgttggggccggccgtggcgtgggtttcatcgccggagaccatggccatggcgatgcccagctttttggtcaatgattgcaggttgtcgtataaatacttggccgtatccttgaaggtggtgaacaccagcagcttgcggttgggctggccggccttgcggcggatgcgttgcttgaggtcttgcagcttgccgtcccgttccggcgtgacggcggccacccgctcccgaaccgtggacaacatggccctgtcctccttgaggtcctttgtccagcgggggaggtccagttcagccagccggtagggatggcggctgcggttcacagcaaactcctcgtcttcgttgtcatcatcgggcagggtctctccatggatcaggccatgggttcgggacttatccccctgctcgtatcgttcaattttcttcagcagattatcgatcttcttgatggtgcgctccatggtgagttgcagggcgtgggcggagctttccagccgtttgagcaggttgacgcgcatcatgcccaccaggaagcgttcactgtctttctggttgaagttgtgcgcctggcgtttgctctccaactcgtcaagccgtcccggatcaataacgtaagcgctgggctgatacaccgccagcatgaacgcgccgatccgctccccaagatcctggtaggaaagttcttcgttgatgtcggtgtgggggtacacgttgacaggttgagcacgcctgggaaaccggccgatgcgctccatttcatcggcgtagaattgctcaatctggcgacgggagcgggagatggataccccgttcagcagccgcaggaaatccgcccccaacgagtccaggagttgagccttgtcccgtctcttgtcctgggattgctgctgttcccactgcttgaactctttttgtgctcttgccatcaaggcgcgaatgcttcccacccccaggctgtcttgaaacgcctgttcccgcccttcggtcatcaagtagatctgattgcgtagatccatcagggaggtgttcaccggtgtggccgatagcagcaacaccttggtctggccgcccgcccggatcaccttctccagtagatgctgatagcgcccactgccgtcgttgcggaagttatgggattcgtcaatcaccaccagatcgtagttgccccactggaaatgggccagatcaacgttgccggagcgtccagagtcgcgggacaaatccgtatgggccaggagtgtataaccaaaacggtcctgggggaacggattttgcggatggccgttgctggcgggatagaaggaccagttgtcacagagcttgcgggggcacaacacaagcacctgctgattgcgcagttcaaaatatttgatcaccgccagagcagtgtaggttttgccaagaccaacactatccgccaggatgcaaccgttgtgatccaccaacttggcaattacgctcctggcgccgtcctgctggaattgatagagcttgttccacacctggctgtctttcaagcccatggtggtggcgctgtcgtccccagcctggcgggctgcaatctcctggcggaaaagttcgtagagggttttgtaatacaccgcttccggagcatagtcgttgcccatgtgggccagggcgtccagcacctgctgcttcacgtccctggtgtacccgtcgtccgcccaaagccggtcgaaccaagcccgcagttcatccaccgtctcctggtcctcggtggccagattgatttccaggttgggctgatcgcctgcccccaggcctcgcctggtgaaattggaactacccaccacccctgtggcgccatggggcgagacggtgagatacatcttgccgtggagaaaattggcgcggctgacggagcgaatctccaccgtgctttgccgcacccatgcagcacaacgccgggcaagggccttttgcgccaggacgtacctgggttccaagccgccctcggtcagttcaaacgccttgggctccttctgccccggatcaagatcctccaccgagcccggatcgccaaacaggaaccgggtccggcccacgccctccaactggtccgccaggaggccatagccgtggatggtgaagtaggcggagacaacgctgaagtcttccccgctggccagggcctccctcagataggccaccaccgtgccggtccggttgtccaggacgtggcgttgaccttctccccgttctggagggcagggattccttctcaaattcggcagactacctccctgggtattgcgccatcaagcatcgcacatccaacaccgccctgagcagcggggcttggatcccagggcagccgcggtcatcttctgaaacctgtggcagctttaccgcgacatggactgatgcaacaatccctcgccctggggcaagggtttggattgccggcaattgaccttgggatgccgagcccacacgaagggtcgttttgctgcgaaaagcggctgcaagcagccggtcacaagcaggaccccttctcggtttgctacatggaggatggtagcattctccttcagcttgtgcaagggcttgctgcatggcgttggtttttggcttcgacattggcaccacgtccattgggttcgctgtcattgatcatgatcctggccagggaaccggcaaaatccatcggcttggggtgcgcatttttcctgaagctcgcgaccccaaagccttggtccccctgaaccaggaccgccgtggagcacggatgcggcggcgccacttgcgtcgtcgtcgccagcggcgccaggcattgggcgcactgctgcaccagcatgggttcttgccaaggcgagattcgtgcgcgtggaacagggtcatgggatctgacccttacctgctgcgcaaatgggccttcaatctccagcaggcgaattcccatgagtcacgtagccaagtgctggcggccatgcaggctgggcaagccaagctccccgcgtgggccttggagggtgagcgcctgtctccccatgcggtggggcgggccgtctatcatttggcccagcggcggcatttcaaagggcgggacattgacgagatcgccagtgatgatgggactgagaccagcagcagggatggggatcaggaggaaacagacaagcaggcaatgtctgcgcgagatgacactcagaaagccctgcaacaggagggcaaaacccttggcgcttggctggcggagcagggaccgaagaagcgcaagcggggtgtccatgctctccgacaaaacgtggaggatgagtttgaccaggtatgggcgccccgtttgcccaatgaccggatcagggaagaggtgcgcagggtcatttttgatcagcgtcccgtcttctggcgcgtgaatacccttggcacgtgtcgcttcctgcctgagaagaaaggtctggacctttgtccacggggatcctggctatcccagcaacggcgaatgctggaaaagctgaacaatctccagtttgtgagtccggagcagcgctgcctggatgaagaagagcgtcaagccatcctgacaaagctgcaaacccaggcttccatgacatgggcaggggttcgaaaagcgcttgcccctctctatcgagaacggaatcagggtggagaggaaaagcggctgaaattcaacttgcagcagggtggagaaaagaagttgcttggcaatatgattgagaagaatctggcggacatctttggtgaagcatggaaagatcatcctcatcgccaggatatccgagaggctttgcatgagcgtctctggacagcagattatgggacttgcggcgagcagcgcgttgtcatccgtccggctaagaagcgcgaagagcgcagggaacaagcggcacggtacttcattgaaacgtttggcctatccgacgagcaggccgagaaaatcaaagctttgaaactgcccacaggctgggagccttactcgactgaggcgttgcagaagattctccctttactggaaacaggtgtgcgatttggtgaaattatcaacgggccggatctggcgtcatggcgggaagaaacatttcccaaccatcaagggcaaaccagccaaggctttgatcgcctgccaagcccaaagaacaacaaacaagagcaggagcatattgccagcttacgcaatcccactgtggcgcgggcacgcaatgagttgcgcaaagtggtcaacaacttgattgacatgtttggcaagcctgacctgatctgtgtggaactggcgcgggatgttggcctgtccaagcgggagcgggaggaaaagcaaacgggaatgaagcgccaggagaagtgccgtaatgcagcccgtgaaaacctgcaagaaagaggcatatctgaaccatcacgtgaccacattgagaaatggatgctgtgggaagagtgtggccatcagtgtccttacactggtgaccatatttcttttgaagccttgtttcagaacaatgaatttgaagttgaacatatctggccacgttcccactctttagatgacagttttagaaacaagactctttgcaggagagatttcaatcgtcaaaaaggtaatcaaataccatttaattttcttgctcataatcaagagcaatgggcagccgtgatgggtcgtctggacaacatgaaagcaagaaggaggggagatgtgggcatgtccactgggaaaataaaaagatttctggcccagtccatcccggatggttttagtgagcgacaactcaacgacacaggatatgctgcacgagaggctgttgcttatctcaagcagctctggcccgaccaaggatctgaaggaaaaggcaaggccaaggttcaagccgtatcaggacggcttacggcacacctgcgccgactgtggggcttgaacaacattctgggagacactggcgagaaaaaccgtgccgaccatcgccaccatgctgttgacgcactgacagttgcctgcacccaccctggcatgacgcaaaagctctcccgctattggcaagacaaggacaatcctcgtgcccaagaaccgcaactctcgcctccttggaagacaattcgcaaggatgctgaagaagccgtagacgccattatcgtctcccaccgcgtccgcaagaaagtttccgggcgacttcacaaggagacagtttatggtgatacaggtgaggaagaaacgacaagcaagataacctatcgactctttgccacacggaaaaatgttgaggcattaagcaggaaagagttgaaagagcagatccgtgatgatgaggtgggcaggattgtcagagactgggtagaaaagtatggtggcgatcccaagaaagcttttcaggactcctcttatccaactcttggagatggtggtccagagattcgcaaggttcgcttgctcgtgaagcagcagattaaattgatggcaccagtaaaatctcctaaaggctatgccgacaaggacggcaatcatcatgttgctatctatcgcttatctactggagagatagttcacgatgtagttagcctgctagacgtgtcacggcgcttagccaagagagaaccgattgtgaagaaagagcgtagtgatggtgcaaagtttattatgtcactgtctaaaggtgaatcactagagcttaaaaagaataacgagaataagataaggattgtgacggctattgctgcaaagggtcaggtaagaatggttgatcataatgacgcaacatcaaaagaaacagagtatagtcctcggataaggactgttgctgagaatgctaaaaaggtctctgttgacccaatcggtcgagttcgccccgccaatgactgagcgccttaccgatgctccgtaaaacagttgagttctccacgcctggaacacgcctctcggttgcccaccgccaactggtgatccaaaggcccgatctccccaaggcaactctgcctattgaggacctggcggtggtgattgtggatgacgtctgcgccacctacacccaggcggtgtttctggaactgctgaacgcgggcgccacggtgctggtcacagggcgggatcacctccccatcggcatgatgctgcccctggatgcccaccacgtgcaagccgagcggcatcgcgcccaggtgcaggccagcgaaccggtgcggaagcaagcctggcaagccattgtgcgagccaagatcaaccagcaggctgcagtgctggcccggttcaacgaaggccacaagaggctgacggccatggccaggaaagtccgttccggtgatccggataatctggaggcccaggctgcgcaacggtattggcccctgctgtttggcccaggatttcaccgcgaccgggaggccgagggcgtgaatgccctgctcaactacggttatgccgtgctgcgggcagcggtggcgcgggccgttgtggccactggcttgatcccgtccctcggggtacatcattgccaccgcaacaatccgttctgccttgcggatgatctactggagccctacaggccctatgtggattggcgggttcgcctgctggtggatagtaatggcgccgctgtgcccagggtgtccgaacgggaaacccgtgcggcattgctttcgttactgaatgaaaccatttgtgtggggcagcggcgtgaacccctgttgctggccttgcacaccagcgcggcctccctctgccgcaccctgacgggtggggatcgcgccttgtgtcttcccacagggttgcctttgcagttggactcccttgaaggagcagaaccgggggatgactagcctgtgacgtcggggccggtgcggcaaattccctggggatggcgttccatgtgggtgattgccatgttcgacctgccaacggatacggccaaggcccgcaaagcctatgcccaattccgtaaagccctgttgcgggacggcttcaccatgatgcagtactccgtgtacatccgccactgtgcctccattgagaacgccaagatccacgtggcccgcattggccggcgcgtcccctcagcgggagaagtgcggtttctgaccatcacggacaagcagtttggccggatcgagacctacatgggaaaaatgcgccaagcgccaccagcttcacccgcccagttggagtttttctgagcttgaaatggatgaaaccagtggcgctgagcggcttttggggatcggtagtgtagcaaaccgaggaagggccgcaatccgcagctcacagagcgtggcaccttccccatggccaagtgtagcaaaccgaggaagggccgcaatccgcagcagaaatccgagtagttgtcggcggccttggagtgtagcaaaccgaggaagggccgcaatccgcagctgacatcctgtggtagattccgtaatagcctcgcttcaaagtgtagcaaaccgaggaagggccgcaatccgcagcctgttgccgcaccattgccgcccacctgggagtgtagcaaaccgaggaagggccgcaatccgcagcttgttggtgtgggcgccgatggcaaccctgagtgtagcaacaaagaaagggtcgcaatcgcagttggacatggttatggtcccgccttactggcactcgggggaaactgtgccgccccaggcaggctgaggctgatggttgtgtggcccaggttcagggtggatgcccccagccaggcgcggcgcacgacggcaagccccacactgcctgaccccagggccagccgggaggtgatcaccccggcgcgggcgccgtcttctccctggatcaggttgtcctcgggcaaggcttcaaggggggtggggctccgccagaggcgaagctgttgcttgacgccgtcataggccaccaacctggccaacacctcctgccccaggtagcaccctttgtcgagggccacggccccggcaagacccagttcaaagggattgaagttgtcgttgatctcgttgggccatgccggtatcccctgctgaagccgcagcaactccacgtgtttggctgtcagttgggggcagcgctccagccatgggggtagacacgggaaatcctccggcagcagcagccgcaagcccggcacgccgtcgccaaagtccgtgccccgcaccagcaacgcctgggcatcccccagggaaaccggaccccagccggcaccgccggcctccatggcgatgccctcggcagccaccagagcggcggcggcctcgcccaacagactcacctgccgggcctgggccatgggcagcagggtgacctgatccgcgggaaacagatggcgatcaaagcgctgatgcaacgccggcccgtcaccggccagcaccatcaaccgggcggcgtgctgggtcaccagcacgtccagaagggccgtgagtcgcgccgtggcggtcactgcgcaactgcgccgcagatgaccgggtggggcgctgcccaggtcctgggtggtctggtcatggagaaaacgcaggctatcgacgccggtcaggcgcagaacccggacggtccggtccgtccgcaccggccaggcgcggggctccggtagagcctggcccagccagtgggggaagggcagtggggcggtcatggctggcgctccaatggtgcagggtgggtgctgatgtgctccagcaggaagagggccttgagacgcagccccgcagcggccagggcggcgtgccccccctcctggcgatccacaacggccaccacctcctgaacggcatagcctgcctcccgcaaccgctgcaccgccttgaggcaggagttgcccgtggtcaccacgtcctccagcaccgtcacccgggcgtctggcgctgggagcgggccttcaatccaggcgccggtgccatggcccttgggctccttgcgcacgatgaggccatccagccgacggcccgccagactggcagccatggccacgcaactcaccaggggatcagcccccagggtgaggccggccacggcctgggttccggggtggacctgctccagcagcagcggcgccagcagtgtggcgccggcgccactgaggctgacgggtttgcagttcacgtagtgtgtactgcgctggccactggccaggaggaaactgccacgcctgtaggcctgacgggccagcatctgccgcaaggcttcacggcgccgggcggatgcggatggggtgttgaacagtggagcaggcggctggatgtccatggcgccgagaggggagcttctatagtggccgagaggggagcttctatagtgaaggttcacggctgacgtgatggccccttttgctccactgctgcccttgctgctgagcgccatgcccccgtcagcattggccatggctgcggattgtggacccacgccaccctctcaagccggcgctgttccgtgggtccggtcctggatgcccccggcgttgccccaccagttcggcctcctctcctctcccaacgctcaccagaacacagccccggagagcggtggggacgaacaaccgttggcggccagaggggaggggaatgaccctgcgttttgccccctctagtcggttcagcgcgtctacgtcacgtccacatcacaactccgatacgtggcggcctccgccaggtgttcggcttcgatgcgttcggaatccgccagatcggcaatggtgcgcgccacccgcatgaggcgatcaaggctgcgcatcgagaggccgagacggtcggcaaggcgatccagcagatgccgggcggcgctgctgagggggctgcaaaggcgcaactgacgaccgtccaggaggcgattgtcaaacagttggcggccaaaacgctggctggtgttccggcggctgacggccaggcgctgccgcacctgggcggtggtttccgcggcgacgggacggctcacctccgtgggcgagagccgtcgcaccggcacgtggagatcaatgcgatccagcagggggcctgacacctgtcgccaatagcgacggcgcacggcatcgccacaactgcagctatggaccggatccccccaccagccacaggggcaggggttggccgccgccaccagttgaaaccggcaggggaagcgcagtcgctgcccggcccgggcgatgtcgatggcgccctgttccagaggttcccgcaggtggtccaggcaatggcggccaaattccggcagttcgtcaagaaacaggaccccgtgatgagccaggctgatttccccgggcagggggtggggtgagccgccccccaccagggctgccggggtgcagctatggtgcggagcacggaaggggcgctgactgcgcagacccgcttccggctgggcaaaggccactgaatggacccgccgcaccgccagggcctcctccatcgagagcggcggtaacaaatcaggcaggcaccgggccagcacgcttttgccgcagccgggtggacccaccagcagcatgtggtgaccgccggcagcggcaatttccaaggcccgccgcccatggctttgcccctgcagatccctgagatcaaaaccgaactcatccgccgttgtcgagaaacccccttgatccggagcgggttgcgcctggggattgttcagttgttcctgggcctcgttgagatccgccgctgccaggacggagagcccgtcaatctgggccgcctcggccccgttggccttcggcaccagcagatgcctggcccctccagcctgggccgcctcggccatggccagcaccccacgcaccggccgcaagctgccgtccagccccaactcccctgtggcccagagtccctccagccaggcgaggggaatacgcccagcggcggcttgcagggcaagggccatgggcagatcaaagctggggccctgtttgcgcagggccgccggagccagattcaccgtgagacgagacaccagcgggcgctggccgctgttgcgcagggcggagcggatccgctcacgggactcctgaaccgccgtatccggcaagcccacaatctgaaaggccggcaagccggggcctaaatccgcctccaccaccacgggacaggcctccaccccgacaatggcggcactggtgcaacgggcaagcatggggttgagcggtcaagtgtccggcccagtgttcccacgcttcggcccagcattccatgggaagacgtcaccccaacacccggcaacgggccagggcgcgggccaggctgggagccgcttggctggcccgtacagggcgccatttgtcctgcacaaactcgatcatggttgctgtgtagccagggcccacaggacgaccactacgctccgacggcacaacagcatctttcaccacagaagaacgtgattggtgcgccagattcacaatggtctgcttggggtcgtccacctcctccggcctggcagggattttcccctgggggatggacagataccgagccaacgccccccgatcagccatgaaccaggcctccacagcccggactgcgatgcaaacatgcagtccgggcgattgtccatccgggaaggcccggatcatgtcatggtggagacttggcgcacagggcttccggtcaaggtcgcatacaacaaaccacgacaagcgttttgcactctggttgtaactcggcagtttcttgagcaaattgccgacaccgttctgaacatagatggttccacattgaatcccggtttcagcaaataatttcctgacaacagcatcatcaatgattccctcaaccacagcatgaacaggctgattgatgttcatcttgtgaactccctagtctgccatatgaaaccgatcaacttgctccggggccacggctggcatgagaatctcgccaagggacaactgcccatcttcgctgcagagggaagcggtgggttgatgctccgtggctggaatcatctccgtaccctggggaccaggtttcaggagatgcacttcgtccaggccgatgccaggatcattgaggaggtggggtgagtgggtggtgatcagcagttgccgtggcgagcggcgatacaggcgcgtcatcaggctgggcaatcggctgaccaaggcggtatgcaaacccagttcgggctcctccagcagcagaggtccccctttctccgccagggaccagagcaggccaataaggcgcagggtgccgtcggagaaggcccgttcatcctgtttggccagacgcttgcgccagtggacaaagcgaacctgtaaatgccagtaccccccctcgtcctgctccagggtgaggtcctgaagctggggaatggcaatctgcagggcctggctgattttgcggagccgggcatcacgggtgcgctggggcgtagcagcaatggcctcaagaaagtcggccccgaagggatcgttgcggtgcccggtggaacgatccagatctctcatcaactgaggaacaacgtgtaaatagcggatggaggttagaaattccgtcaggggccgaaatttctggttggccaccacttgctccaaatgggtttgccgcagccggtcgggatcatctttatcttcccgttttgggcggcgcagcacctgacgcccttgagcatccgttaccctttccgccaccacttcaggcacgtgcttttgtgggtgactgcgaacctgcagcgagtacttccattgctctggctggtttctgttgcccacggtgacggccagcgtaaaccctggcggtcgccgggcatggaggctacgaattgcccccattccaccccggctgccgatggcggcttgcaagcctttgtccgctgtatcccgcagaaagcgcagggcatccagcacgttggacttgccggaagcattgggacccagcaaaaatacccgtggggccaggggtatgtccacctgtccgtgaaagttgcgccaatgcaccatctgcaaggacgtgaaaaagagcccaccgctttggccctgtcgcttgtcatgggggacttcagggttgcgggtcgccatctgttcctggtgcctggttcttctgagggtagctggtgggcgctgttctggcggctggggttggcgggtaagataagggccaccccgcctgggccttctatcgcctggcatggttcttacttctgggcaccagggaaaccaagagaagcccagaaccagactcagactggagcatgtgcatagaggagagccgctcctgatgccactaccgtgccattgttcagagaacggctgcgaaggcagaggttatgaagagctggtagaaaaagaactaagagcttgttgaagaatccccctgaagagggatagatcttgcccttggggga

SEQ ID NO: 3440 - DNA, 17854 bp, synthetic construct
  source 1..17854: mol_type = other DNA
  misc_feature 1..17854: note = Synthetic
tgtcgaacagggcgtccaccgcctcctgcagcatgcgcttttcgttgcggatgatgatgtcgggcgcgcgcagttccatcagccgcttgaggcggttgttgcggttgatgacacggcggtagagatcattgaggtccgaggtcgcgaagcggccaccgtcgagcggcaccagaggacgcagatccggcgggatcaccggaaccacggtcatgatcatccattccggcttgttgccggagtgacggaaagcctcgacgatcttgagccttttggcaatcttcttgcgcttgatgtccgactcggtgtcgttcatttcggcacgcagggtggcctcgatcttttcaaggtccatccccttgagcatctcgcggatcgcctcggcgccgatcatggcggtgaaggaatcctggccgtactcgtcctgggccttgagatactcgtcttcagacaacagctgacggtccttgagcgccgtcaggccgggctccagcaccacgtaatattcgaaatagagaatgcgctcgagatccttgagcgtcatgtcgagcagaagaccaatgcgcgacggcagcgacttcaggaaccagatatgggcaaccggagctgccagctcgatatggcccatgcgctcacgccggacccgcgacagcgtgacctcgaccgagcacttctcgcagatgatgcctttatacttcatgcgcttgtacttgccgcacaagcattcgtaatccttgatgggtccaaagatgcgggcgcagaacagaccgtcccgctccggcttgaaggtgcggtaattgatggtctccggcttcttgatctcgccataggaccaggagagaatcttttccggggacgcgatcgaaatccggatctggtcgaagacctgagccggcgtcgtcggactgaaaagattcatgatctcttgattcatcatcgtctcctcgcgtgccggaaagaccggcagcaaattcggaaagatcccttttccggaagggagcacctgccccctcccgctcaatcatcgtgacccgcaaaaaccgttactccgccgcctccgacgtcggcgttggtcccatctttgaattgtgcaggtcgacattgaggccgagcgagcgcatttccttgaccagcacgttgaacgactcgggaatgccggcctcgaaggtgtcgtcgccgcgcacgatcgcttcatagaccttggtgcgtccggcaacgtcgtccgacttcacggtcagcatctcctggagcgtataggcggcgccataggcttccagcgcccacacctccatttcgccgaaacgctggccaccgaactgcgccttgccgcccagcggctgctgggtgaccagtgagtacggtccgatcgaacgggcatggatcttgtcgtcgacgagatggtgcagcttgagcatgtagatatagcccaccgtcaccttgcgatcgaagggatcgccggtgcggccgtcatagacggtcgactgccccgaggcatcgagacccgccagtttgagcatttcctcgatgtcggtctccttggcgccatcgaacaccggcgttgcgatcggcacgccgtgactgaggttgcgccccagttccatcagttcgccttcgttgagcgtcttgatggtttcgtcctcgccataaatccgcttcagggtctccttcagcggtttgatgtcctgttgcttcgacagatacgcatccacagcctggccgatgcgcttgccaaggcccgcgcaggcccagccgagatgggtctcaagaatctgccccacattcatgcgcgacggcacgccgagcggattgaggacgatgtcggcatgggtgccgtcctcaaggaagggcatgtcctcgatcggcacgattttcgagaccacgcccttgttgccatggcgacccgccatcttgtcacccggctggatcttgcgcttcaccgcgacgaagaccttgaccatcttcatcacgccgggcggcagttcatcaccccgctgcagcttctcgaccttgtcgaggaagcgctgttccagccccttcttcgactcgtcatactgcttgcgcatggcctcgatctcagccatcagcttgtcgttcgaggtcgcaaacatccaccactgcgatttcgaatactcatcgagcagtgcgcggctgatcttggtgtctttcttgaaccccttcggtcccgccacgcccggcttgccgtcgagcagctccgccagacggttatagacgttgcggtcgaggatcgcctgctcgtcgtcgcggtccttggcaaggcgctcgatttcctcgcgctcaatcgccagcgcgcgctcgtccttgtctacgccatggcggttgaacacccgcacctcgacgatggtgccctgcactcccggcggcacccgcagcgaggtgtcccggacgtcggaggctttttcgccgaagatggcgcgcaagagcttctcctccggcgtcatcgggctttcaccctttggcgtgatcttgccgaccaggatgtcgccggcccggacctcggcaccgatatagacgatccctgcctcgtccagattcttcagtgcctcttccgacacgttcggaatgtcgcgggtgatttcctccggaccgagcttggtgtcacgcgccatgacctcgaactcctcgatatggatcgaggtgaagacgtcatccttcacgatccgctcggaaagcaggatcgagtcttcgaaattgtagccgttccagggcatgaaggcgaccagcacgttgcggccaagcgccagttcacccagatccgtcgacggaccatcggcgatgatgtcgcccttcttcacagtatcaccgaccttcaccagcggtcgctggttgatgcaggtggactggttggagcgctggtacttcatcagccggtagatatcgacgcccgacttggtgggatcgagatcggcggtggcgcggatgacgacgcgggtggcgtcgatctgatcgaccacgccggagcggcgtgcagcgatggcggctcccgaatcgcgggccaccaccccttccatgccggtgccgacgaagggcgcttcggcgcgtaccagcggcaccgcctggcgttgcatgttcgagcccatcagggcgcggttggcgtcgtcattctcaaggaacggaatcagtgcagcagcgaccgaaaccagctgtttcggcgacacgtccatataattgaccttgtcgggcgtcaccggcagcacttcgccggcgttgcggcataccacgaggtcctcggtgaaacgccccttggcgtcgagcggaacgctggcctgggccacccggtggcggctctcctccatcgccgagagatagaccacctcgtcggtcacgcgaccgtccttgaccttgcggtagggggtctcgacaaagccgtatttgttgacgcgggcgaaggttgccagcgaattgatcagaccgatattcgggccttccggggtctcaatcgggcagatgcggccgtaatgggtcggatgaacgtcgcggacctcaaaaccggcccgctcacgggtcagaccgcccgggccaagggccgacagacggcgcttgtgggtgatctccgacagcgggttggtctggtccatgaattgcgacagctgcgaggaaccgaagaattcccgtaccgccgccgccgccggcttggcgttgatcagatcctgcggcatcaccgtgtcgatgtcgacactggacatgcgttccttgatcgcccgctccatgcgcaagaggccgatccggtactggttttccatcagttcgcccaccgagcgcacccgacggttgccgagatggtcgatgtcgtcgatttcgcccttgccgtcccgcaggtccaccagggtgcggatgacggagaggatgtcgtccttgcgcagcgtgcgctcggtgtccggggcattgagatcaaggcgcatgttcatcttgacccggccgacggccgacaggtcatagcgctcaggatcgaagaacagcgactggaacatggcctgcgccgattccagcgtcggcggctcacccggacgcatcacccgatagatgtcgtacagcgcgtcctcgcgcgtcatgttcttgtcggcaaccagggtgttgcgaatataagcgccgatattgacgtgatcgatatcgagcagcggcaggtccttgtagccatgctcgttgagcgacttcaggagcttgtcggtgatttcctcgccggcctcggcatagatctcgccggtcttggcattgaccagatcctcggcgacgtaattgccgaacagctcctcctccgacatgcgcagcgccttgagccccttctcctggagctggcgggcggcacggacggtcagcttcttgccggcctcgagcacgaccttgccggtgtcggcgtcgatcaggtcattgatggtggagtaaccacggaaccggttggcatcgaagggcacacgccagccatccttggtccgcttgtaggaaatcttcttgtagaaggtgttgagaatcgcctcaccgtcgagccccagcgcgaacatcagcgacgtcaccgggatcttgcggcgacggtcgatacgcgcatagacgatgtccttggcgtcgaactcgatgtcgagccaggatccgcgatagggaatgacacgggcggcgaacagaagcttgcccgaggaatgggtcttgcccttgtcgtgatcgaaaaacacaccgggcgagcgatgcatctgcgacacgatgacgcgttcggtaccgttgacaatgaaggtgccgttgctggtcatgagcggaatgtcgcccatgtagacatcctgctccttgatgtctttcaccgattttgccgcggtctcctcgtcgatatcaaacacgatcaggcgcagcgtcaccttcaaaggcgcggcaaaggtcatgccgcgctgacggcactcgtcgacgtcgtatttgggcgactcgaattcgtagcgcacgaattcgagcatggaggctccggagaagtccgagatcgggaacaccgaacggaacacagcctgcagcccttcgtccgggcggccgcctttaggctcctcaaccatcagaaactgatcataggacgccttttgaacctcaatgaggttcggcatctcggcgacttccctgatgtgtccgaagaatttacgaacgcgtttgcgacccgtgaatgtctgctgcgccatcgtcgcctctcatgtcggcgcccactgaagagcgcgcccttccagaacaagacggccgttgccgctttctggaccaaatttctcgaaccggaaccgaagcgtcagtcaggaatcctgaatctgttcttcgcacctttaaaacgcaaaacgacgtgcggggcgcacgcgcacacccgcccgtttccgacgatcatccgcacggacttgaccagcccgaaatggtcatctcccaacgactccggaaagtccgcagtcgtctttcgtaagtcgtgtttcgtagtcatcaacaccattccgtgcgccatttgcacgaaatggtgttgacgttcaatcggttacttcagttcaaccttggcgccagccttctcaagctgagccttcaccttctcggcctcatccttgttcacgccttccttgaccggcttcggcgcgccctcaacgaggtccttcgcttccttcaggcccagaccggtaatggcgcggacttccttgatgacttcaatcttcttctcgccggcggcggcgagcaccacggtgaactccgtcttctcttcttcctgcggcgcagcaggaccagcggggcccgccactgcgacggcagccgcagcggagacgccccagtgcgcttcgagggccttggcgagttccgccgcctcaagaacagtgagggcggaaagctcgtcgacgattttctgcagatcagccattttatttccttaaactcggtttggttcgattttaactggttgcgaagggggtcaggccgcttcgctctttgaggcgtaggcctgaatgacgcgggcaaccttggctgccggcgcggtcgtgagctgagcaatcttggtcgctggcgcctggatgaggccaacgagtttgccgcgcagttcatcgagtgacggcagcgaggcgagtgccttgacaccatcaacattcaggacggtcttgcccatcgagccacccaggacgacgaatttgtcgttggtcttggcgaattcgacggcgacctttggcgccgctaccggatcgtctgaagtagcgatcacagtcggtcccgtgagcagggagccgatggcagcaacgtccgtgccttcaagagcaattttggcgagacggttcttcgagaccttcaccgacgccccagcctgcttcatctgcgcacgcagcttctgcatctgggccacggtgaggccggaataatgagcaacgatcgcaacactcgtggtcctgaagacctcgttgagttctttgaccgctgctgctttttccgctctttccacagcactctccggttggcagtctgagggaccgccaggttgcacccaatctctcttccacacccgggccgaagccctgagagtaatggtgagagacgtttcagcctgccctccggggagcaaagctccacagaatgtcgaggtccgaaccaaacctgtcgcatcacatccgcgatgctgaaatccggtcatcacccgtctgtgcaggtatcattaagccattggaaattcgaaaattttccgcaagcacccgcagtctcggacaggacttgatcatccagtcacctggatgaccattgcccgctcttctcgcccccttgcacaaacgaacccccgttcgggaaaatccttgcggaccctgaactgggaaagctcctgcatttggggtttcaaaatgcgaacacaggcgtgccagcggtagccagcacacccgaatcacgtctttatccggttccgggcggcttgccaagagcaaaattcacaccaattcacgcaaccttaatccttctctgagcaaaggagtgattcgtagcgatttttttgcagcttcagcaactttccaggtcagccgaggcaggacgaaccgttgcctcgctcgaattcgccaacagcccgcccccggaatcaaagtggggcggatcagttgtccgatccaccccacctgtaatctccgtttgcagcgcctttttttagagcactgtgccaggctccactttcactcccggccccatggttgaggacaccgcaacacgctggatgtaggtacccttggcaccagcgggcttggccttcgccacagcgtccgccaaggccttgatattctggaccaatttgtcagcggcaaacgaggccttgccaacaccagcctggacgatacccgccttttcgacccggaactcgacagacccgcccttggcagccctaacagcgccaatgacatccatcgtcacggtaccgatcttggggttcggcatcagaccacgcgggcccagaattttgccgagtcggccaaccagcggcatcatgtccggagtggcgatgcagcggtcgaattcgatcgtccctgcctgcaccttttccaccaggtcctcagcgccgaccacatcggcacccgcccccaccgcatcatcggccttggcgccgcgggcaaagacaccgacacggaccgtgcggccggtcccgttgggcagcatcacgacgccgcgaaccatctgatcggcatgacggggatcgacgccgagattgatcgcgacctcaatggtctcgtcaaacttggcgaccgcccgctccttgatcaatttgactgcctcatcaagcggatagagcttttcgcgattgatcccttcgcgaaccttcttcaaccttttcccaatcttcatgatctcactccccaacaacgaggcccatcgaccgggcagagccctcgaccattttcatggccgcgtcgatgctgtcacaattgagatccttcatcttccgctcggcgatctcacgcacctgagctggtgtcaccttgcccacccgatcgcgaccaggtgcctttgatcccgactggatcttcgccgcctgcttgaggaagaaggacatcggcggcgtcttcatttcgaaggtgaaggtccggtccgcataaatcgtaatcacgaccggaatcggagtgcccttttcctccttctgcgtctgggcgttaaacgccttgcagaattccatgatgttgaggccgcgctgccccagtgcggggccgatcgggggcgacggatttgccgctcccgcagggacctgcaacttcagggtcccggtcaccttttttgccatagatatccactcctgtttgtggtccggatccgggcggctggcgacctaccctcttcctcccacagcctcgattggcgcgacggaatgtcgcgccgcccggtcagaccttttcgacctgaccgaattccagttccaccggggtggcgcgaccaaagatcgataccgcgaccttgagacgcgaccgcgcctcgtcgacctcctcgaccacacccgaaaacgacgcaaacgggccgtcagcgaccctcacattctcaccgacctcaaacgacaccgatgttttcggccgctccacgccctcctgcgcctgctgcaggatgcgcatcgcctcggcttcggagatcggcaccggcttgttttcggcacccaggaagcctgtcaccttcggcgtatttttgatcagtgaaaaggcctcgtcggtcagacgcattttgaccagcacatagcctgggacgagtttccgctcagccgtcacttttcggccgcggcggacttcgatgaatttttcggtcggaacctccacctcttcgaacaggtcctcaaggccccgctgtttggcctggtctcgaatcgattccgccaccttctgctcgaaattggagtaagcgtggacgatgtaccagcgtttgtcagaggactgtgctgcggtcgccatcagtggatgcccaatagagaagtcacgatgaagcgaatcaatgtgtcgcccagcgcaaagaaaactgacgccagcgccaccatgacgaaaaccatgatcgtggtgatcgtggtctcccggcggctcggccaggtgaccttcgccgtctccgaccgcacttcctggataaatttgaccgggctgtttgccatctggtgtccaatccgtcgtctggcgggttcattgagaaatccaaacagccatcattcggcccgcctctcatgtgcgatagcctggacggctcgtttgttctgggaacaaaaacgcgtcggaaatccgcttgttacacgggccgcccgctgttcctgagtgaatactgtcaaaccattggatggtcaagataccaagcaaagcgatgcaaaacgatcggcggagcccactcaactgggtgaagagccggaaagctgctcaggcaggcctctttcgaccgaaagagaggggcaaaaagagaactcgtttgtccgcaacgcccccaaagcgaaatgcaggactgagatatttcctaactttttcaaagacataccatgttaccctcacttggaaaagattgaggcttgccaatgattgaaagattctgggggcgtttgttcgccacaaattacgaaataaaatgctgactgcacaaaatgtgacattcccgccacacttcaaaacgccaaaggctcgtcgctcctgctcgacaagacgcatttcagcatgattcttggaacagaatcatccgaattcgtagaaatttggaatttttcactccgcacagccacagaaacgggagatttttactgttgttttggagaatctgggcacatccagctgacttccacgcaatttggtggccttaatgcactggctgggaacaatgggcagcaaaagtgagcgtgggtaaacgacagctcagaaagcaaataaccccgccatctctgacggggttaagaaccggcaaatgaccttgggatgccgagcccgctcgaagggtctttttgcttgcgaaaagcgaccgcctctcgatatgctacgttctctggctagcatagcctccaagccaacgcaagcaggagaattgcatgcagatttggggttttgacattggcacgacctcgattggctgggctgtgatcgaacatgaatttgccacgagtactgggcgaattcttggaatgggcgtccgcatcttcccagaagcgcgcgatccgaaaggaacgccgctcaatcagacccggcgccaaaaacgactggcgcgccgccaactgcgacggcggcgggagcgacgcaagacgctgaaccaagcgctggctgatgccgacctgctgccggcgttcagcaaagaccagggcagcgagtgggcgcgcgtcatggcccttcctccactgccaattcgcgaacgggctctgcgcgaacgggtcgagctgcacgagtttggccgagcgctctatcacctcgccaagcgccgtcatttcaaggaacccgacttgaacgaaagcgatatttccgaagtcgaagatgccgccgagaaagccgcctgcgatgcgcgcaatcaaacgatcaaggaacttaaggcaagcggaaagactctcggagaatcgctgtcgacgcggtttcctgtgcagggcgacagaacaagggggatcaagggtgctgttccatcctcgcaaacgcgccgcattcatgcactgcgttcccatgtggttgcagaattcgaacgcttgtggtccgcgcaggcgctgtaccatccggcccttacggatgtactgaagacccatattttcgatgtgatgttcgtgcagaaaccggtattctggcgcaagaacacgctcggccaatgcaggttgatgcccggcgaggagctggcgcccaaggggtcgtggctgtcgcagcagcggcgcatgctggaaaaactcaacaatctggaggtcgccagcggcaatcgccgccctctcgatcaggaagaacgcaccgcgatccttgctagattgcaggtccaggcgtccatgtcgtggggcggggttcgcaaggcactcacgcccctcttcacaaagcgtggagagaaaggtctcgagcagcggatcaggttcaacctggaaataggtggcgagcccaaactgcttggcaatccgctggaagcgaagctggcgggaatcttcggcgacggatgggcgatgcatccccaccgccaagcgatccgggatgcaatccaccatcggttgtggtccgctgattatgctgaagtgggccagcgtgtggtcatcctgccagccgctgagcgggaaatccgtcgggcgacggccgcggagcgcctgaaagcagattttgatatcaccaatgcccaagctacggaactcactggcctcgcacttccaaccggatgggaacccttttcgaccaaagcattggaggtgatcctgccggaactggagcgtggcgaacgttttggaacgctgatggtttcgcctgaatgtgcccgatggcgcgaggcaacctttccgaaccgggaggcacctaccggcgaagtactggaccgcttgcccagccctgcgcgcaggaagctcccgaacggcgaatgggatagctccgagcaggaccggatcaaagcaatccgcaatcccaccgtggcgcggacccagaatgaactccgtaaggtggtcaacaacctgatcgacgccttcggcaagcccgacctgatccggatcgagcttgctcgcgaggtcgggctctcgaaacgcgagcgggaggaacggcaaactggcattcgaaagaatgccagtaaacgggcggacgcaaagaaggatctcgaaacaaagggcatttcccaaccttcagcgcgagacatcgacaaatgggtattgtggaaagagagtggcgaatgctgcccctatacaggcgaaatgatcggatttgacgcgctgttccgccaaggggcgttcgaaatcgagcatatctggccgcgcagtcgatcattagacgacagccaaggcaacaagacactgtgtcgccgtgacatcaatatcgccaagggtaatcgaacaccatttgaattcttccaatcacgcccggacgactggaatgccgtaaagctgcgtctggacaagatgatcgccggcaaaaacagccccggtcttccaaggggcaaggtcaggcgcttcctcgccgaaacgatgcctgacgacttcgcaaaccgacagcttaccgacaccggctatgccgcgcgccaagccgttgccctgctcaagcggctctggcctgacgtaggagagcccagtcaggcagcagattttggcctcagcgaggaactgcgccgccgaaaggtactcccggttaccggcagggtcacagcgcaattgcgcaagctttggggcctcaacaacatcctgtctgatgatggagagaaaacccgagctgaccaccgccaccacgccattgatgccttggtggtcgcctgcactgatccgggcatgacgcagcgcctgtcacattattggcagcagaaggatgtaccccacgccgagcgcccgcatttgccgccgccatggcccgggatcagggagaacgcggagctggccgttaaagccatcatcgtctcccaccgtgtccggaagaaggtgtcggggccgttgcacaaggagacggtctatggagatacgggccaggagatcgagcgccaccggataacttatagacaagtcgtcacccgaaaacccctcgctgaactatccaaaacggaacttggcgcgatcagggacacgcatattcgtgagatggttacagattgggtgaaaaagaacggtggtgatccgaagaaggcttttggaatattcccgagaaatacgtcgaaggactcgaaagttcagaaggaccggcctgagattcacaaggcccgtatcattgtcgaacagcaaccgtccctgatggcaccggttgcaacggggcgagtctctctaggaaataatcaccatctcgccatttaccgaacgacggacggaaaaatcgattggcggattgtaagtatgatggaggccgcgcagagattggcgcgacatcaacctatcgttaccaaagccctaaccgacggaagtacgcttgtaatgtcgatatcgcttggcgatactgtgtgtatttgtcacggtgaaaaggcgggctattggattgccaacatcctgtcggcaaatggccaaatcttctttcgccgagcggaagacgcctccggagagagcaagtggggaccaaacgccaacactctttttaaagaaaacgcatgcaagctctccgtcgatccaataggccgcgtgcggccagcgaacgactgaccgatgctcaagcgcacagttgaattttccactcatggcacacggctgtcggtagcgcataggcagctcgtggttgaacgacccgaattaccaaagacgaccattcccattgaagatctgggcgtggttatcgtagatgatgcccgcgcgacctatacacaggctgtcttcctcgaactgatggaatctggagcgacggtgatggtcactggccgtgatcacctgccagccgggatgatgctaccactcgacgcgcatcatgtcctgaccgagcgccatctggcacagattgccgcgagcgaacccacgctcaagcggacatggcaagccctgatccatgccaagatcgcacaacaagctgccgtgctcacccatttcaccggctccgatggcggcctggggccaatggcgaagcgggttcgctccggcgatccggacaatctggaagcgcaagcggctcagcggtactggcccttactgttcggcaaggaatttcgccgcgaccgaaacgccagtggaaccaatgcgctcctcaattatggatatgccgtggtccgagcggcaatcgcccgagcaatcgtcgcgagcggtctcataccttccctgggcgtctttcacaggaaccgggccaaccccttctgcctcgctgatgacctgctcgaaccctttcggccgttcgtagattggcgggtgcaacttctgctcaaggagagtgaaacctcatgcacattgccagacctgagcgaacgcacgacgaaagcaacccttctttcacttttcaatgaaaccattttggtcggcgcacgacgcaatccgttgctggtggccatccagctgagcgccgcctcgctcgctcgggtgctgacgggagatgggacggccttggctctgccagtagggctgcccctgtcgcctgatctgctgggaccagacggtgtcgattaatggctgcaagcccacgacccgttccagaactgccttgggggtggcgctccatgtgggttatcgcgatgttcgatctaccggtcgacacgccaaaggagcgcaaggcctatgcacgatttcgcaagtccttgcttgcggacgggttcaccatggcccagtattcggtctacgctcggcattgcgcgtcgatcgagaatgccgaaattcacgtgacccggatgggcaagtgcgtcccggacgacggcgaggtgcgattcatgaccattaccgataagcagtgggaacgaatccggatctttgttggaaaaacccggcgttcagccccgccatcccccgcgcaattggagcttttctgatgtgccatcatcgagaaaacataatattttcaggatgatggcacacaaggtactgtagcatatcgagagccggccgcaatccgcagcagttgcgggaaatggttcattgcgggccgcactgtagcatatcgagagccggccgcaatccgcagcccagagtgcacgccagaccggaaggcgacaactgtagcatatcgagagccggccgcaatccgcagcttactgacgccacagtgtgtcgcgtgactgactgtagcatatcgagagccggccgcaatccgcagcccgagatatcgtggccaatggatttcttctactgtagcatatcgagagccggccgcaatccgcagcccagatgctgcatcagcgacacaagctgccactgtagcatatcgagagccggccgcaatccgcagccggcaccactcgcgagccggccgtcgcacgactgtagcatatcgagagccggccgcaatccgcagccagacaaggcggcggcgcgtgcggccatcactgtagcatatcgagagccggccgcaatccgcagctttccgagcttcgttatggtgatgcttttgactgtagcatatcgagagccggccgcaatccgcagccaatccgctgcttggggattaccgggagcgactgtagcatatcgagagccggccgcaatccgcagcatcaacttgatcatcggcacaataccgacaactgtagcatatcgagagccggccgcaatccgcagcgcacttactctgttgggtcaagaacggcgcactgtagcatatcgagagccggccgcaatccgcagccctgtgcctgctctttcagaaagtcaatggactgtagcatatcgagagccggccgcaatccgcagcagcgtcaccgagatgccgcggctggcgcacactgtagcatatcgagagccggccgcaatccgcagcggaaacaagggaatacattctcggcaatcaactgtagcatatcgagagccggccgcaatccgcagcagtaattctacccgacaatctgcagggccgactgtagcatatcgagagccggccgcaatccgcagcattgggaaagcgaagtcgccgaagtcacagactgtagcatatcgagagccggccgcaatccgcagccaagtgcgcgctatgctgcaagctgaggcaactgtagcatatcgagagccggccgcaatccgcagcggcgtggattgggtggataacggtgaaaaaactgtagcatatcgagagccggccgcaatccgcagcgcagcattccagatgccaggagcggccatgactgtagcatatcgagagccggccgcaatccgcagcggcgcgctatggggatcagaccagatgagcactgtagcatatcgagagccggccgcaatccgcagcgtcgccaaaagggtgcgttacgctgtgcggactgtagcatatcgagagccggccgcaatccgcagcagtgatggcgaaatatcagggaggctccccactgtagcatatcgagagccggccgcaatccgcagcgatcaggctcgccagcacattctggaagtgactgtagcatatcgagagccggccgcaatccgcagcgccacctgatgcatctctcgcgcatcgctgactgtagcatatcgagagccggccgcaatccgcagctcaccgagtgcggggtctacgaggcgccggactgtagcatatcgagagccggccgcaatccgcagcatcgcggaaattatcgaacaggaaacccaaactgtagcatatcgagagccggccgcaatccgcagctccgacctcgagatctattcggccgccggcactgtagcatatcgagagccggccgcaatccgcagcggacgcgccgatacatgggagccggcagctactgtagcatatcgagagccggccgcaatccgcagccaaattgcttgttgtcctccctgtagaccaactgtagcatatcgagagccggccgcaatccgcagcaaccaactatgtcgctgtacatcagacccaactgtagcatatcgagagccggccgcaatccgcagccgctctcagacagggctcgaacatgtcgcgactgtagcatatcgagagccggccgcaatccgcagcggcgggaacgttgtgtgcggtgaagccggtactgtagcatatcgagagccggccgcaatccgcagccaaagtctatgatccccgtcggagcgatcgactgtagcatatcgagagccggccgcaatccgcagcgacaaagtgccgcgaccaatcgtgcgcgcgactgtagcatatcgagagccggccgcaatccgcagcaacgagctccgggaggcatcaccttcactactgtagcatatcgagagccggccgcaatccgcagcctgtgagcatgaccagagcggattccgctcactgtagcatatcgagagccggccgcaatccgcagccgcgtaattgctgtggagcaccatacaggaactgtagcatatcgagagccggccgcaatccgcagcaatatgtcatcagcgtgaacactttttattactgtagcatatcgagagccggccgcaatccgcagcctgcaagctgatcagggccgacctcggcaaactgtagcatatcgagagccggccgcaatccgcagccgcggcggtggcgacctccagctgaccggtactgtagcatatcgagagccggccgcaatccgcagcaacgtcgcgacggtccagaaaaagccgtgtactgtagcatatcgagagccggccgcaatccgcagccatatccccagcaggcgaatcaggctccgactgtagcatatcgagagccggccgcaatccgcagcgacgcggcggcgttcctcgtggtacctcgtactgtagcatatcgagagccggccgcaatccgcagcgccatcctcacattatcacccgcgacttgtaactgtagcatatcgagagccggccgcaatccgcagcctgtcgctgctcttggtggcgcctatcaggactgtagcatatcgagagccggccgcaatccgcagccaaagtctatgatccccgtcggagcgatcgactgtagcatatcgagagccggccgcaatccgcagcactggcgcgactggcgcgactcaatcgatcactgtagcatatcgagagccggccgcaatccgcagcgccggtgaatcagcgattccaaatggcccttccatcgggtgccgatcccccagtctgcgttttttcagggagggcggccagacgcgatggtcgtcatcaatgcccaccaatccgggaaaaccagatagg

SEQ ID NO: 3441 - DNA, 14468 bp, synthetic construct
  misc_feature 1..14468: note = Synthetic
  source 1..14468: mol_type = other DNA
gattcttcgcgttcgctcatcttgcggatgcgttcgcgtttgacgccggcgacgagcaacatgtacgggctgtcgccgtcaaggtcgaaccagtcggcgacatcctcgcgaaggaccgagggcgcgaaaggcctgaagctctcgcgatacttgaccttgagatttaggagcttctgcatggtcggcgagcgcggatcgccaaggatcgagcgggcgccgagcgcgcgcggaccgaactccatgcggccttgcatccagccgacggcctttccctccgcgagcgccgccgcagtcgtgtcgatgatcgccgcatcatcgaacgacttgaacctcgcgccggccgccgtgaggcgcctttcgatatccgcctgttcataggccggcccaagataggcgccgcgcatacgatcttggcgcccgccgagcggcgcaagcggcttttcatgaaactggtgccagacggcgagcgccgcgccgagggcgccgccggcgtcgccggccgccggctgaatccagatgctgtcgaaaacgccttccttgagcagcttgccgttggcgacgcaattgagcgcgacgccgcccgcaaggcaaagactcttttcgcccgtcgttcgcttcgcttcgcgcgcgaggcccatgacggcgagttccgtcacctcctggatcgacgcggcgatatccatctcgcgctgcgtgaggcgctcttccggctttcgcggcggtccgccgaaaagcttgtcaaactcgcctccggtcatcgtaagaccggtgcaatagtcgaagaatttctggtcgagccggaacgacccgtcgtcccggagatcgatcagattgtcgaggatcgcccgcgcgtatttcggctcgccgtagggggcaagacccatcagcttgtactcgccggaattcaccttgaagccggcgtaaaaggtgaaggcggaataaaggagcccgatcgagtgcggaaagtgaatctcccgctcgatctcgaggcgattgccgagccctttgccgattgacgtcgtgcaccattcgccgaccccgtccatggtcaagaccgccgcgcgatcgaagggcgatgcgaagtaagcgctcgccgcatgcgactggtgatgttccgcaaagagcagcgatccgttccacgcatcgccgcccttgagcttcttcagcgacttcttaagacccgacttctggaagagtttttccttcatccagaccgggatcgccatctggaacgagcgaaatcccttcggcgcggtcgcaaggtaggtttcgagaagccgctcgaacttgatgagcggcttttcaaagaacgcgacatggtcgacgccgtcaagaccgcatcccgcctcgtcgaggcaataggaaacggcgccgcgcgggaagcgcggatcgtgcttcacccttgagaaccgctcttcttgcgccgccgcgacgatttccccgtcgacgacgattgctgcggcgctgtcatggtagaacgccgaaatccccaaaatccgcatcgcggtcggcgcgctagaacagcgaatagataaacggcgcgatcggcgatccttgcgtcaggaggatgaggccgccgaaaatcgtcagcattaggagcaccggcagaagccagaacttctttcgcgccttaatgaaattccagagttcgacgatgaagtccatgtttcgctctccagctcttgaattagaattgattgggcattgtcttggggtcgggcccaggaggctcgcgcacgatccaatagctttcggacggcggctttttcgcccgccgaagaggatcgtgaccgcgcagccgcatcaagagtccgatcggaacgaaggtcagcgcgtaaagcagccccatgacgatcggcgtcatgacaagcccgagcaggagcccgagcttcatccagagcttgttcgggatcgcaaggacgccgggcgccgcgagcgcaagaacgacgagcggcgcgccgaacgcggcgaaaatccgcgcgggccatccggaatgtccgcccgcgaaaaagctcagtgcggcgatcgccagcatgacgccgccgacgatcaggccgaatgaccggttcgacggcccctcgaccgcttcggcggtcgggcctgcttcgtgcggcgcgaatttcctccttccgccgctcattcggtcccgtccttcgccgcggcgcgctcggcgatgaggcgcgcggcgagcgcggcgcctttttcgctgaaatgcccgtccgacgcatagaatgaacgcggatcgccctggcgtttgaattcgctcgccaagttgatgacgtcaacgcctgctcgactcgccgcgtcggtcacatggcgctcattgacgcggaatgcgaattcatttggcagcgctccgcgaaaccgctcggcgcgcggaacatagagcacgacgacatcgccgccccacgattgggtcaattcgcgcattttcttcaggacggcttcgtattgcggaagggccttcggcgtcgccggataatggaggccgagcacggctgaggtttgggacaacgcgaagaagttgcgccacaagcgcgcctcataggtttttgtcgcaacgccgtcgcctccccaaaagccagcgaccgcacgcctcgcggcgtcgatctgtccagcgctcggcgacaattcgccgaagtccgcgcccggcgccagcgcattgcgaagccagggcgtttcgatctcggtttcgagattttcgctgtcgtttccggcgtaatagaggatggcggtcagtttcggacgaaaggacggcccaaagcgtccgagcgttgcatattcgatcagggggccgtttccgcgaaatcccagcgaagcagcgttgcgtcccgatttgcgaagcagcgcggcgacatcctcgccggctttctggcacatgccttcgacaaaggaatcgccaagcaccgcaatgtcgagaatgcccgcatcatagacagcgttcggattgttgaacccgtatttgtcagccttgtatgtcaccaagcccccatccggcctgacgcataacagcgcattttcatgaggcacgccgcccagaaacgccgtcgccagcgaaacgtcgccgccgatcgcgcgattcagccggcgcaatgtggcgcgcggcggcagcgcgcgttcaacgccgagctccgcgatgtgcgggttctccggcgcattgggaattgccgccgcactgcgcgccaatcgataggtggcgaagccttcgtacaggaaaagcgcggtcatgacggcgcacgcgttgacgccgacgatcagcgcggtcgaccggccggcgcgaaaagccgtccacaagagcgcgccggcgattgcggtcggcgcgagaatgtaccggataaattgcgggaccgctccgccgaaatcgctgaaattcacgacggcataggacgcggcgacgccgaaatacgcggccggcaaggcgcaaagaacggcgcccagcccgaaaccgctgcgtgaggctgacggcgcgtctgtcttttgtccgctcacccgaaaagtccccgccctttcctttcgatcaccataccggcgcattccgccgataaaaaccacgaataccctcgttgacgagccgcgaatgcgaacggccgcgacccaacgccggcggccgcgctgttgcgggtgtcgctggttgcgaatgcccgccaaaatggattttacggcgcgcaataatctgctaagggggcgccaattcgccaaactggagatcagaatgcgcgttggggtcccgaaggaaatcaagaacaacgaatttcgcgtcggcatgacgcccggggctgtccgcgaatacgtcgcccatggacacaaagtcatggttcagacgaatgccggaatcggcatcaaggcgagcgatgacgattacaaggccgcaggcgcgaagatcgcgccggacgccaaaacgatcttcgctgaaaacgagatgatcgtgaaagtgaaggagccgcagccggcggagtatgcgcaactgcgcgaagggcaaatcctttacacctatctgcacctcgcgcccgaccccgaacaaaccaagggacttctgaaatcgggcgtgacgggcgtcgcttatgagacggtaacggacgatcacggtggattgccgctgctcgcgccgatgagcgaagttgcgggccgccttgcgattcaggcggcggcctacgctttgacggcgccggcgggcggacgcggtctcttaatgggcggcgtcccaggcgtgctgccggcgaaagtgctggtcatcggcggcggggtcgtcggaacccacgcagcgaaaatagcgatcggacttggcgccgaagtcacaatccttgaccgcaatctccgccgccttgcctacctcgatgacattttcggcggacgcgtgaagacccgttattcgacttacgaagcgctggcggaggaaacggacagcgcggacgttgttgtcggcgcggtcctcataccaggcgcttccgcgccaaaactcgtgacccgagacatgctgaagggcatgaagcagggcgcggtcttggttgatgtctcgatcgaccagggcggatgctttgagacctcaagaccgaccacgcatgccgagcctacttatgcggtcgaaggcgtcgtgcattattgcgttgccaacatgccgggcgccgttcccctgacgtcgtctcacgccctcaacaatgctactcttgcctatggcctccaattggctgacgaaggtctcggcgctctgaggaaaaacaagcacttacgaaacggacttaatgttcatcggggaatggtcacgcaccgcgccgtcgccgaggcgctcagcctgccgtataaggatccgatggaggcgctcggctagggttcgaaaccattcacgttcggttgaaaagagcgggtttgccgaccatttcatcgcaaaggcccttgccttcgacggcgcataggctgagggtttctgtagggagaaaatagcatgcgcctcagcttgaccgtgatcgtcgctgccgctgccttgtcgatcggggccgcgcacgcagcgcccgcttttggctcatcctctcaccgccttggcggatcgtcgggcgagtccgcaaagaaaggcggcgcgctatcgttctttgaagctctattcgcggtgctcggaatcgacgccgcagcgagcgttgagccggtcgtgggcgagacgatgaatcgccgggacggcaagaccaagcagtgcgatcaggccaagaagacagaggttgcgaaagcggaaaccaaggatgaggcggaaggcgcgtcgtccaaaggcaagtcgcgaaccggcgagccggtttacctcgcgttctgaaacgaagcgcgcttgtcggattttgaagcccgcccgtgtcggcgggctttttatttctcgacgccagcggcttttgcgcgtgtgttccggcgccgcacatcttcggcgtagcggcccccgcgcagtcggaagacgacgagcgtcgccccggaaagcgcgaacaggaatccggttgcggcgaaagtccggatcagtggattgttgaagttttcccgctcgcggtagtccatgatgtgcagcatccagaagaagtcgtaaaagcgccagacgcggtttcggcgcgaaacgacctcgccggtctccggagaaatgtagagacgcgtttcgtctctgtcggaaaattcggcgcgccacactggcgtcttgccacgatactccttcggcggatttgacaagagcgaaattctgacaagcgcgccttcgccggcgaaatcgcgttccgcgatctggcgcgcggccggctccgcgatcggcgacaatcgctcgcctgtatcggcgtcgaacatcgcggtcgacgctgcgccgcgcaccacgtaaacgggccggccgagccaggtcttgagcgtcagctccttggcgccgtcgacttccgcgatggcgcccgcaggaggaaaatagttctcgaccgtcaagtcgatcggcgccgcaatggcggcggcggtttcgccgcgcacatgctcgatcgccagaaaactcatgacgacgccgctcgtcatccagacgagaatttgcagggcgaggagaagcccgagccagcgatggaccgcatggatcagccgtttgaagcgcatagccgtctatcgcgccgtaaggacgaccaaggcgtcgggcgacctcagaacggacccgaatgccgcccggagatccgcgccgcccggcgctgatgtcccatatccgaaattcacgccattcgtcccgcggggttttcgagtttcggattcgaaaaggacattagcgcgatcaacattctcgcgccgcttacggatcggaccttcgcatttggactcgttgaatttgcagcgcgaacttccgatccggcgccctaggcgcgcgcgccgctgaatgtcgacgtgccgaacgcgccgagcttgacattgccgttcagcgagtcgccgtcgaccttgccgtcaaattccagcgtgatcggcatcggcgaggtcactttcgcagaccatttcacggcattgccgtcgactgagccgttctcgatggcgaccgagcccatgttgccggacatcgtgccggtcagggttgcgccggccgctttgagctccagattgccggactgctcgcccatcggggtcttgatcttcagcgtccacttgccgtcaacggccatgggtcttctccttttcgggcgctttcttgcgcggttgaaagtcgggcggacattacagagaaccggactcggcgcaaggcggcgaggcagggcggctctacgcgcttgagacaaccccaaggcggcgaggcgatcatcgactcggccgcgaagacggcaatggcggctatttcacttcggcggcgaccctgacgcccatatagcccgcccggccgccgacatcgatgcggctgcggttagcgacgcgcatatcaaccggcgagctcgcccagccgccgccgcggatgacccgcctactgcaatcgccgtccgtgaccgccgagccgtctaccggcgccttggtgaaattgttcacgtaacagtccgcgacccattcgcgggcgttgccgacgaagtcataaagcccgaaggcgttcgccttcgcggagccgatgggctgcgcctcgcgcgtcgcgacattcgaggcgtcgtaccgatcgccccaccaatacgccgtgctggttcccgcacgcgccgcatattcccactcggcttccgtcggcagtcggtacttgcggccggtcttgcgcgtaagccaattggcgtaggcctcggcgtcacggaaggaaacgccgagcgccggcatttttccatctgcgccggccgattttggcgcgcacacgccgtcggcggcgcaggcgttccactccgataccgtcacctcatagacgctgacagcaaaggcgggaacagcgacttcccgctgcggtccttcgtaggcgttgcgccctggttcatcctccggcgagcccatgaggaattttcccgccggtagcggcgccatcagggggcacagttcgcaatcccggaacggctcgccgactgagcccgacgaggcggcgggcgtcggctctgtcgccggcggcagcgcagatggcgtcgcctcgccatccgccgcaagattcatcggctcgccatcgatgtcgatctccgtcgactggtccgccccctgagaactgtccgccgaatacacatcgacgaagccggcgtccggttcggctgacggcggctcctcggtggctggcgtcgccgggctcgccgccgcctccgcggcgggcgcaggttcgatggcggcggatttgcctgaattctgaatcatgaagaaggcaaacgccccgatgcccgccgcgccggccgcaatgccgccaatcagcaaaccgttggacgactttttcgccggcgcagccgcgcgcgccgcgggctgcgacgcgggcgccgccggccgcggcgtcgccgccggtctcgacggcgctggcgcgggcgaaaccggtcgcgccagcggcgccgcttgccgggaaagcgctgtcaggcggttcttcgccagcgccgcgaaatggccgtttggataccgcgcgagataggcctcgaagtccgaacgatccgcaccatccttgatcgagttccagaaagcggtttcgatcgacgcatcgtaggcgggagccgaggccgtcgcagcggacgattgcagcttcgcgccgcgttttgaaattgcggtgcgcacatcctgcatgaaggcgcgccaatgcgggtcgtttcggtcgccgcgccagtgacgaaggtccgccgtctgaacaagctcaaaccggatcggccgttcgcagtcctcaataaggaccggcaccaggctcgaacttcgctcgccgacggtcgcttccgcccgcacccatttagagttcgccgatcgcttcgaccacagaacaacgacagcagcggcgccgcgcagattctgctctgtgacttcgtcataggtctcgccggcgcggagcgccgcatcccaccagacggacagcccctcggcttcaagcgcgtttgcgaccaagcgcgccgtctcccggtcttcacggttatatgaaatgaaaacgtctggcaccgccctctcctcggcgcctacctaccgcgccgcgatggtttttgatagggctcctggcgccggacgacgctcgcggggcggtttcggcgccggacgcgtcgtcagtcgccgcggccgcgagggagagccgatggcctacgccttcaataacgacatcttcctaaccgaggaagatcgcgagacggcgcggcgggcgttccccaacgtatattacgcgctcgacaatcccgctcttcgcgacgttttcaagtcccatgacgtaagggcgaaccgctcgaaggcgagaagccggcgctggggcgtcgccgccgtcgccctcgcgaccgccgcgctgatgatcgcggcgagttccccgctttacgccgacttcacgcaggactggaaacgcgcgatttcgatcgtcggcgccttttgcgggattgcgagcgtcatgattgggtatttcggcgtgatgttccgcggccgaaagctccggtggctgaccgaccggctggcgacagagcgactccggcagtttcactttcaacatttcgccgcgcatggcggcgcgattttgcggggcgcgcgcgacgaggcggcgcgcgccgcgtaccttgcgctgcgcgaccgcgatttcgagcgcctcaaggtcgacttcctcgcccgcatcgaggacgagttttacgcgatcgtcgaagcggaagatccggactcgggcctcctcttcgatttcaccgccgatctcccgggtgcggacgatccccatcttgacgaatactatcgcgcctatgagcttctccgcttccagcgccagatcgactactgcaacctcctcttgagcgagggccgcaatctctggaagcacgcgccggcgcggcaggcgcggttcttcggcgcggtcggccttagctgtctcgtcgtcatcttaagccttgattccctggtcttcatgggatcgatactcgatctgccgttcctcgccgcgccgatcttcagcgttggcggcgtcctcatcgcttttttcgcgctgggcgcccggacgatcgaggacggcctgcagccgggggtcgaggcggagcgcatgcggcaatacaggatcgccctcaaccgcagccattcccgcttcaaaggcgcgcggacgccggcggaaaagatcgaaccgatgatcgatcttgaaaacgcctcgttcgaggaaatgatcccgttcctcaagacgaattacgaagcgacgtttgtgatgtagaggggcgtttcggcgcttgcttccagccattcgccgcgcgcgatgatcaaccatccgcgaattgtccgagcgatcgaggattttcagcaatcctgaaacggcgacagccccagcgctcggccggggctgtcaaagaattgggcgttgacctttgggatgcccagcccgcacgaggaggtcatttgcttgcgaaaagcggaccgcctctcgatttgctacaagtaacagtttagcctgtttagtaatcgtaatcaagaggaggcatatttggggagagaggagcggattttcggcttcgatattggcacgacgtcgatcggctgggccgtcgtcgactttgacaaggacgcgggccaaggacgcattgtcgaaaaagacggcgtgccgggaatgggagtccggatctttccggaagcgcgcgatccggacggcacgccgctgaaccaaaaccggcgacagaagcggatgatgcgacgccagttgcgccgccggaaggcgcgtcggcgcgcgctcaacgaaaaactggcggcagccgggctgctgccgcctttcagcaaggacaaggacagcgcgtggtcaaaggtgatggggctcgatccctacccactgcgcgtcaaggggttgtccgagccgctttcggcgcacgaattcggccgtgcgatctatcacctgtcgaagcttcgtcacttcaagggccgcgatctcgaggacgacgatgattttctggacgccgggccggaccccgcggccagcgaggcgccgaagcgaacgcaacggaccaagaaaggggacgcggcgcccgacaccgcaaaggaaggcggcgacgtcgagaaacggcttaaggatgagattgcatccacgcacaagctgctgaaagcgcgaggcttgacgctcggacaatatctcgctggtaaacacgccgacgcgcgaaagggcgcgtgcccgaaggagcgccggcgggaggcgcatgcgcaccgggtcgacgtcgaggaagaatttgaaaaactgtggaccgcgcaggctgcgcatcaccgggcgcttgacgatgccgccttgaaggcgtccgtatcggacgcgattttttcgcagcgccccgtcttctggcgcaaggcgacattggggaaatgccggttcattccggacgccgcgctttgcccgcgcggcagctggctgtcgcagcagcgccggatgctggagaagctgaacaatcttcagatcgcgggcggcaacgccaggccgctggacgacgaggaacgcgcggcgatcctcaaggatttgcagacgcaagggtcgatgacgtggggaggcgtgcgcaagatcctgaagccgatcctgaagaggaaggaccagccagaggctccgaagttcaacctcgaactcgatgaaggcggaaccctgcttggcaatccgctcgaggcgaagctgtcagacatattcggcgacgactgggaagcgcatcctcacaagcaggcgatccgtgacgccgttcacgaacggctctggagcgcggattacggcgaagtcggatcgcagcgggtggtcatccggtcgtcgtcggatcgccgcaagcgacgcgcggaagccgcgcaatccttcgtgaacgatttcggcgcgacgcaagagcaggcggcgaagctccgcgagctgaaactgccgaccggatgggaacccttctcgaccgaagcgctgaagaagattctcgtcgaacttttgaggggcgagccgttcggcgctttggtcaacgcggcaaacgacagcaaggaaatgcgcacccgcgccggcgtgacctatggcgaatggcgtgacgagaatttcccggaccgcgagcaggcgaccggcgaaattctcgacagcctgcccagcccggccgtcaaggaggagcaggaccggatcaagacgctacgcaacccgaccgtcgtccggacgcagaacgagctgcggaaagtggtcaacaatttgatccgcgtctatggcaagccggatctcatccgcatcgaactcgcgcgcgatgtcggcaagtcgaaacgcgaacgagaggacgacctcaaacgcatccgcaagaacgagcgcgaacgcaagaaggcgctcgccgaactccagtccaaaggcatcgcagacccctcgcgcgacgacatcgagaaatgggcgctctggcaggaatgcaatcagatctgtccctattccggcctcgccatcgatttcgacggcctgttccgcgacaacgtctttcaggtggagcacatctggccgcgcgccgcttcgctcgacaattccttcgccaacaagacgctgtgccatcgggactggaacgcgcggaaggggaagcggacgccgttcgcggcgttcggcggcaatacggacgaatgggccgcgatgaagaagcgcgtctgggagcaggccgaagcgaagacgatgtcgaagggcaaggcgaaacgattctgccgcgaagtgcccctgcccgacgatttcgcgacccggcagcttaacgacaccggctacgcggcgcggcaggcggtcgccttcctgaaacgcttgtggcccgatcttggaccgaccgcgccggtcaatgtgcagccggtcagcggcaaagtgacggcgcagctccggaaatactggaagcttaacaacattctctctgacgatggtgaaaagacgcgcgccgatcaccggcatcacgcggtcgacgcgcttgccgtcgcctgcgcgcatcccggcgtgacgaacagactgtcgcgctatttgcagcagaaggacgaacccggcgcccaacggccgaatctgccgccgccatggccgaatatccgccacgacgcggaagccgccgtcgcgaaaatcatcgtctcgcaccgggtccggaagaaagtgtccggcccgctgcacaaggagaccgtctacggcgacaccggcgaggaggttagggcggggaagatcacttatcgccgcttcgtcacccgcaagaaggttgacgccctgacaaaaggcgagctcgaggaaattcgcgatcccaaagtcgggggaacggtgcgcgactgggtctcggcgcacggcggcgacccgaaaaaggcattttcaagctatccgaaactcggcggcgggccggagatcaggaaggtccggctgctgacgaagcagcagattggcatgatggcgccggtttcaaccggttacgccgatctatcggtcaaccatcacatggcgatctatcgtatcgcgggagaaaaatcagagttcgaagtggtcagtctttttgaagcgatgcgaaggatgcgggcgcgcgagcctgtggttcgaaaggcggcaaaaggcggagccgtttttgtaatgtcgctttcgccaggcgacgccgtcgaatggccagagggcgacaagaaaggaattcgcatcgttcagggagtctgggccgcgggcccgatcgtcacgctcgatcacaaagacgccaaaggcgacagcgtctggcgaccgtctcccggctctttactcgacgctaacgccagaaaggtttcaatcgacccgatcgggagggttcgccccgcccgagactgacaggcggggagatgctcaagaagacggtcgaattctcgacgcccggcacgcgcctttcggtcgcgctgaagcagcttgtcatcgagcgtgacgggctgccgaaggcgacgttgccgatcgaggatctcggcgtcgtcatcgtcgacgacgcgcgagcgacgtacacccagtccgccttcatcgagcttctcgccgccggcgcgaccgtcatggtgaccgggcgcgatcatcttcccgccggcatgatgctgccgctcgacgcgcatcacgtgcagaccgaacgacaccgcgcgcaggtcgcggcgagcgagccgacgaaaaagcggctgtggcaggcgctcgtcgctgcaaagatcgcgcttcagggcgacgtgctcgccgaattcaccggggccgacggcggcctcgggccgatgtcgaaacgggtcaagagcggcgatgcggacaatctcgaggcgcaggcggcgcagcgctactggccgcttcttttcggcaaagacttccggcgcgatcgcggcgccgacggcgtcaacgcgctcctgaattacggctatgccgtcgttcgcgcggccgccgcgcgcgcgatcgtcgcgtcgggactcatcccctcgctcggcgtctttcacaagaaccggtcgaacccgttctgcctcgcggacgatctcttcgagccttatcggccctacgtcgactggcgcgtgaagcgcatcacgcttgaacgcggcgacgcgccgctcgacctcgacgaccggtcgctgcgcgccgccctgctgacgattttcaacgagacgatcgtcgtcgacggacggcgcatgccgcttctcgtcgcggtgcagacgagtgcggcgtcgctcgcccgcgcgctgaccggcggcgaccgcgcgctcgcgctgccgggcgggatgccgctctcgcccgacctcctagatctcgacggcgaggagtgatggcgcacgccaaaccggttccgcagttcccctgggggtggcgttcgatgtgggtcatcgcgatgttcgatctgccgaccgacaccaagacggcgcgcaaggcttatgcccgtttccgcaagaacctgatggaagacgggttcacaatgatgcagtattccgtctatgtccggcattgcgcctcgatcgaaaacgccgaggttcacctcacc

SEQ ID NO: 3442 - DNA, 13130 bp, synthetic construct
  variation 2651..2674: note = note, n is a, c, g, or t
  variation 2112..2113: note = note, n is a, c, g, or t
  source 1..13130: mol_type = other DNA
  misc_feature 1..13130: note = Synthetic
gacttcacgtgcttgcagacgcggaaggcgaagatcaggtcctccatctccgcggcggtcggggcacggcgcgtgaccagcttgacgtcgttggcggtgatcctgcccgcgtcgcggctctgtgtcaggaaccctccggcgacgctgcgaaaggtcaggccgggcgccgccggatcgggcatcgcgccggtcagcaacaggcgaagattgcgtctgcgggcgaggatcgcccgcgccgcgtcatccgcgccgggcgcgatgatcacctcggtgaagatcgccgcgattttttccgccgccgccgcgtccagggtcctgttcaccgcgacaatccccccgaagggcgagaccggatcgcagcggaacgccatatcccacgcctcggccagggaagcggcgctcgccacgccacagggattggcgtgcttgatgatcgccaccgtcggcggctcgaactccgccacgcattcgaaggccgcgtcggtgtcgttcaggttgttgtaggacaactccttgccctgaagctgcgtcgcggtcgccacgccgggccgcgatgacgagacgtaaaatcccgccgcctgatgcgggttttcgccatagcgcgtgatctgccgcagcgtgccggcgatggtcagccgacgcggaaacggttcttcgcgcttgtccgcgaaccacgcggcgatggcggcgtcataagcagcggtgcgcgcgtaagcctctcccgccaggcggcggcgtgtcgttaacgtggtgccaccgtgcgcggcgagttcgccaagcaccgtttcgtactgctccggttccgtcaggatcgtcacgaaatcgtggttcttcgccgccgcgcggatcagcgccgggccgccgatgtcgatgttctccacgcactccgcgtcgggcgcccctttggcgacggtggcctcgaacggatacaggttgaccgccaccagatcgatcggcgcgatgtggtgttccgccatctgcgcgaggtgctcggcgctgtcgcggcggcccagaatgccgccgtgaatttgcggcaccagagtcttcacccggccgtcgagaatttccggaaacccggtgtggtccgcgacttccttcaccggaatattggcgtcccgcaacgccttcgccgacccgccggtggacaagatttccacccctcgttccgccagcgcctgggcgaacgcgaccaaccccgacttgtcggatacggagatcagcgcgcggcggatggaaacggtgtcgggcatgacggaaactcggtctgggttgcagcctgggggatacaccgaaccaaacacggtgcgaaacccagcgcccctcgccccgccaaccgatctttattttcgcggcgtgacttcgagcgggatcacgagcgcaccggccacgtcctccactctcagcaattccatcgtccgcgccagcaccttcgcctcatcgtagagttccagagcgcgagcccggccagccgcgcccatcgcggcacgcatttccgggtcggcgacaaggcggcacagcgcctcggccaggggatcgacggtcgcgggaggcaccagcaaaccggtcacctccggcacgatctgctcacgagggccgcgaatgttggtggccacgaccggcagccccgtcagcatcgcctcgatcaccgacatcggcagcccctcgaaatgactgggcagcacaaaaatatcggcggccgccagaatcgcggcgacgtcggtacgatagcccaacaaccgcaggcgctcgcccagaccggcgttgcgcagcagggtcagcatgtcctcgccgcggtccgactgcagccgctcccccactacccacaggtcggcgtacggcacctcgtgcatcgcggcggccagttcggggtagcccttgtgacgcaccaggcgggagacggcgacgatgacgatgcggtcctccggcacgtccagatccgcccgcagccgggcccgcgccacggggtcggggcgaaacaccgctggatcgcggccgttacgcaccgaaatcgcgtcgcggctgatccgcagccggtgcgcgtcgcgcgcctcctcgtccgacacggtgaggaacacggtggtcacccgcgcggcgatccattccatcaggaanncgcgccaggaagccgctgatcggcatgtgagcatgtacgaggtccggtttttcctcccggaacaaccgaaccagagcctggaacgcccgccaatgcgccatgggcgaaacgcgacgttcaaacgggatggcgacgacaaggaaaccctcgtctctgggcacgttgaggaactgtccctccgcgcaggcgccgatcacctcgtggccgcgggcgcggatctctcgcatcaacggcaacaggaactggcgcaacgagaaatcgacgttggtgacttcgatgattttcatgtcaggcgcggattataccgtttgcgtcgcgcgtcgccacgtggggggatgaacgatccagcgacggcacgagttccgtggggcgtttcgcgttcaccgatcttcgacaagtcgccgggccaggccccatgcgcgtcaattagcacggcgcgcggcaacgcaccctccatcccctcgtcctggttcggcccggccggaccatcagcacaaacacacgggtgagaacgattttggggacaccgatggtccgnnnnnnnnnnnnnnnnnnnnnnnnccttaacttgatgcctatgcggtcgggccggtccatgacgactcttgacgatccgacaacgatgccgttccctcagcgacaccaattcagcgccaaaggggcctggctcggcgatgacggctgagagatcgtgtctcaacccaccttgtggatcgcccatttcacatgctgcggcccaccttcgcggcccgtcagcaccacctgctcggtctttcgcagttcgccggagccgagatagatcgactcgtccaggctcagatgcgccccgtccgcgcgaaggatccaaccgcctccggagcgcaaccgcatcagcaccgccgcgctgtcctgttgcagactggcctggaccgagggatgcaaatggaagcgcagggtaaagggctgcggtgattccgcctcgatcacgtcctcgccacgaatgtcttcaccgctttcggacaggtacaaacgccggcggtgaatggcgccgaacggcctggcccagccgtcatgcgtggcctccagccagtgcgcgccattggcttcctgccgttgcacggtgacttcggtcggacggcggcccagaccatgctccagcaattcgctgctgttgacgtcgccgatcaccagggtcgagtgcgccgcggtcgcccgggccgcgtcgtgccattgcggaccgccggccggaaaggcgccgacgttgacgatcatccggtcgcgcccgaccgacaactccatcgacagagtgccggcgtgcgcggtgcgatcgatatccggcggcggcggcgcgcccgcatcgacgatcagcacggtccgtcccgcctggaggcgttgaaaaccgccttcgttgagcgaggacggcgcacggctgccgcggccagcctgggtcagcaccagatcgaccagggtgctggtttcctcgcggctcccgttgaacagcgccaacccgccgtcaccgtgccgcatcgcccgcagcgccggcgccatccgctcgatcgtggccgccagggttggcggcggctgcgtctgccccgcctgcaaaagtgccctgatttccgtcatgtcctgcaacgcgcccaactgcgccgctgggctgcgctcgacgtgggagccatcgggcaacacctgacgcgccacctcgcgcggcagaaaccgcagcgcgcggaccaggaacccgttatgctccggcagagcgaccgcggccgcgatcagacccttcagagctgtcagggagcgagcgtccagttcctcggccggcaaggcggcggacagattgcgcgcatcggacaccagccgcgccatcagccgctggcgaaacggatcgtcggcggtggcggcgaagaagtcatagtggccgagccacgcggtgatccgcgcgccggcgacatccggccggcgggagatcatgtcggagggcgacgcggccatccagtccgacaccagccctcgggccagcagccgcgccggatcggtgcccagagcgcgcagatgccgcaaccaggtaaagccgtgcgcgtaggtcagcagcggggccgagccgctcaggccgccccagccgccttgccgcaaggtcaggacgccgccgccgaattccagctcgcccttcagcagccgcacgcccagattgatgtcgcccggccaaggatcgcgcaccggctgggtcggcgcgtcaggcactcgcacgaaacgcggcaaaggtaggcgagccacgacctgacgcgcgccgcgaagcaggcgggaaccggccgtcacccggcctcccctctgtgcccggtaccgcgcgacgcggcgatggcggggccgcgcaatgccgcgaccgcggcggggcggtccgacgcggcgaagaccgatgtgccggcgatcaaggtgtcggcgccggcggccaatgcctcggcggcggtttccggggtgatgccgccatcgaccgccaaagcgatcgggcgcgttgccgcttcgccgcgcgaggggtcgcctcgcgcggggtcatcgatcatccggcgcagcgccgcgatcttcggcagttgcgagggcagaaatcgctgccccccgaatccaggattgacggacatcaccagaacgatgtcggccagatcgagcagccacgcaatgctttcgatcggcgttcccggattgagcaccacgccggccttttttcccagcgagcggatcagttgcagcgtccggtgcggatgcggaccggattcaggatggatcgagatgtgatcggcgcccgcttcggcgaacgcggcgatgaacggatcggccggggtaatcatcagatgcacgtcgaacggcaacgcggaatgcgggcgcaaggccgagagaacctgtggcccgaagctgatattcggcacgaaccgcccgtccatgatatcgaaatgcagccagtcggcgcccgcctcggtgacggaggcgacctcttcgcgcagccgtccgaaatccgccgccagtaggcttggcgcgatgacgactcggcctgggggttgcgcggtcatggtgggttacctggcaccgggggcggggcggcacaaggcgcggcggatttcgtggtcccccaatcggaggcgcccccagtaatcaaaaacctccgcccgaaggcgaaggttctgaccggcgactgaccttgggatgccgagcccgctcgaagggtcgatttgcttgcgaaaagcgaccgcctctcgttttgctacaattatgacgttataccgctctgaaaatggaagcaaggtgaaacatgcctctgatttttgggttggatattggcactacatcgatcggcttcgcggtgatttaccagcggcctgcgcaaggcgaatggattattcaccggcttggcgtgcgcatctttcccgaggcgcgcgatccaaaagggaccccgcttaatcaggagcgtcgccggatgcggatggctcgccgacaattgcggcggcggcgggtgcggcggcgcgccctgaatgaatgtcttcacgaggccggcctgctgccagagtttggtaccgatcagtggcatgaagtgatggcgatcaacccggtccacctcaggaccagcggactttccgagcggctgacgccgatggagttcggccgtgcgctgtatcacctcgcgcaacatcggcatttcaagggtcgggaactggaggaggaaaccgagcaagacgcagtgtcgccagatgaagccaaggccaaaacggagcgagaggcaacactgaaccggatcagacgaacacacgaaaccctgggtcaaatcctggcggagaagggaccccacgaacgccagcgtggcattcacgccaatcgggactccgtggcagcggagttcgaacgcctatggagcagccaggcggcttatcatccgggcctcgccgaaaccgggctccgtgagcgggttgccgacacgatattctcgcagcggccagtattctggcggttggcaaccctgggcgcgtgccggtttatgccgggtgaggagctatgtccgaagggctcctggctatcgcagcaacggcgaatgctcgagaagttgaataatctggcgattactggcggcaacgcgcggcccctggatgaagcggaacgtgctgccatattggaaaagctgcatgggcaggcatcgatgacctggccagccgtgcgcaccgcgttgaggccaatttttaaagcccgtggagacgaggggcgtgaacggacactgcgattcaacttggaagagggcggcgataagacccttcttggcaatgctgtcgaatccaaattggcgcacatttttggaggagactggacgcgtcatccgcggcggcaggcaattcgcgataccgtgcctcaactgctgtgggacgccgactatgggaaaatcggcactcagcgcgtggtaatccgttctgaggaagaaagaagactgcgccggtccgaggccgccgtaagcgccatcgccgagttcagcgcgacgaaagctcaggcggacgcactggcggcactgcggttgccatcgggttgggagccttattcgacagccgcgttgcagctgtttctgcctcatctggaggccggaacacggttcggggcgctcgtaaacggtccggattgggcgaaatggcgggcggaaacgttcccaaatcgcgatcaaccgaccggcgaaatacttagccggttgccaagcccggcaaataaggatgagcgcgaacgggtagctggtatacgcaatccgacagtcgtacgaacgcaaaacgaagttcgcaaggtcgtgaacaatctgatcagtgtctacggcaaacccgatctgatcagggtcgaggtggcccgccaggtaggcgcatcgaagcgggagcgtgaggagatcaaggacgggcagaaccggcaggccagaaggcgagaagccgcggcgaaggaacttcgcgcgaaaggcatcgaaccggcgcgggccgacattgaaaaattcttgctttggaaggagggtcaggacaaatgcccatataccggggatcaaatctcatttgatgcgttgtttcgtaccggcgattatgaggtggagcacatctggccgagatcaatcagctttgacgacagttttcgtaacaagacgctttgccggcgcgatgtgaacctggcgaagggtaacaagacgccgttccagcattttgagcatcgcatcaatgaatggaacgcaatttgtaatcatctgaaccgattggtggcgaggaaaggggcgccaggtatgtcccctgggaaagtgaagcgctttctggcgcagacggttcccgacgactttgcctcccggcaactcaacgatacaggatacgcggcgaggcaaacggtcgaatttttgaagcgattgtggccagacaccgggcccaccgcgccggttacggtgcaggcggtcaccggccgcgtcactgcccagcttcgaaggttgtgggaactgaacagcatccttgccgacgatggcgagaagactcgggccgatcatcggcaccatgcggtcgatgcattggtcgtggcatgtacgcacccggggataacaaatcaactttcgacctactggcaagcgcgagagaatccgatggctgtgcgacctcggcttgttccgccctgggccaatattcgcgcggacgcggaacgggccgtcgctcaaatcacggtatcgcatcgcgtgagaaaacgggtctcaggaccgctgcatgagcaaatgccgttggggtatacgaatgaggatgtcgccaagggcggaacgatctacggaatctatgtcaaacgtatgcctgtggagaaattgtcccttgataccttgaagattgagagtgtcgctgaaatgtcgcgttccgcgaagttcgtggtccgcgacgctccggtgcggcaggttttgctggatcatctacgcgccgctgattgtaagcccgacaaggcttatccgccgtatcccagcgtcactcccggtggcccggaaatccgaaaggtgcgcgttctgacgattcagcaaaagcacctgatggtgccggttgccaatggctacgccgatccggccaacaatcatcatatcgcgatttatcgactcaccggtggccgggtggatttcgacgtcgtcacccttttcgaagcctcgcgacggttggcgcggagggagcaaatcgtgcggcgagaacgaaacgatggcgcaagcttcatcatgtcactctctgccggggattctttgcggttcccggacggtgagcaggctggtgtttgggtcgtctccggcgtgtgggcatctggggtagtggtaatggagcgcgcggccgacgcctcgcatgccacaacctggcgccccgcgcccggcgcgattctggcgaaccgaggtcaaaaagtttccgtcgatcctatcggacgcatccggccggcaaacgactgaaagaggtgattgttgttacgaaagacggtggaattttcgacgcccggcacaaggctgtcggttgcccaccaccaactggtgatagagcggcccgacatgccgaccgtaactcgcccgatcgaggatttgggtgtggtcatcgtggacgatgtgcgggcgatctgtacccaggcggtgtttctcgaactgctggcggcgggcgcgacggtgatgatcggtggccgcgatcatctcccaatgggtatgatgttgcccttggatgcacatcatgagcagacaaagcggcacatcgcccaggttgaagtcagcgtgccggtccgcaagcgcttatggcaggcactcgtcgccgccaaaatctcgcagcaggcggcggtactaacacacttcaccggaactcattccggactgttgccgctatcaaagcgtgtccgatcaggcgatccggagaatctggaagcgcaggccgctcaacgttattggccagcattgttcggtcgcgcattccgtcgtgatcgcgacgccgaaggcgtaaatgcgctgctgaattacggctacgcggttgtgcgtgcagccgtcgcccgggcagtggtcgcggctggcttaattccatcactgggggtgtttcacagcaaccggtcgaatccattctgtctcgcagacgatttgcttgagccataccggccatacatcgattggcgagtgcggctattgatcaacgacgggggaggcgtcacggtaagcctcgatgaccgtgacgtgcgcgccgcattactgtcgttgttcgcggagacggtggtcgtgggcggccgccgcagccctatgctgctcgcgatcgaaacaagtgcgtcatcgttggcgcgtgcgctgacgggaggagatattgctctggcattgccttcgggattgccagtttcacctgatcttctcgacatcgaagaggcagtgtgacaattgatggtcggccgataccccaaatgccctggggatggcgctccatgtgggtaattgcgatgttcgatcttcccaccaatacacccgcggaacgcaaggcctacacggtgtttcgtaagaaattgttggatgacggttacacgatgatgcaatattcggtttactcccgacattgttccagcatcgagaacgcggagattcaccttgccagaatgggcactcaggttcccgcggaaggggaggttcggttcatgaccatcaccgatcggcaattcggtcggattcgggtatttgccgggaaaaagcggcagccgacccagccctcgcccgctcagctggagtttttttagatgctgaacgggcgaagtctggtgttatttcaacaccttgagagcaaggcgttgtagcaaaacgagaggcgggcgcgatccgcttcgtttcgattgtgtaaaacaaaacgtgaaccccccccgcgatgcccgatgcccattggatcgacgcagtcgtcgagagaatctatcctcttgctcgcgacctccaggaacaattcgcatgaccaccccgatcaccggcgacggcggccacctgatgtatcaatccggcatcttctccggtggccgcctgccgcgccgcgcccgtccggacctcggcaccgtcgaggaacccgcccgcgccatcccgatcttccgcgactgcgacgtgctggtggtcggcggcggcccatccggcaccgccgccgccatcgccgcggcgcgtctgggcgccgacgtcatcctgctcgagcgccacaaccatctcggcggactgtccaccggcggcctggtcatctggatcgaccgcatgaccgattggaccgggcagcaggtcatccgcggcatcgccaacgatttgctggaccggctgccgaaggacgcggtcgccgggccgccgcgcggcctgtggggcaacgccgatgaggccaccgcggcgtactggaaggaacgcaccgccgcttaccacggcatcgtcacctggtcgccgaccatcgatcccgagcacctgaagctggcgtcgcaggaactcgtactggaacacaaggtgcacctgctcttccacgcctggggcgcgatgccgttgatgcgggatggagccgtgggaggagtgattttcgaaagcaaggagggtcgcaaggcgatccgcgccgccgtcaccatcgattgcaccggcgacggcgacatcttccaccgcgccggagccgccagtaccgccgacgtcgatacgcgcgacatccaccattgcatcaacaccgcctggctgttcggcggcgtcgatatgcaacgctggatcgacttcaaaaccagtcggcccgaggcgttctcgacattcatggaacgtggccgcgcggcctgcggcggattgttcgaacggcctttcgtctcctggcgcaacgacgtcgcattgttcatggggcctcggctggcgggctactcggcggtcgatgtcgaggacctgaccgaagtcgatatccgctcccatcggctgatggcggcgcatctggcggtgtatcgcgagcacgcgccgggcttcgagagcgcctttttgaccctgtccgcgccgcaaatcggcgtgcgccacgcgcgacgcctggtgggagtggagcgggtgacgcgggaagactgggcctcgggtgtggcgcggccggacgaaatcggcgtctcgccgtcgctgtcgccgaaatatcccgtggtgtcagtaccgtacggcgcgctggtgcccgagacgctcgatggcttgctggtcgccgggcgggcggtgtcgtgcgatgcgaccagccactccttcctgcgcgaggtgccgcaatgctggctgaccggtcaggccgccggcgtggccgcggcgctggcggccggcgcggcggtccagcccagacatgtgccgatcggccgcctgcaggaggcgctttccggccagggggccttggtgcgggcggtcgccgaggccgcggcgtgagccaaattcaacttcacaccgcttccttcggcgcgtagggtgcgactgtctcagaaatcgaccatgaccgcggaacgtcaactccatggaatcgccgacaatgcatgatcgttcgctggagccaccgcgatgagcccgccggccgcgcgtatcaccgatcaggtgctacaaacggcgccgcattgccacgcgccgatacatccaccggcgccgacgccaacgccggtgccgcaccccgcgttgccgctgatgatcattccgcctggtgcgccgacggtgctgatcggcagcctgcccgccgcgcgcgtgaccgacatgaccatgccgtgcatgttgccgggctgcattccggcgggcccaggattgatcatgatgggcagcgtgacggtgctgatcagcaatatgccggccgctcgggtgggtgaccaaacgctgcacgcctcctgcgtcgccccaatccccagcccaatgggccagatcatgccgcctggctgcccgaccgtgatgatcggcggctgaggccgggtgccctcgcttttcgagcatttcacgccgctttgcccagtatgccgttcccgcggagccatggcgccgctgcggatcgcggcatgggaggaggcgggccatggccagggcgtgcttgactgcccgaccgaggattgcggcgggcgatttccgatcatcgaaggattgccgatcctggcgccggacctgccgcgttatctggcggaagtcggtgtctatctgctggcgcgcgacgacctgtcggcaccggtcgcggacctgctgggaactctgaccccgcccggcgcctggttcgacgcggcccggcagcacttgtccggatatgtccgcgaccattggggcgccttcgacacgaccgacactgaatcacccgcgcccggccaggcctggtccctcgccgaggccgggttggcgctgatcggcgacgtcagcggacccgtgatcgagcttggcgccgcggcgggcggcgtcacacgggctctggccgaacggttcggcacggcggttctcgggctggatctgtcggcgccgatgatgcggttcgccacgcgggctttgcgcggcgggaccttgcgctatccgttgcgactgtcaggcaccgcgtatgtggagcgtcgggtaacgatcccggcgccggtgcgcggcagcccagaggtctggctggccgacgcgttggtgcccccggtcgccgagggccgcgccggcctggtggtggcgctcaatctgttggactgcgtggccgacccggccgccttgatgcgcgccgccgccggactgctgcggccgggcgggcatctgctgttgtgcacgccacgcgactggaacacctccgcgacgccggccgaggcctgggtcgccgcgcgctccccggacatggcgctggcggaccttaccggttgggcggagcgtgtgtcgggactgagcgtgatcgcccatgccgaagatcgcggttggcaagtgcgcgtgcatgcgcgggcgacgatgcactatcgatccgacctgctggttctgcggcggggttaataccaaacggcgaagacaacgacgcatgagtatccccctcatccccgggctcgacccgagcatcgcgtgccgccacaccgcgactctcctcatccaatacgatgcctg

SEQ ID NO: 3443 - DNA, 12936 bp, synthetic construct
  source 1..12936: mol_type = other DNA
  variation 12249..12349: note = note, n is a, c, g, or t
  variation 10782..10815: note = note, n is a, c, g, or t
  misc_feature 1..12936: note = Synthetic
  variation 1391..1400: note = note, n is a, c, g, or t
gccagaatgctgcggaactgatgtccccaggaacatgaatctcctggccccgtaagggttggcctggtttgagccgcacatggcggccatagtcaccattcacccgcacatccgccccaaaggccttcaacatgcgttcgctatggtcccgggagcggttggattcaatgacggatacactaccattggctgtcaggcccgccagcagaagtgcggatttcacctgggccgagggcacggaggtgccaatcacccccccttggagttggcaaccgttgatggccagaggagccaaggtaccattggcccgcccgtgaatgctggcgcccatggtttggcagagggggtggctgacccttcccatgggccgctgccgcagggaagcatcgccgctgagcacaaaataacgccctttgcagcccgccaacagacccagtagcagccgcatggtggtgccagagttaccacaattcagcacatctccaggctcctgtagaccgtccagtcccacaccctccaccacaaccggctgatccttgtctcccaaggggctgatggccacgcccatggcccgcagacagtcggcggtgctacagggatcatccgccgccagtatcccatgaatggtggtggcgccttcggcaatggcgccaaacaacaaagccctatgggaaatggatttatccccagggaccattacctcaccccgcaggctctggcctggttcaatggcaatgctgctgttctccactgggggggcgatggcggtagcggtggatctggacacaacctccgtccaacggttcaagctgccatggtgacaacagatgccccccaccggcaagggtctggctgtttgcaacaagcttgcaagcatcaagtcaacaaaccatcaagtcaaagcatcaaggcgttgtcatcttccagaatggcctgccaggagcgcagatcaaggaatagttcttccagggtggtctcccgtagagcttttgtcagggaacgccgcagacgccgctccagcatggccagcacttgatcggtggcattgtcttcatgcttatcgtcatggctgagagagggctctgcctgttgcagccgctctcccacggcattggccacctgctccagatagatggagttggctggccgggccagtccatagccaccagaacggccccggcgggccacgaccagcccagcccgacgcaactgcaacagaatctgttccagcatggcggcgggaatcttctggcgctgggcaatgtgggacactgagcagagcgtttcctgtgcctgggccaactccagaagggctttcaaggcgtagagggtgcgacgttgcagcacggggcgagtggggaggggcaggcaagagctttaagggtgacccnnnnnnnnnncacataaccaaacagaatggggtctggcggggtctgtcccacatccgccaaccccaactccgcccaacgctccgtaacacgcgccccagtggcttcatccctctccagggcatgaccccagtcgtggcgtcgctccgggccgattttggtggtggcgtcaatggccatgcgtccccccaggccgatgcgttcactggcaaaatccagactgtcgaagggactatcggcaatcaccatgagatcccgttgagggtccaccttggcgctgatggcccaaagcacctggcgcggatcgcgcacgttgatggttccatccaccaccaccacgaacttagtgtaggtgaactggggcagcaccccccaaaacgccatggcggcccgtcgcgcctggcccgcataggccttatcgatggcgatcaccgccagcttgtagctgagggcatccatgggcaggaaaaagtccttgatgtccgggatctgttgacgcaggatgggggtatagatgcggttgagggcaatggccagcatggcctcctccttgggcggccggccgctgaaggtggccagaaacgtgggctgccgccggtgggtgacggccttcaggcgaatcaggggagaatcctcgatgccgccgtaaaagcccatgtgatccccgaagggtccatccgcctggcgctcgcccgggtgaatctgtccctccaacacaatctcgctctgggcgggaatctccaggtcaacggtgcggcaacgggcaagctggacccccttgccgccataaagcccggcaaagaaccactccgagaggttgacgggaatgggggtggcggcagccaggatcagcagaggatgcacaccaatggcaatggccacctccaggggtttgcccatggcctccgccttgcgcaaatggcgcgccccgccccgcaccgagagccaatggaccgtcatggtgtggggagactggcgctgtagccgatagacccccacattgggcacgcccgtctccggatccttggtgatgaccaagcccaggttgacaatgaatcccccatcccccggccagggacgcaacaggggcagggcatccaggtttaccgcctccccctccagcaccacctgttggcaggggggcaaaagatcccgggccgggcgcgcccgcaacacatcccacagcagaccacccatggccagcaactccttgggatgcttggggggctggggttgctgcaaggcggccaggcgctcaccaaggcgctccaactcctccggctgctccatgcccatggcccacaccacccgctccacggtgcccagaaggttgatggccaccggccatgggctccccacgacattttcaaacaccagcccaggaccacccatggccagcacccgatcggcaatggccgccagctccaggtcgggatccacggccgccgtgatgcgccgcagttggccccgcgcctccaggagcgccagaaattggcggagatcttgggccatggaaccagccaacacccggctactgtggcaggccatggatgctgtggtgtgatgaaggttcgctattgccccacgccggaggcggtgcccggcagtggccagcccgatggggcagtggtcatcgatgtgctgcgggccaccaccaccattggctgggccttgcacaacggcgccatggcggttcatgtgttcgccgatctggctgccctgcgcagggcagccgccacagcgccccagggcaaacgcctgctggtgggggagcggggtggtcgagcgttggagggcttcgatctgggtaattctcccgtcgccgtgacaccggctgtggtggagggcaagcaggtgtttctcagcaccaccaacggcacccgcgccttggagcgggtgcaggccgttccccgggtgttcacctgctccctcaacaacctggcggcggtggcccagcggttacagacgttggttgcaggccatgtgtggattgtgggcagcggttgggaggggagctattcccttgaggacagcctggctgccggcgccctgctccacaccatggccacaaccctgggccacgatccccacaattactgtgaaaacgacgagatggccgctgcggcagccctctggcaggtctggcggcacaacccggaagcctgtttgcgcctggccacccacggccagcgcttacaacgcctcggcaaccacgacgaagattttcgctgctgtgccgccgtcaatagcctggcggtggtgcccactcaggttcgtcctggggtttttcaacaaatttgaacccgctggcttgaaacaggctgatccagcacagccaccttcgcttggtactgctccacaatggcccggaattgatccccggcaatggtttcctgttcaatgagctcgttggtcagctcatccaccagggggcggttctgggacagcagtgcgcaggccttggccagggcctgtttggccagttgctgtatttccatatccagggcttttgccgtgtcttttgaataggtggggcgctgttgaagccaatcccgaccgatgaatacctccgcctggttcccttcccaagccactggacccagggatgaaaagccatagcgggttaccatctcgcgagcaatggtggtgacggtctcaatatcgctgctggccccctgggtgatctcctgtttcccaaagaccaccaactctgcggcgcgcccacccatgctcaccaccatccgggcctgaagccgggcccgggtcacaagaccggaatccaccacttcctcatcgggtgtgaagcgggcaaatccacccacgccgccgctgcggggcagcagggtcaccttgtccagatcatcggcctgatccagcagggtggccaataatgcatggcccacctcatggtaggcaatgagccgctttttggcgctgtcctggaggggcgcagcaggtagtcccatggtaacccgctccagcgcatccatgatgtggttgtcctcaatgcattgcttgtgtgcccgggcagtgacgatggcggcttcattgagtaggttggccagatcggcaccagagaagccgggggtgcgccgggcccaggcggcaaggtccacatccggggccatgggccgggtgcgggcatggacattgagaatggactcccgtccacggcgatccggtaaatccaccaacacccgtcgatcaaagcgacccggtcgcaacagggccgtatccagcacatcggggcggttggtggccgccagcaggatcacgccggaattctcttcaaacccatccatttccgtgagcaactggttgagggtctgctcccgttcgtcgttgcccccaccgatgcctgcgccccgctggcggcccacggcatcaatctcgtcaataaacacaatgcaaggggccttctcctttgcctggcggaacagatcccgcacccgactggcccccacacccacaaacaactccacaaattcactggcggagatggagaaaaaatgcacgcccgcttctccagccacggcccgggccagcagggttttgcccgttcccggtggccccaccagcaagacgccccggggaatccgagcgccaatactggtgaaccgatccggctgtttgagaaaggccaccacctcctggagttcgtccttggcctcattaatcccggccacatcctcaaaacagaccttgatgtcgttttcagcgcgtaggcggggtttgctgcggccaaaccccagggcccggttggccgccttggcggaacggcgcagcaggaacgtgaggcccaccaggatcagaagcaccagcagcaaattgcccatcagccccgtgagagcctgctgttgacggctgtcctgaatggtgaggggcaccccggcagcttctgcctcttgaatcagtacaggattctcgggaaacacatccaccacgctctggcgaccatccagcagggtgacccgcaccttgcgcagatccggatcccagagcaactcctgcgcctcaccattgcgcacggcatccacaagaccgctataactgagcggtgccctggctggttggctcagcgctggcgcaacaatggcaatgtggctgtgattggccacggaatgttcccttcttgcagcaactgtaaccagatcatcacccccaatggtttgacgtggtcccaagccatggcaagaatagaaggttcacggttctgtgttcctgcaatccaatggctgtccccaagaagaaaacttccaaccagaagcggaaccagcgccgcgccacgtggaatcgcaaggcgcgcttggcggcccagcaagccatgtccctgggcaaagccgtcctcagtggacgggctacgggcttccactaccccatgaatgatgcggacgaagaggaagaggagggaagctgagccggtgcaggccaactgatggcgcctggcggccccacgtccaccacccgccgccggccatccagggtcgccatcatcatcacgggcggcagcccatccactggggtctgggtgggttgcaaggcgcgatgggggggaaccgatgcccagaaacagcgcaacaactgctccagttgcgccccactgagggcgcccttgccgcggcggcgctgccgcgcctccgcctggagccgccaccgcagactgtggcgccactgctgggggagcaccagcaccagcccatgaagccgctcccatgtgctggtgtagtgggcaagcgcacggctgcaatgggcacaccaggtctgctccgcagcggatgcgccaggatgtggatcatccggccccacctgaaacgggcgggcccccaccatccagccctccagcagaaagacgtctcccttgcgctgggcactgccactgcggttcccccgccccccggccaggcccttatcgaaacagggaatccagcactgccccttggtggcgaagtcgtccagggagcggttcagccatttcaagtcgtggctaccagggggaccacgatcaatggcaaagggattggcggccatggccacagcccgtgcgggcaggggcaggtaatagtcgtcaatggaggccacaatgggggaaaagccataggcttggcccagcacggccatggcctggcccagggtggttttcccggtgcccggcacacccgccaggccaagctggggccgcaacctggtgcgttgcaaattccccatgagatgcaccatgggaatccacagaccccagagaacaccaggatggtgtgggatggcggtcagagcctccacaacggttaccgtacccagtacgtcgagctgctggtccaaccatgccgtcacgtccccttcttccaaatccagtgtggcgcgccagccgccatggcaagccaactggcgggccagtcgccggcgcagcgccggcacgtcaagcaccgtctgcaagttgaggtcgccatccacctggaacatcggccctggacaagacatggacaccagttcaggaccccaacttgaaagcctccaggacaaccgagaagacaaagccgacacggatgttgtccacagcttgccgcagcagggaaggattggctacattggcccccaagctgcgtagccgcacaagaacctcggaggctaccagtaccagcagagctccaaagtcactgagcggcggcaactggctgaggagcggaatgccgatttgcccgacgaaaaagccgccggtgaggccgagaatcaacgccacccggcgccgccatgaggcctgcagcacgttgagaagccagcggccaacaccggaggaagcactctgaaggcgggtgtgttgtgggctcagggtccgggatggggtgaggctgacgggaggcgatcctcttcaaggagtccttgcaggtaggcaggatccacgtggggctgggaccccagggcaggccctgcccaaacagtagcgggttgctgcggtccatcacccagatgatccagaactgctgcggccccggcaaacctctggctccccgtgacacggcttggcgtcaccaggcagcgtagccctgcacggcaggcggcctccaaaccctggggggaatcttcaagggccaccacttggtggggaaccagccctgattggcgcagggccatggcgtaggcctggggatcgggtttcttgcgggccacatcatccccacaaacccaaccagaaaaggcaggcgccagggcttgaaagggctgtgtgcatagcagcgcctccaccgcccggcggaggctggtggtcacaatccactgctgccaccctgctgccgcagcggcttgaatcaggcgtacaacacctggtcggggcgccagagcaccagcggcaacgatacgcccatagtgaacctgcttgcgctcctgaagatctgccgccatggcccattgcccggcttgatccccaggggcgccagggggggccgtggccagccagtggcgaagccgctcttccccaccgctgatctgcagcagtcggtgatagccatccatcgaccagtgccaaggcaggtcccgttccgcaaaggcggcattgaatgcccgccggtgaccatctccctcggtctccgccatggtgccgtccacatcccaaaacagaccaagggcttgggccatgggcgggtcaactgtctgttgaaatctatggcagctttaccacccaagtggcctgatgcaacaaaccctcgccctagggcaagggtttaggatgccggcaattgaccttgggatgccgagcccacacgaagggtcattttgctgcgaaaagcggctgcaagcagccggtcacaggatggaccccttctcggtttgctacgttcagtatgttagcactctgtctcagcttgtgcaagggtctgttgcatggcattgatttttggtttcgatatcggcaccacgtcgatcggatttgcagtcattgaccatgatcctaagcagagcatcggcaggatccggcggcttggggtacgcatcttccctgaagctcgtgatccaaaagctgtccctctgaatcaagaccggcgtgcggcgcggatgcggcggcgccagttgcgtcgtcgtcgggagcggcgccaggaacttggcacgctgctacaccagcaggggttcttgccaaggcgagattcgtcggagtggaacagcatcatgggagctgacccttacctactgcgtaaatgggcattcaatctccagcgggcggactctgatgagtcacgcagccaagtattggaagccatacagtctggacaagccgatctgcccgagtgggcctttgagggtgagggcttgtccccccacggggtggggcgagccatctaccacttggcccagcggcggcatttcaaggggcgggatcttgacgagattgccggtgatgacgggactgagaccagcagcagggatggggatcaggaggaaacagaccagcaggcacagtctgcgcgagctaacactcagcaagccttgcaacaggagggcaaaacccttggtgcgtggctggcggaacgggaacccaacaagcgcaagcgtggcgtccacgctctccgacaaaacgtggaggatgaatttgatcaggtatgggcaccttatttgcccaatgatcagatcagggcagaggtgcgccgggccatttttgatcagcggcctgtcttctggcgcctgaatacccttggcacatgtcgcttcctgcctgagaagaaactttgtccacggggatcctggttatcccagcaacggcggatgctggaaaaactgaacaatctccagcttgtaagcccggagcagcgttgcctggacgacgaagagcgtcaagccattttggccaagctacaaacccaggcctccatgacctgggcaggagttcggaaagccctgaagcctctctatgaacaacggagccaacgtggggaggaaaaacgactaaagttcaacttggagcagggtggagaaaagaagctgctcggcaatgtgattgaggcgaagctagcaactatctttggcgaagggtggcccggacatcctcatcagcaagccatccgggaggctttgcctgagcatctctggggagcagattatgagattttgggtcagcagcgtgtggtgatccgtacgaccaaggaacggcaagaatgcagggaacaagcagcccgctacttcattgaaacctttggcgcatcccatgagcaggctgagaaaatcaaggccttaacacttcccacaggttgggagccttactcgactgaggcattgcggaggattttgccattactggagcaaggggtgcggtttggtgaaatcatcaacgggcctgatttggcatcatggcgtgaagaaacatttcccagccaccaagaggaaaccagccatggctgtgatcgcctgccaagcccaaagaacagcgaacaagagcgcgagcacattgccagcttgcgcaaccccaccgtggtgcggatacgcaatgagttgcgcaaagtggtcaacaatttgattgacatgtttggcaagaagccgtatttgatccgcgttgagctggcgcgagatgttggcctttccaagcgggagcgggaggaaaaacaaacgggaatgaagcgccaggagaaacgccgcgaagcagcccgtaaaaagctgcaagaaagcggtatatctgaaccatcgcgtgatgatattgagaagtggatgctatgggaggagtgtggccatcggtgcccttacactggggaccatatttgttttgaagcattatttcagaataacgaatttgaagttgaacatatttggccacgttccctctccctggacgatagctttaggaataagactctgtgtcgcaaagatatgaacattaaaaaggggaatcaaacgccattccaatgttttggtgatgaccatgagacatgggaggccatcaaaaaccgagtcaatgatatgaaagcttcaaagaaaggagatgttggtatgtcccgtggcaaaataagtaggttgttgtctaaagaaggaatctccaaggattttactacgcgccaactgaacgacactgcctacgctgctagacaggtggttgcccaactccagcaactctggccagattcgggaccaaatgcgccggtcaaagttcaagcggtatccggacgaatcacggggcgcctgcggtatctatggggtctcaacaacattctgggtgatactggtgagaaaaaccgtgctgaccaccgccaccatgctgttgatgcgttgatagttgcctgcacgcaccctggcatgaaggaaaaactctaccgctattggcaagagaaggacagtccccgttccattgtccaaaaaccaaaccttccacctccttgggagacgattcgcaaggatgccgaagaagctgtacaagccattnnnnnnnnnnnnnnnnnnnnnnnnnnnnnnnnnncccaccgtgtccgcaagaagatctccggacgacttcacaaggagacagtttatggtgatacaggtgaagaggaaataacacgtaagaagacgtatcgattcttcgtcacgcgtaagaatgtagaaaagctgaagctaaaagagttgagagagcaaatccgtgatgatgaagtaggtagaattctcagagattgggtggatgagcatggcggagctccaaagaaagcctttcagagctcttatccaactcttggagatgatggtccggaaatccgcaaggttcgcttgctcgtaaagcagcaaaagaaactgatggctccagtgaactcagctattaagggctatgctgatttggatgggaatcatcacatggctctctatcaattgcccaatggaacagtggactatgaaattgaaattgttagcctgcttacagcttcgcaacgtttagcgaggcgagagcctgtcattcaacgtgagcgcggtgatggtgcaaaatttatcatgtctttatctaagggtgattccttagaaatcacacagaataatgagactaagatagtggttgttgagagtctttggtcacctgatcgaatagtaattgttgatcatagtgacgcaaaaggtagcagtaaaacacagccaaatgctagatccttactgctaaaaagcaacgcaagaaaaatctctgttgacccaatcggccgggttcgccccgccaatgactgagtgccttacaaatgctccgtaaaacagttgagttctcaacacctggaacacgcctttctgtggcccaccgccaactggtgatccaacggcctgatctccccaaggcaactctgcccattgaggatttgggggtggtgattgtggatgatgtgcgtgccacctacacccaggccgtgtttctggaattgctggacgcgggcgccaccgtgttggtcaccgggcgggatcatctccccatcggcatgatgctgcccctggatggtcaccacgtgcaagctgagcggcaccgtgcccaggtgcaggccagtgaacccgtgcggaaacaagcctggcaagctattgtgcgggctaagatcaaccaacaagctgcagtgctggcccagttcaatgaaggccataagaggctggcggccatggccaggaaagtccgttcaggcgatcctgacaatctggaggcccaggctgcgcaacggtattggcccctcctgttcggccaaggattctgccgggaccgggaggctgagggcgtgaatgctctactcaactatggttatgccgtgctacgggccgcggtggcccgcgccatcgtggccacgggcttgattccttccctcggggtacaccatcgccatcgcaacaatccgttctgccttgcggatgacctactggagccctacaggccctatgtggattggcggggccgccnnnnnnnnnnnnnnnnnnnnnnnnnnnnnnnnnnnnnnnnnnnnnnnnnnnnnnnnnnnnnnnnnnnnnnnnnnnnnnnnnnnnnnnnnnnnnnnnnnnnncgtgcagccctgctttcgttactgaatgaaaccattcgtgtgggtgggcgacgtgagccgatgctgttggccttgcacagcagcgcggcctccctctgccgcgctttgaccggtggggatcgcaccttgtctctccctgttggtatgcctttacgcttggaccctcctgagacagaaaacccgatagataccccctgatgtcgggagcggtgcggcaaattccttgggggtggcgttccatgtgggtaattgccatgttcgacctgccaacagacacgcccaaagcccgcaaagcctatgcccgattccgcaaagccctgttgaaggatggcttcaccatgatgcagtactccatctacatccgccactgcgcctccatcgagaacgccaaaatccatgtgacccgcattggtcgctgcgttccctcagcaggggaagtccgcttcctgaccatcacggacaagcagtttggccgtattgagacctacgtgggaaaaacgcgccaagtggcaccggcttcacccgctcagttggagtttttctgagcttgaaatgggtgaaatcggtgtcactgagcggcttttggg

SEQ ID NO: 3444 - DNA, 10412 bp, synthetic construct
  misc_feature 1..10412: note = Synthetic
  source 1..10412: mol_type = other DNA
ctgccgccgaagtgccagagcgttaccaggtcgcatccgcagcaggcgcttcaagctccgtggaattgagataatcgacgtcttgaaacagcgtctacggaattgtttcacgggttcagcctgattcatgtgccaagcgagctgactggcatcagcatagatgcgcgagtcatcgctcggctcctgagaccgccctttccgaaattgccgacatctctcagaatgcgtttttccattttcagatagagaagtcatgccccggcggaacgcgctctacataccagaacctcgccttcgcgttcgcaaatggaatcgcgaggaaagggaggagcgcctgaggcgtgcggtattcgccgccatgacggagagccgtgccaaccctctcagtccttccgacattgcgagacatgcgggagtatcgaaggcgctcatttacaagcatttcggttccgtagatgcgcttgttgaagatgcgatacactcccgtcttcagcttcttgcccttgacgctcaggctgataacgacgacgaaattttaaagcgcgtattgagaattgcgtcgaaactgcgtgcggaagtccaaagccaacctgaactgctcgacctcatcggctggagcctcggaaatcccgatccgcgggccatgaaggtaactgagaccgttcgaaggttttgcgcgcaactggccacaagggctgatgccgacaccgaagccgcaacattttttcttggaataatcacgagcgcgctatgtgattagcgagaaggtgcttctgaagaaattcagggagctaactcgtgatggcacatcagaggccgcgttcagcaagttgaattaacccagcaaactcaacgcgcagggtcgtgcaaaacaattatgtcagctctgcgccagacgcggccacacgttgtgccgattggatggataccttggcaggttctgtgggcacttacggtggtacagcatcaatatagaagttcgaatcccgcatgccgcaccacctatccataaaagtgggcaccattgatggtgggatcggcctatcggtctgaagctgttgcgccagcgcggcctttggggtcggagatgcggatcacatcctttctcacaatgatcttgtcgagcagcagacacatataggcgcggcctagcgctgcgcccatgccgtcgagcacggtgacggttaagccaaagcgggatagctcgcgaaggatggccgccttgcgcacctcgtccaggtcatatttgcggctgacccttgttccggtgtgtttctcgcctatcggcgtcaggagatcggcgttggcccagtgaagcacctaacgcagaagccgcagcttctcctcctcgtcttgttcgagcgcgagtttgtctaccagttacctgacgctgtatgcgaatcgttccatagggaaaccccagaagacgttatttatctttacaagactcccctacagccttccctacatagggaaggctggcggccccagaaaccgtccctacgtagggagttttatataggcgattatctgtaggcagcacataggatgggccagtgcgaccgaaccgcgtcaaggccaagcgccgctcacgcggagtggcttcgccagcttaacccggcccggaagcaccggcaggggctcagcatggccttcagcccgctcgctacgcagagaaggaataaggcgagaatttgcggcttaaccgcggcgcaaggccgcccgtgtattttgaacccccccgtattactgagcagggggaacaagcaaaaaggcccacgcgcggactgcggtgggccttctcgataatgaccggcagctgaccttgggatgccgagcccacacaaggggtcaatttgcttgcgaaaagcgaccgcctctcgatttgctacagaacaaaggttagcctctacccctattgggcgcaaggggattagtcatggaacggattttcggtttcgatattggcactacgtcaatcggctttgccgtcgtcgactttagcccggagcaatctgccgggaatattctgaggctcggcgttcgaatattccccgaagctcgcgatccggacgggacgcctctcaatcagcaacgcaggcagaagcgcatgatgcgtcgccagctacggcggcggcggatgcgccggaaggcgctcaatgatgtgctgcacgaagcgggcttccttccgaaatttgacaaagcctttcgcaagaacagcgacacaaagtctgcatggcagttggctatggagcgtgacccttatgaactacgcagacgagggctggaagaaggcttgagcgcgtatgagttcgggcgagcgatctaccatcttgcgcagcaccgtcatttcaagggccgcgaacttgaggaaagcgaaactcccgactctgatgtcgatgacgaaacagaagcggcgagcgagagggacgcaacgctgaaagctctcaagaacgagcaaacaacattaggcgcttggcttgcccgccgatcgccattggaccgcaagcgcggaattcatgcgcatcgcaatgtagtcgccgaagagttcggaatgctttgggatgcccaatcgaaatttcatccggcactcaagagcgaacaactgaaggcaaggataagtgacacgatctttgcccaacggccggttttttggcgcaggaacacattgggcgaatgccggtttataccgggcgaacccctttgtccaaaagggtcctggctttcgcaacagcggcggatgctggaaaagctgaacaatctcgcaattgcgggcggcaatgccagaccgctggatgctgaagagagggccgcaattctctccagactccagcagcaagcctccatgtcatggtcgggcgtccgaagcgcattgaaggcgctatacaagcaacgaggagagctcggcgcggaaaggagccttaaattcaatctggaactaggcggcgagagcaaactccttggcaacgtattggaagcaaagctggtcgacatattcggctcggactgggcttcgcacccgcacaagcaggaaatccgcaatgcggttcatgagcgcttatgggttgccgactatggggagacgccagacaagaagcgcgtgattatcctctctgagagggaccggaaggcgcgcagggaagacgccgcaaattcatttgtttccgattttggagttaatggcgagcaggcagctcaattgcaggcgctcaagctaccaaccggttgggagccctattccatctcggccctgaatctatttcttccggagcttgagaagggagaaaaattcggcgcgctggtaaatgggccggaccgggaaggctggcgttgcgctaactttcccaatcgcgcgcaaccgaccggagaaattctcgacaaactgccaagcccttcttccaaagaagaatgtgaccggatatcgcaacttcgaaatcccaccgttgttcgaacgcaaaacgaactccgaaaagtcgtgaacaatctcatcgggctttacggaaagcctgaccgaattcgcatcgaagtcggccgcgacgttggaaagtcgaaacgggaacgcgaggaaattcagagcggaattcgtcgcaatgaaaagcagcgaaagaaggcggccgaagacctaatcaagaatgggatcgccaatccctctcgcgatgacgtggagaagtggattctttggaaggaggggcaggaacggtgcccctatacaggtgaccaaattggtttcaatgccctgttccgcgaaggccgatatgaggttgagcatatatggccccggtcacgttcattcgacaatagtccgcgcaacaaaacgctctgccgaaaggacgtgaatatcgagaagggcaatcggatgcctttcgaagccttcggacacgatgaagaccggtggtcagcgatccaaattcgcctgcaagacatggtgtccgcaaagggcggaaccggcatgtctccgggcaaggtgaagcgttttcttgccaaggcaatgcccgatgattttgccgcccgtcagttgaatgacacccgctatgcggcaaagcagattcttgcgcaactcaaacgcttgtggcccgacgtgggccccgaagcgcccgtcaaagtcgaggccgtcacagggaaagtgaccgcacaacttcgtaagttgtgggcactcaacaacatacttgcagaggacggagaaaagacacgagcggatcaccggcatcatgcagttgacgcattgacggttgcctgtactcattcgggcatgaccaataagctttcgcgctattggcaattgagagacgatctgtataaagaaaaaccgacacttacgcccccgtggaacacaatccgctcggacgcaggtaaggcagtgagcgacatagtcgtgtcgcatcgtgttcggaaaaaggtttccggcccgcttcatgacgaaatgccgctaggctatgccggttacgacatagtgaagggcggagccgagcttggcgtatacacgaaaagaattccggtcgagaagctgagcctggaaacactgaagatcagcagccctgaagaaatctcacgtagcgcaaagtttgtcgttcaagacagtgccgttcgagcaaccctgcttgcacacctcaattcggctggcgtgccggcgacgaaggcatatcctccgtacccaaaactcggtggaaacgggccggagattagaaaagctcgagttctgacaacccagcagaaaaaacttatggtgccggccgcgaatggtttcgccgatcctgcaaacaaccatcatgttgcggtgtaccggacgccccagggcggggtggatcatgatgtggtgagtctctactgcgcagccaaacgcctttcaaagcgggaaccagtagtggtgcgtgaccgaggagacggatcaacgtttatcatgtctctatcgccgggtgatgcaatcgagattccggacggagataaaaagggtatttggatcgttcaaggcgcatgggctagtgggcaagttgttctggctccacagtgcgatgcacgcccatccaccaaaggagaggcatcccgtatgggcgttgatggaacacgggaggaattctatccgaccatcgcaggcttgcttaagcgcaacgcgcggaaaatatccgttgacccaatcggacgtgttcgccccgcaaaggactgaggggtaccgcgatgatccgcaaaaccgtcgagtttgcaacaccgggtacgcgcctttcgattgccaacaaacagcttgtagtggagcgccccgatctcccgaaggcagcgctgccgatcgaggatctaggcgtcgttattgttgacgacttgcgggctacctacacgcaatcggtttttatcgaacttcttgaagccggagcaactgtcatggtgaccgggcgggatcatctgcccgctggaatgatgcttccacttgacgctcatcatgtgcaaaccgaacggcaccgcgcacaagtggaagcgagcgagccgacaaaaaagcgcgcgtggcaggcgctgatccgaagcaagatcgcgcaacagggtgccgttcttgcgcatttcacaggcgatcatggtggccttattccaatggcgcgccgtgttcgttcgggcgatcctgataacctcgaggcgcaagccgcgcaacgctattggccccgcctgtttgggaaagattttcggcgagaccgtgatcttgggggcactaacgccatgctgaattatggctatgcggttgtccgcgccgcgacggcgcgcgcggttgtcgcggccgggttgatcccgtcgcttggcgtattccatcgcaaccgcgcgaatccgttttgtctcgctgacgatcttcttgagccctaccggccctatgtggattggcgagttcggttgcttgccgaccaaaagggcgaggcaatgcccagccttgatgaaagagacacgcgggcggcactactttccatttttaatgagaccgttctcgtcggcggcaggcgaatgccgctcttgctggcgctgcactcaagtgctgcttcgctttgccgcgcgttgacgggaggcgaagcggcgttggcattgcccgaaggtttgccgcttgcgcccgatcttctcgatattgatggagagggatgatggctcacgcgcgccccattccacaattgccttgggggtggcgctcaatgtgggttatcgccatgttcgatcttccaaccgatacgccgagagcccgaaaggcctatgcgcgtttccggaaagaccttctggaagatggcttcaccatgatgcagtactcagtctactcgcgccattgcgcttcaatcgagaatgcggaagttcatgtgaaacgaatgggtgctgttgtgcccgcgcaaggcgaggttagattcctgacgattacggacaaccagttcggaaggatcaaggtctatgtcgggaaaaaacggcagcccacggcgcaatcgccctcccagcttcagcttttttgaagcgtggaagggcggaagtgtttgtcatttcaatgacttgccagaagggcagagtagcaaatcgagagacggccgcaatccgcagcctgcggcatgtagcgctgcaccacatcctcagagtagcaaatcgagagacggccgcaatccgcagcgacgcatggagcgatgcgatcaaggaggccagagtagcaaatcgagagacggccgcaatccgcagccgctgtggcaagaaggccgccggcgctctcagagtagcaaatcgagagacggccgcaatccgcagcttgctttcatctggattgttaggtgaaaatagagtagcaaatcgagagacggccgcaatccgcagcgagtatagcgcgcaggctcaggcatccatcagagtagcaaatcgagagacggccgcaatccgcagccgtcagggcctcggtcattttgtccgcgtcagagtagcaaatcgagagacggccgcaatccgcagcggcagatggaccgtgatggcgggagacgccagagtagcaaatcgagagacggccgcaatccgcagcggggcaaaactcggtagcgcggatgtgcacagagtagcaaatcgagagacggccgcaatccgcagctggtatcagcgcatcgagcagagcgcggaagagtagcaaatcgagagacggccgcaatccgcagcatgtgctgcttgaactggccaacgcgccggagagtagcaaatcgagagacggccgcaatccgcagcctcgatgcgcttgcacttcgcgtagacgatagagtagcaaatcgagagacggccgcaatccgcagcggtcaatgtcggagcgatcctcaaagatgcagagtagcaaatcgagagacggccgcaatccgcagcaaaatcatcaacctgtccaacgcccgcaagagagtagcaaatcgagagacggccgcaatccgcagcccatctccccatccatcatcggcttgcagaagagtagcaaatcgagagacggccgcaatccgcagctgccgagcgtgcctccggcgacgagcggggagagtagcaaatcgagagacggccgcaatccgcagcaacgccgtgggcacatccttgctggcaacgagagtagcaaatcgagagacggccgcaatccgcagctcgctgccgacattgacaagttgttcgtcgagagtagcaaatcgagagacggccgcaatccgcagctcagatcggctgcttcgacaacacgggagcgagagtagcaaatcgagagacggccgcaatccgcagccttgattttgacggatggctcgcaacggcgagagtagcaaatcgagagacggccgcaatccgcagcttcgagcgccatgaaatcgacatcggtgcgagagtagcaaatcgagagacggccgcaatccgcagctagcagcgtctcgcggaactcgaagctcgtagagtagcaaatcgagagacggccgcaatccgcagcccatcggcgtgctcatgcagttcatccacaaagagtagcaaatcgagagacggccgcaatccgcagcgaaaagcccgcaataggcagtccatgcaacagagtagcaaatcgagagacggccgcaatccgcagcgttggtaaatggactacaaatcctgatcacagagtagcaaatcgagagacggccgcaatccgcagcgtggtgataagatcgtggcgcgatcgcccgagagtagcaaatcgaaagacggccgcaatccgcagccggcgccggatgcttccgcgcggctgatctagagtagcaaatcgagagacggccgcaatccgcagcaagaacctgtgggatggggcgttgcagggcagagtagcaaatcgagagacggccgcaatccgcagctcgccgccttggctttggtggcggcgtggcagagtagcaaatcgagagacggccgcaatccgctgctccatataggtgatgaccgccgcgacatctagagtagcaaatcgagagacggccgcaatccgcagcgccgcaattgcctcatcgagcagtggcactagagtagcaaatcgagagacggccgcaatccgcagcgggctccgagggatccccaccgccgactgcagagtagcaaatcgcgagacggccgcaatccgcagcaaaattctaggtattccgcttgcggataatagagtagcaaatcgagagacggccgcaatccgcagcatcacgtttcgggcgcctacgacgacggaaagagtagcaaatcgagagacggccgcaatccgcagcgcggacgccttctcgtggcttcctgccatcagagtagcaaatcgagagacggccgcaatccgcagcggcgggcggctggtcgacggcccgcacgctagagtagcaaatcgagagacggccgcaatccgcggggcgtcggtcgagcaggcgaatgcgaagatcagagtagcaaatcgagagacggccgcaatccgcagcgagctgggtctgacggacgagcgaaaccgcagagtagcaaatcgagagacggccgcaatccgcagcgagtacaaggctcggcccgaggtgaaactgagagtagcaaatcgagagacggccgcaatccgcagcctgctctcgtaatatccacgcggtgttttcagagtagcaaatcgagagacggccgcaatccgcagccgcgcagcggctcgaggatggtgagcgcgaagagtagcaaatcgagagacggccgcaatccgcagcaaccgcgagccgcgcgccgtcaggcgaaaaagagtagcaaatcgagagacggccgcaatccgcagcgcaagtcatacatcatcatccgtaatatccagagtagcaaatcgagagacggccgcaatccgcagccactgcaaatgcagtgtcgccggcgacacgagagtagcaaatcgagagacggccgcaatccgcagctattgtggcaatcggagatttgtgcccgggagagtagcaaatcgagagacggccgcaatccgcagcagcctatctcgctgcgcggcgtgaggtgcagaggagcaaatcgagagacggccgcaatccgcagctggattgggaaatggaacggggcggccggaagagtagcaaatcgagagacggccgcaatccgcagcgacagcaacgcagagcgttggccagcggtcagagtagcaaatcgagagacggccgcaatccgcagcgagccgatagcgccaccaatcgcgccgccgagagtagcaaatcgagagacggccgcaatccgcagccggccggatcgccgacccagtccacatcggagagtagcaaatcgagagacggccgcaatccgcagcgaggcatctgaaatgacgtttacggatgaaagagtagcaaatcgagagacggccgcaatccgcagcgcagtcgccaaggatctgatcaaggcggagagagtagcaaatcgagagacggccgcaatccgcagcgctacgccctcagcatcaacatgtggtgcgagagtagcaaatcgagagacggccgcaatccgcagccacttgccgacctgcggggtcttctggtcgagagtagcaaatcgagagacggccgcaatccgcagcagggccagcttctgaccgagaagcagattgagagtagcaaatcgagagacggccgcaatccgcagctgacgtatcggtcgagagcaagaccgccgaagagtagcaaatcgagagacggccgcaatccgcagcttcgccagcgcaactcgtggaaagctcgggagagtagcaaatcgagagacggccgcaatccgcagccggaagccgacgagctgccacagccgaccgtagagtagcaaatcgagagacggccgcaatccgcagcgcacgatatcggcctctcgatcaacgcgctagagtagcaaatcgagagacggccgcaatccgcagctcggcgcgcagggaaggtttcgacatcgttagagta

SEQ ID NO: 3445 - DNA, 7642 bp, synthetic construct
  source 1..7642: mol_type = other DNA
  misc_feature 1..7642: note = Synthetic
gccgcacatatccttgctgtcctcagaccgattgagcttaaagggcaaacgcataccgccaacagattacgtggaaaaatcggcgaggttttctgctttgccatcgcctcaggccgcggagaatatgacccaacgccttcaataaagggcgcgcttgcagcacataaaagcaagccacaagcagcaattaccgaccctatcgcctttggcgggttgttgcgggcaattgatgattatcacggaacgcctgtgacgaaagcggctcttcaaatgttatgcctaacaggaactcgcgttgataaagaattaggcgctatgcaatggtcagaaatagattttgaaaattctgtttggactgtgccggcagaaaaactaggcaagactggtaagccattgcacgtgccactagcatcacaatctctaactattttgaaacatataaagtccctaaattataacggaaaatatgtcttccctagcataagatctccagaacggcacatatcagaaggcactgttaacagtgcgttgcgtaggcttggcatttccaaggaagagcattgcgcgcacggcttcagaagcactatgtccacaatgttaaataatagtggcctttggagcaaagatgctgttgagcgacagttgtcgcacaacgacaaagacagcgtgcgcggtgtctataatcgagctgagtattggcctgagcgcgttaagatgatgaactactgggctgatcgcctggatgctatgaggcgcggcggcgaaatcgttgctttcaaaaaacaagctgaaaattaaggaacaaccaatggagaagcttttacaattacatttatcgtttaacagtccttgctttttttgatctataactttagcataagaatatgcatcaagagacgctatttggcgtcaccaaccgacatcgaacggtggtcaaacgatgcggctcgaaaggagcaaacgatggaaaataccaccaaaaagaccgtaaagccttggaaatcctttcgtttaaaataccgaaagggtttaaacgctcgttacaacagggttatggagattgaaaataatggtgagtatttgtgtgttcaatttgttcgcgacgatggtgagattgtaagcggaatatataagcgtcagggctgggcttgggcgccatcagaagagcgcgccgagctcgtcgagatgctctcatcgccacccgtcaccgttttccgcagcgagaccagctgaaggctccagtttgtcaaacaattaggaagtgatgcgtctcacctggaggtgaaatatgccaagacttaaaggatatgtttcagatacaaggggctatcttactcagggtgaggccatttcttatatgacccgcaacaatccgctcataaggccggagcctggtatacttccgagtgtgatgaaggctgcgaaagcaggtaaatccaattgccgcgtcacagttcaggatcctgcatttcctggcgagcctcaaagtaagaaaaccaaaaaggtgcccaaatgagaatactgatctctctcgctatatatttgacgttcatcgcatctcctgcgctagctggcagctcaaatttctacggcagtgatggggcatacattggaacaatgcaatcagctgggccaaacaacaattttatatatggttcagatggtaattacgtcggctcgactgctagggctggcaacaacacgtttttttatggatctgatggttcatatcttggatcagcaacaacaacaggtaataaagctagtgagtaggggtttatttgctagactttatttcgtcgcccttcgacagtgtaaagtttagtggttatgcgatgttccgaaaactcgatgacaaacaacataaattgccggaggaattgcaacgccggcttgggcacgacctgatcttgcaagaattgacccgagatgggggtcatcctaccgttaaagattatattgatcttaattggggaggagagctccctgatgagattgatgctgaagatgcagaagtattagacgctattgcaagatttgaggcgtctcagatggaatagaagcatcaataaatcctagtgcgggcttttttcttgcgattttacttgcaagttaaactctgagccccctgggtagagagcatcctgacggccgtctctataagaagcacctcttagccttcgagaaaaaattaaaaacttttagtccttacgtttcggggtgagcaatactagcagagttgatacagccctgtagaagccaaaaaaatcagcattaatgaagaaaattctgctaaaaaaaattttacaaatcttttacaacaggcttgaccgatattgttacttcgttagtatatgcccacggtcaataccgtggcgatctcagcattaatgccccgcacttgtcgagacacccaacgcagcgcatcgctcaaagcggcctctttaaaaggagtgctaaaatgagcattaccgaacacaataagctgtattttgatagtggtgatcttgatgtcatccgcgaagatattctttctcgttatcactacacgatagggcaatacagtgaaaatactgggataagtttcccactcgtgagagcaaactgtatctttgattgcccaaatataatcactgacacgaatgcttattggccgacgacagtagcgagatggagtatagataaaagaggctatatcgccattaaactatgcgactgagttacctaaatatggtgcccatcggtaatcccggtgggtccctaaaccattagagcgcttatgattttttaaagcatgccccaaggacatttatgcgccaacacgccggctaccctcgcaactgtccaatatcccttctgttttctaagccgtcagtacctcccactgacagcattttaaaaaaattcttatgaaaaaagaaaaaacgcgccagcggtattagccgtagcgcgtcttataaaagtgggcgactgatcttgggatgcccagcccgctcgaaggatcactttgcttgcgaaaagcgaccgcctctcgtttcactacactcttgatgctagtgtctacctgagagcttggcaagtgcctcctcggggagggtttatatgcgaatacttgggttggatattggaaccacatcagtgggttttgcgctaatcgagcagcaagagagtaacaacagcggcaaaatattgcgtatgggtgtccgcatcttccctgaagcgcgggatccagatggcactccgttaaaccaacagcgccgcgataaaagaacgatacgacggcagttaagacgccgccgtgagcgccgcaagtcacttaatgaacttctttcctcagtgagcttgctacccaaatttaatagcctcgaatgggctgtgacgatgcagcttgatccctatcaacttagagacaaggggttagctgccgcactagagccatttgagctagggcgagctctctaccacctttctaaacgccgtcactttaaagaacgagatattgctgaagacgacagcaagaactcctctgttatgagcaagaaagaagtcgcagaggacaatgagcgtgagagctttgtatcaagtttaaataaaagtggtctgactattggtcagtctcttgctcgtcggtcaaaggatgagaagaagcgtggggttcacgcaattcgagcagcggttctagatgaatttaaacgtctatataacaagcaatctcaatatcatccaaagctaaaggattacaccttcagaggagctgtggaagaagctatatttaaacaacgaccagtgttctggcggaaatctacactcggttcctgccgcttaatgcctggtgagccattatgccaaaaaggctcttggctatcacagcagcgtattatgctggaaagagtaaataatctcgcaatagttggcggcaacgcccgcccacttgatactgaagaacgtctcgctgtgatcacggccttgaatactcaaaagaatatgagctgggcgggtgttcggaaggtattagagcccattttcaaatcacgcggcgaaagcgcaaagacaattcacttcaacctagaatatggtgacgaaaaaggggggttaaaaggcaatatcgttgaagttgagcttgccaagatatttggtagcaaatggaaaaatcatcctcaaaaagatcagcttcgacaatttctacccagcagcttgtgggaagctgattacggtgaaataggaacgcaaagggttgtgattaggcctgagcaagaccgcgttcttcgaaagcaagtattagccgaaagattagttgctgactttggagcatccaaagaacaatctgaggcactagtaaatcttaattttccgcaaggctgggagcctttttcaaccaaagctctcgaagtttttttgcccgaactcgaaggtggcgagagatttggcgttctactaagcagtcccgatcgtgaaaaatggcgggatcaaaacttcccagaccgcgaacgaccaactggtgagatattagataaactaccaagtccaaaagacaaagaagaagcgacaagaattgcacgcattaagaacccaacagtcgttcgtgttcaaaatgagttacgcaaagtcgtaaataacttaattagagtttacggcaagccagatctaatacggattgagttagccagagatgtgggtaagtcaaagcgtgagcgagaagagctttcctctgcaatgcgtgcacaagaaagaaaacgcactacggctcgaaaagatcttcagtctaagggaatagccgatccttctcgtgatgatgttgagaagtggctcttatggaaagaatgcaaggagcaatgtccctacactggtgatatgattggttttgatgatttatttagcttaggaaatttcgagatagagcatatctggccacgatcattatccctagataactcctttaggaataaaacgctctgccgcaaagatgtaaacattgccaagggcaaccgactaccttttgagttttttaagggacgggatgacgaatgggttgccgctaaagaccgtgtctggaaaatggttgggcgcgatgggatgtcgccaggcaaagctaaaagatttgcggcagtaaatatgccagacgactttagtgcacggcagctcaatgataccagctatgcagcgcgtgaagcccgcgccttcctccagcgtttgtggccagacataggacctacagcggcagtgaaggttcaatcagtaactggacagattacggctcaattgcgtaagcgttgggggctaaataatattcttgcagatgatggtgaaaaaacacgagacgaccatcgacatcatgcaattgatgctcttgtggttgcttgcgctgacggcagatatattcagaaattatctcgttggtataaggaaaaagatgaaggtaggaagccgcatctagcggagccttggcctaagatccgtgaagataccgataaagctgttaaagaaatagtagtttcgcatagggttagaaagaaagtctctggcgcattacacaaggagaccatctacggcgacaccggcattaatgagaagacaaaatctggaacctatcgtatttttgtaactcgaaaaaaagttgatgctttatctaaaacagaaattgaaaatattgttgatgataatgtgcgccaaattattagtgattgggttattgagcacgggggtgatccaaagaaggctttcagcacttatcctaaaattggagaggaaggccctgaaataaggaaggttcgtgtttattctaagcagcaattaaatcttatggctccagtatctacgggctatgctgatttagggaataatcatcatgcggcaatttataaactgcccaacggaaagataaaatcgaatgtagtgagtttgtttgaaactgtttctcgtctctcacgtagagagccgctagtcgctagagattttggagatagtagtatatttttaatgtcactgtcgcagggggatagtttatattttccagaaggtaaaatgaaaggatattggacagtccaaagcatttggtcagcaggtcctatagttctttgtcgttcagaagatgctcaaggtgcgacggttatacgtcccggagctgccactattgttgctgaaggtgggcataaagtgacgatcgatccaatcggggtcgtctggccagcaagtgactagaaaatggcttacaagactgtagaaatcgcgactgctgggacacggctttctgtatctcatcgtcaacttgtaatcgagcgcccagaaactacccgagcaactcttccaattgaagatattggagtgatcatagttgacgaccaaagggccacgtatacacaagccgtctttatcgaattgctagaggcgggagccactgttcttataacaggaaaggatcatctcccgtcaggaatgatgctaccgcttaatctgcatcatgcgcagacagaacggcatcgagcacaaatcgaggcttctgcacccagccgaaaacaaatctggcgggcacttgttgcagcaaaattatgtcagcaaggcacagtacttgccgcattcacgggcgacgatgctggtttgattgaaatgtcgaagcgtgttggatcgggggacccggaaaacctagaagctcgtggcgctcaacgttactggccgtctttgtttgggaaagaatttaggcgtgatcgctcggcagatggtatcaatgccgcactaaattatggatacgcgatcatccgagcggcaattgcaagatcaatagttgctgcaggactgataccatcactcggcgtatttcataagaaccgatctaatccattttgtctagcagatgatcttctagagccttatcgcccatacgtggactggcgagtgaaattgatgacactggaagatggcgggaagatttctttagaagatcgctctagacgggcagcactgctttcacttttcaacgaaaaaataatagtaggcggccataagtcgcctttgcttcttgcggttcaggcgagcgcaacttccctttgccgagcactcactgagaaaggtaaacgattggtattaccggagggactgccgattatggcagatagccaagcgccagaagacgaagaggaatgaacgttgctggcccccattctacgcctgtcctgccttggggatggcgcactatgtgggtgattgcaatgtttgatctcccaacggatacaaaagctgctcgaaaggcttatgcccgatttcgcaaagacttactggatgacggttttacaatgacgcaattttcagtttactctcgacattgcgcttcatttgagaatgctgaagttcatattgccagaatggggaaaaagctaccgcctgcgggtgaagtgcgctttcttacaattacggataggcaatttacgcgaaccagggtcttcaggggaaaaaagcgagcaaatactccgttggcaccctcccagctggagcttttttgagtggccaaaagctcaattacctaaagatttccgatacctatagataggtatattgtagtgaaacgagagacggccgcaagccgcagcatgagcactggttaaacgcttgcgtggaggattgtagtgaaacgagagacggccgcaagccg

SEQ ID NO: 3446 - DNA, 6586 bp, synthetic construct
  source 1..6586: mol_type = other DNA
  misc_feature 1..6586: note = Synthetic
ggaagccgcgcggtggcgccggggggactaaaccgtaacgccctgtaactacgggcctttcctcctgttcatgcgggggcgggcgctggcgggaagggcaccatcggtgcgttccggtgtgacaaccgaggccggcccaggccggtcaaagcacgattcgcgatgcaggagcgatgggggaatcgacgccggggaacccggcggatcggagccgccgcggcgcttgagactgtgaaagtatcagctcgccacaggctgattcccattcgtccggatgacggtttcgatgtccggatcggacaggtcgccgcgaggggagggataatgcggagaattgactacatcgtaccaggagatacgatatttacgctcaaatcagccttggatgacggggaaacacggccttccgggcaatttcacaccctgatcgccgcggtccgctgcttttgcaggcaatgctccctgagtgcatccgcccccagctcgttcaccatccgcttgaagttgtagctcagcgccatcaggctgaactcgccgcggcacttgtcgagtccgcgcatcaggaaatgatcgatccccgcccagcgtttgatggtgccgaaaggatgctcgacgagcgcggctcgcccgcgcatcaatggcgaaccggcattcatcttctcgcgatgccggtccacccagtccgcatgctcccagcgctccaccctacgccttggctttgggttcgtcttttccaggcatcggctcgacagcgcacaactccgacagacctttggcgccgcacgataaacgaaatacagcttgttacgcttgccggtgatctcgttgcttcgagccagccgttgcccggccggacagacatacgtgtcgtcctgcgggtcgtaacggaaatcatcgctgccgaaccgatctcccttgcccttgcggcccagttgcttgggtatcggaacatacacatccatccccttgtcctcgcattccttcaaatgcgagccgttgtaatagccggcatccgccagaccgatcagcccggaattgcccgtggcttcgcaggctttcgtcatcatcggctcgaactgacagaaatcattgccgtcctggaccacgtccgccgctacaatcagcttgtgcttgtcgtccaccgcaatctggcagttgtagccgcccaccaacttgacgtgcttcttcatcatccgcgcatcgggatcgacctccgatacctggctctccccgctttcctgaaggcgctcctgcagggccttcttgtgcttctgcttctccaccagggcttcgatcttcgccgccagttccggatcctccccaccgtccgtgccgtcttccggttctgcatccgcctcgtccagctgccggtgatacgccgcgatcctctcgcccagcttcttcagttccttttccagtctcgccttggtgtggatgctgccgggactcgcattggccttcagaaaggttccgtcgatcgccacccggctgccgcccagcagcgacagttcgtggcacagcagcacgaactcctggttgaccgcccgcagcgcagccgcattgttcttgcgaaaatcggcaatcgtcttgtagctcggggacgcactctggcacagccagatcacttccagattgcgccgcgtctcggcttcgagccggcgcgagcttcgcacccggtgctgatagccgtacagatacagcttcagcagcagtgccgggtcgaacgccggctggccggcgctccggttcgcttcggtgtgctcgaatcccagcgcctgcaggtccagcgtgccgacgaacgcatcgatcgcacgcaccgcattgtgctcggacacatagtcgtccagacacggcggaagcagcatcacctggcttcgggagtgcacctcctgatagcgtctctcagccatggtggtgatctcatctgcgatcgtttcgattgccggcgaagataacatgtccaggcagcgcgagaactcgcactgagtcgcggtcggcgcgcgcggcaatactttcacagtctcaatcgccgtggcggctccgatccgctgtgctcgacggcgacgattcccccatgaacatcgctgcacgatttggtgccttctacgcccggagggcgctggctcgtcagaccggaacgcagcaggctgcaagatggcgcatgcgggcgctggcggtacattttcggggccaattggcgacaggcggcgcctggcgtatgccggaacgagtagatgctccggagaaccgatactatcgtattgaaatcgttggcgatttcttgatgcggttctccagggaactatgggatttcctacggggtaccaataggtgctcggagatgcgcccaaatcgccctcgactgccgctccgatatcgccgccgtggtcgacgattcgacgcttcctccgggcggcgggcagcgccggagcgccttggccgaagacagcattcgcctcttcccgaaggctccgggtgcgtctcatcctctccgacgatcgccggatgagccggcaacaccggcatcgcgacgaggattcgctgcgccaagaagcgaaaagcctccgccctggggcggaggcttgatatgccggtggacgatcctgggacaccgagcccgcacgaaggatcgatttgctgcgaaaaggaaaccgaccgcttctcgatttgctacggggacgatgttagcgtgcggcgcaaataaagcaatggggaatggtttgcatgccactcgtattcggcctcgacatcggcacaacctcggtcgggttcgccgtgatcgagcacgattccgagcttgccacgggaaatatccaccgtcttggcgtgcgaatcttcccggaagcccgcgatccaaagggcgtgccgctgaaccaggaacgccgtcaggcgcgcctccgtcgtcgtcaactgcgccgccggcgagagcgtcggcgcctgctcggcgatcaactgagcgcggccggactgctgccatcgcgcaactcgcccgactgggatcgggcgatgaagagcgatccctacgatctccggaggcgcgcgttcgaaggcgagacgctgtctccgcatgaaatcggccgcgcgatctatcatcttgcgcagcgccgccacttcagaggccgcgatatagacgaggtttccgacactgccgatgacgcagccggcgacgcggacgagaagaaagcgacgtcggcgcgggagcaatccgttcaagcattgaagcgcgagggcacgacgctcggcgcctggctcgccgcgcggggaccgcatgaacgcaagcgaggcgagcatgccacgcgggacgtcgtcgaggacgagttcgacacggtgtggatgccgctcgttccggagccattccggtcctccgtgcgggacgcgatcttcgcccagaggcccgtcttctggcggctaaacacgcttggcaaatgccggttcgtccccgacgcgcctctctgtccgaagggatcctggctctcgcagcagcggcgcatgctcgaaaagctgaacaaccttgcgcttgccggcggcaatcagcgtcctctcgacccagaagagcgccaggcgatcctctccagactgcaaacgcaggcctcgatgacgtggcccggcgttaggcgggcgctcgcaccggtttaccgggcgcgcggcgaacccggcgaagagagggcgctcaagttcaacctgcaggaaggcggagagaagaaactgctcggcaatccggtcgaggcgaagctcgcggatatcttcggcggcgattggccagagcatccccgcaagcaggaaatccgggattcgcttccccagcagacctggcaggccgactacgagcaagtgggcgatcagcgcgtggtcattcttcccaaggccgagcgaacgacgcgccgggcggaagtcgtgcagaattttgttgccgagtacggcctgtcgagcacccaggcaaccaagatcgagacgttgaaactgccgtccggatgggagccttattccatcgaggcgctgcaggcgatgctgccgcatcttgaggacggggtcaggttcggcgaactggtcatgggtcccgatcgggaggactggcgcgccgagacatttcccggccgggaacagcccaccggcgaagtgttcgatcgccttccgagcccggccgaacgcgaagaacgggaacgcgtcgcaagcctgcgcaacccgacggtcgcacgcacgcgcaacgaactgcgcaaggtggtcaacaatctgatcgacctgtacgggaagccggacctgattcgcgtcgaagtcgcgcgcgacgtcggcaactccaagcgccagcgcgaggaaaaggcgtccggcattcgccgccaggaacggcgccggaaggcggcccgcgagacgctccagcagaacggaatcgcggaaccgtcccgcgcggatgttgagaaatggatgctctgggaggagtgcggccaccgctgcccgtacaccggggacactatttccttcgacgccctgttccgcaccggggacttcgacgtggagcacatctggccgagatcccgctctctcgacaacggcttcaggaacaagaccctctgtcggaaggacgtgaacctccgaaagggcaaccagaccccgtacgagttcttccggagcaacgaggaagaatgggatgccttcgccaatcggcttgccggcatgaagggccccaggggtggaacgggcatgtctcccggcaagatcaggcgattcctcgcgccctccatccccgacgatttcgcctcccggcagctgaacgacaccggttacgccgcccgcgaggcggtcgcctacctcaagaagctgtggccggaccagggaccggaagcgccggtgaaggtcttcgccgtatccgggcgcgtcaccgggcaccttcgccggttgtggcgcctgaacaacgttctggccgaagacggcgagaagacccgcgccgatcatcgccatcacgcgatcgatgcgctgacggtcgcgtgctgccacccgggaatgacgcagaaactctcgcgccattggcaggaagaggacgatccccgcgcgccgcagccgcaccttcctccgccctgggaaacgattcgaagcgacgccgagagggcggttgcggccatcgtcgtgtcccatcgcgtccgcaggaaagtctccggacagctccacaaggagacgatctaccgcgacaccggcgaggaaattgccggcgcgcgcggaacgacgtaccgctatttcgtccgccgcaaggccgtcgaagaactgaagaactcggagtccgagcgcttcaacgggaccagaatcatcgacatcgtcgatgacggcgtgcgcgacatcgtccgcggctgggtcgacaggcacggtggcgatcccagcgcggcgttcgtggacggctatcccaagcggggcaggaaaggcccggtaatccgcaaggtccgcctgcgcgtgaagcagcagatcgaactgatgacgaaagcctccacgggctatgccgacctgggcaacaatcaccacatcgcgatctaccggctggccgatgggacggtcgattacgacgtggtcagtcttctggaggcctcgcggcgcaaggcgcggcacgagcccgtcgtcagacgggagcgcggcgacggcgcccagttcgtgatgtctctgtctcccggcgacacattgcagaccagcgagaacggcgaggcgaagctacgcgttgtcacgggagtatggagcaacggccagatagtcatgtgtgacaatgtcgatgcggccaaggcgactgagacccgccccggcgcgaaagcgatcgtctcaagcggcggcaggaagatctccgtcgatccgatcggtcggatccgtccggcgaacgactgaacttgtccggcgatgatccgcaagaccatcgagttttcgacgcccggcacccggctctccgtcgcgcaccgccagctcgtgatcgaacggcccgacctgccgaaggcgaccctcccgatcgaggatctcggcgtggtcatcgtggacgacacccgggcgccctacacgcagtccgtctttctctcccttctggaagcccgcgcgaccgtgctggtcaccggccgcgatcatctgcccgccggaatgatgcttccgctcgacgcgcatcacgtccagaccgaacgtcaccgggcgcaggtcgaaaccagcgcgccggtccgcaagcgcgcctggcagacgatcgtgcgggccaagatcgttcagcaggccgccgtgctgtcccatttcaccggaagtcacggcggcctcgttccgatggctcgccgggttcgctcgggcgatccgaacaatcttgaagcccaggccgcgcagagatactggccgcggctgttcggcaagacattccgccgcgaccgcgaggccgagggtgtgaatgcactgctgaactacggctacgccgttgtccgcgcggcggtggcccgtgcggtggtcgcggcaggtctgattccctccctcggagttcatcatcgccaccgcaacaatccgttctgtctcgcggatgatctgctggagccgtaccgcccttacgtcgactggcgggtccgtcaaatggccggcgacgatgccgagg

SEQ ID NO: 3447 - DNA, 5929 bp, synthetic construct
  source 1..5929: mol_type = other DNA
  misc_feature 1..5929: note = Synthetic
cgggcgaaggcgacatggtcgacgtccatgttcaaccccatgcccaccgcgtcggtggcgacgagataatcaacgtcgcccgactgataaagcccgacctgagcgttgcgggtgcggggagacagcgcccccagcaccaccgcggcgccgccgcgctgattgcggatcaattcggcgatggcgtagacgtcggcggcggaaaacgccacgacggctgagcgtggcggcagccgggtgagctttttatagccggcgtaagtcagcttggagaagcgcggccggctgatgaactccgccttggggaccagccggcgcaaaatgggttgaatggtttcggagccgagaaacatcgtctccaccgtgccgcgggctttcagcaggcggtcggtgaagatgtggccgcggtcggggtcggcgcagagctggatttcatccaccgccaggaattcgacggcgcgatccaccggcatggattcgacggtgcacacccaatagcgcgcgcccttggggatgattttttcttcccccgtcaccagggcgacggcgtttttgcctttggccgccgcgactttttcgtaattttcccgcgccaacagccgcaaggggaagccgatcatgcccgacgcatgaccgagcatgcgttcgatggcgagataggtcttgccggtgttggtggggccgagcacggcgacgacgcgcccgtcgccggcggttttgggcgcgatcgacatggtgagggcaaaatcgcgccgcgggggcaagaatgcaaggggggcaaaaaactcgtcgcctcatgtcattttttggtcgacagccgcggtcggcttgggtatacacccctccaccgcggcggggcgctccgacagggtcgccgaaaacaccgcggaggttcgggtaaagtgggtgcatagctcagttggtagagcagctgactcttaatcagcgggcccaaggttcgagtccttgtgcacccaccactcgatcaaacgattaaaggccgcctccgggcggccttcgtcgtttcagggctcagcaggtcgcgacaccagagccggcgccgtcttttccgctgccgccacccccccctgccgtcattttgcgcagcgccattccctagcgcgaatcaaaacgccccacagcagagctgggggcgttaagagcggcattcgatcttgggttgccgagcccgcgcgaaggatcgttttgcttgcggcaagcgaccgcctctcgtttcactacaaaattgtatatatcatttttccttgtcgctaacaaggggaaacagaatgaagcgcatatttggttttgatattggcgtaacgtcaatcgggttttgtgtggcggatatcgtcgccgataaagatcatggcgcgatagttcacatgggtgtgcgcatttttccagaggcgcgcgaccccgaaggcgcgccgcttaatcagctcaagcgcgccaaacggatggcgcgccgccaattgcgccgccgccgcgaccgccgccgccagttggcggaggcgttggcgagttttggcctgctgccgctttacaacacgccggaatgggcggcggtcatggccagcgacccttacgccttgcgcaagcgcgcattgagcgaggcggcggcgccttgggaactggggcggttgctgtatcacctcgccaagcgccgccacttcaagggccgcgatctcgacgacgaagccgacaaggcggaagaagacggcgcggacgaaaaggcggcgaaaaccaaccgcgaagcgacgttgcgggcgctgaaggacggcgccgccaccctgggggcgtggctggccgacatccccgccgaccagcgcaagcgcggccgtcacgccgtccgcagcgtggtcaacgacgaatttcacaaaatcgtcagcgcccaggcggcgcatcacccgatcttgcggcaagacggcgtggcggcgacgctggaagacgccatcttcgcccagcggccggtgttctggcgcaaaaacaccctgggaagctgccgcttcatccccggcgccgaattgtgccccaagggctcgtggctgtcgcaacagcgccgcatgctggagaagctcaataacctggcgctggccggcggcaacggccgtccgctggaagccgaggagcgggccgccatcctcgccgctctgcaaagccaagcgtcgatgagctggggcggcgtgcgcaaagcgctggagccgctgttcaaggcgcaaggcgccagcgccaagcatctgaagttcaatctggaactcggcggcgaggataagctgccgggcaacgtgactgaaatgaagctggcgcaggtcttcggcccggcgtgggctgaacacccgcacaaacaggcgatccgcgacagcgtgccggaacggttgtggagagccgattacagcgaaatcggccacccccgcaccggggttcagcgggtggtgataaagggcgaagcccagcgccgcgtcgcccggcaggcggcggccgacagcttcatcgccgatttcgcggtgacgccggaacaggcgcaagccctggccgccctgacctttcccgccggctgggagccgttctccaacgccgccttgcaacgctttttgccgcgtctggcggctggcgcgcgcatggggacgttgctcaacagcccggatgaggaaaaatggcgggccgacacgttccccgaccgcgaacagccgaccggcgaagtgcatgatcgtttgcccagccccaaacccggcccgcaaggtcaggcggaacgcgaacgcatcaagaaactgcgcaatcccaccgtggtgcgggtgcgcaatgaattgcgcaaggtggtcaataacctgatcgcggtttacggcaagcccgacctgatccgcatcgagctcgcccgcgacatcggcctgtcgaaacgcgagcgggaggaaatgctggaaggcatgcgccagcgcgaaaaacagcgcaaggcggcgatcaaggatctgcaagccaagggaatcgctgaaccgtcgccgcaagacattgaaaaatggctgctgtggaaggaggcgcgggaaagctgcccctataccggcgacaagattggtttcgccgatctgttcgccgacaacaagtatgaggtggaacacatctggccgcggtcgctttgctttgacgacggttttcgcaacaagaccctgtgccgcaaagacgtcaacatcgccaagagcaatcagacgccatttgaatatttccagacccgcccggcgaaggaatgggaggacgtcaagcagcggctggaaaaactcaccaagaaaaaagccgaccgcgacggcctttcccccggcaaggtcaaacgtttcttgcgcgaagcgccgctagatggggacttcaccgcccggcaattgaccgacaccggctacgccgcgcggcaggcggtggagtttcttaaactgttatggccggacgaggggattgcggcgccggtgcgggtgcagacggtgtcgggccgcgtcaccgcccattgccgcaaatactgggggctgaaccacatcctggcggatgatggggaaaaaacccgtgacgatcaccgccatcatgcggtggatgcgctggtcgtggcctgcgtcgatccgggaatcacagggcggctgtcgcgttttttccagcaaaaggacgacccggcggcccaacgcccgcaattgtccccgccctggccgtctatccgcgccgacgcgcaaaaagcggtggaggccatcatcgtttcgcaccgggtgcgcaaaaaagtgtctgggccgctgcataaggaaacaatctacggcgacgctaaaattgtcgagaaaacaaaaaaagaagaatatcgcctgtacgtcacccgcaagaaggtcgaagcgctgagcaaaggcgaagttttcgacgccgccatccgcgacccggaggttcgccgcatcgtcaaggcgtgggtggaagcccatggcggcgatccgaaaaaagccttcgccgacggctatccgcgcatgagcgccaacggcccggaaatccgcaaggttcggctgctggtgaagcgtcaacccaagctgatggccgccgtctccaccggcttcgcccagcttgatgaaaaccatcatatcgccctctaccgtctgccgggcggcaaggttgattttgaagccgtcagcttgctggaagcggcgcggcgactggcgcaacggcagccggtggtctgtcgcgaccggccgggcgcggaattcgtcatgtcgttgtcgaaaggcgacgtcgtctttttcccggacggcgcccggaagggtttgtggatcatgcagggcgtgtgggcgtccggtcaggtcgttttatggcgcgccgaagatgcaagaggcgcgactgtgttctatccgcaggcggcctccattctgcgtgacggcggccgcaaggtgcaggtcgaccccatcggccgcatccgtccggcgaacgactgacgggggaggggaacgccatgctgcgcaagacggtggaattctcgacccccggaacccggttgtcggtcgccttgaagcaactggtcgtcgaacggccgggcctgcctaaagcgaccctgcccatcgaagacttaggcgtggtgatcgtcgacgacgcccgcgccgtctacacccaggcggtctttatcgacctgctggcggcgggcgccaccgtcatggtgaccggccgggatcatctcccggtcggtcttatgctgccgctggacgcccatcatgttcagaccgagcgtcaccgcgcgcaagccggccttggggagccggcccgcaaacaggtctggcaggcgctggtcaaagccaagctgacgcagcaaggccatgtcttggcgcatttcaccggccatcacggcggcctgcacccgatggcgcggcgggtgcggtccggcgacccggacaatctggaagcgcaaggggcgcagcgctattggccactgttgttcggcaaagagtttcgccgcgaccgcgaggctgaaggcgtcaacgcgctgctgaattacggctacgcggtgattcgcgcggcggtggcgcgcagcgtcgtcgccgccggcttgatcccgtcgctgggggttttccatcgcaatcgcggcaaccctttttgcctggcagacgacctgctggagccgttccgcgctttcgtcgactggcgggtcaaattcatcgttcaagagcgcggcgaagcgccctcccttgatgatcgcgccgttcgcgcggcgctcttgtcgctgttcaatgagacggtgtcggcgggcggccgccggctgccgctgttgctggcgattcaagcggctgcttcatccttggcggaggcgttgacggggggcgagcgcgcgctttgcttgcctgacggcctgccgtttgacgtcgactcggacgagagagacgccgcgccggatgatgagggaggcggggcgtgaccggcggccgaccgactccgcaattgccatggggatggagatccatgtgggttatcgccatgttcgatctgccgaccgacaccccggccgccagacgcgcctacgcccgatttcgtaaggatttactggaggacggcttcaccatgatgcaatattcggtctatcagcggcactgcgcgtcgatcgacaacgccgagacgcatgtggcgcggatgagcaagaagctgccgccggaaggggaggttcggtttgtcgtcatcaccgaccggcaattcagccgcatcaaggttttttggggcgataaacgccaaaaagggcggcccccgccctctcaactcgagcttttttgaccggttgaaagggcggaaaacctttgcccttcagacgcttgtctgaagggcattgtagcgaaacgagagacggccgcaagccgcagctcaagcgccaaacccgagcgccaaccatttattgtagcgaaacgagagacggccgcaagccgcagccggcgcgggcggcttatga

SEQ ID NO: 3448 - DNA, 5133 bp, synthetic construct
  source 1..5133: mol_type = other DNA
  misc_feature 1..5133: note = Synthetic
tcaagcggggccacctctctcctccccgccgaccttcaggcctcaggacctcgcttcaggccttccggtaagagattcccggggtccgcatcaaaggcacgcgccgtcgagcacccacacccgccagagccagcacctgacccgcaaggaagccagccaggttggcgatggcaccgcagagcccgaccaagagagacaccgcgatcaccacgcagtcgtcggaccaagcccgcacaagggatgtattgcggcttgcctagtgaagtcgccgaggcccatacggcaactcgaaagagaaggcacgacgacgaggccgcaagatggaatagcagcgaattcagccagagcgaatttagcctagatcaccgcggcccctctgttatccaatctgtcgccctcactccgagcttaaaaattcggaactggacactgcatcggatacgaagtctaccgccaaaggctataaacaaaagacccccgctttcgcaggggtccttgccggccgtgaccttgggatgccgagcccacacgaggggtcttttgcttgcgagaagcgaccgcctctcccttcggtacatgattgtgttaccctaagagccacaaccgttcaagtgggagcgaggcgtggcgctgatctttgggttggatatcgggaccacttcgattgggtcggctgtcgtggttcacgagcctgatcgcggtgaaggaaagatcctccacttgggggtaagagtcttccccgaagctcgcgaccccaaagggaccccgttgaaccagcagcgtcgcgcgaagcggatggcacggcgtcaattgaggcgacgcaagtcgaggcggcgctcagtcaacgaactcctatcctcggtcgggctgcttccaactttcggcagcgacgcatggcatgagacgatgcggctcgatccctatacattgcgcgacaagggcctggatgtggcacttgctccccacgagttagggcgagctatctatcacctctcgaagcaccgccactttgcagccaaagaacttgacgactcgaaggacgaagccgaagacgaagttgatgaggagaaggaggctgcaggcgcccggcagtcgactatcgaagcgctccgtcgtgagggcatcaccctcggtaggtggcttgcccgaaaacctgatggccagcggaagcggggggcacatgccctaaggtctgtcgttgaggacgagtatcatcgtctgctagaccggcaacgccctttccactcaattctctcggaccaagactttacggcagccctgacagcggaaatctttgcgcagcgcccggtcttctggcggaaaaatacccttggcgcctgtccgctgatacccggtgcttcgctttgcccccgcgggacttggctgtcacaacagcgccgcatgttggagaaggtcaacaacctagcgatcggcggaggaaacgcccgaccactggaccccgatgagcgggccatcatcatcgcgaaggtcgaaagtcagccgtcagccacatttggcgctctccggatggcattgaaagggctctacaagagccgcggtgaggagggccgagaaaagagtctgcgtttcaacttcgaagacggaggagagacacgtctactgggcaattctgttgaagcgcggctcctcgcgatcttcggtgatgagtggtctcatcatccccacaaagaggcgattcgcgatgcagtccatcaacgcctttggtcggcagactatgcagagatcggtcagcgggtcgtcatccggccggcaggggagcgcatgggacgtcgacgttcggcagcccgtagtttcatcacagagttcggcgtaaccgaagaacaggccgaagcacttgagaggtggaaactgcccgcagggtgggaaccctattcgacggaagcactcttactccttcttccggaactcgaagccggagttcggttcggagcgctgactgtcggcccggattgggagacatggcgtgaaagaacttttccggacaggatgcggccgaccggtgaattcgtcgaccgcctccccagtccgaaggcgaaggaggaatccgaccgcctcgcgaacctgcgcaacccaacagtggttcgttgccagaacgagttgcggaaggtcgtcaacaatctcatcgacgcgttcggcaaacccgacctgatgcgtatcgaactggcccgggaagtgggtgcctcgaagcttgaccgcgagaagatgaccaaggcgaaccgcgaacaggaaaagcggagaaaagcagccagggccgacctccagtcgaaaggaattgcagagcccgcccgacgcgacatcgagaaatggctcctttggaaggagtgcggcgagcgcgatccctatacaggcagtcaaatcggattcgacgccctcttccgcaacaatgaattcgacatcgaacacatatggccgcgcggccggtcactcgacgacagcttccggaataagactctctgtcagaaggatgtgaatctcgccaagggcaatcgcacgccattcgagtacttcgcccatgtcggggaggactgggaggcgatcaaaaggcgccttgggagcatgatcggtaccaagagcggcgacggcatgagtccaggaaaggccaagcgcttcctcgctgaggcaatgccggaggacttcgccagccgccaactcaacgataccgggtactcggcgcgccaggctgtcgcctctctcacccgcctttggcccgaccaaggacgcacgggcagcgttagggtattcgctgtgaatgggcgcgtgacggcgcatatccgccgcctatgggggctcaacaacatcctgtctgatgacggcgagaagacccgcgccgaccaccgtcatcatgccattgatgcccttgtggtcgcctgcacagaccccggcatgacgaaccgattgtcccgattctggcagagcaaggacgaactcctggcgggggtcgcacgttccctttcgctcgatccgccgtggccaggtattcgttcggatgccgagcgagcggctgccgccatcatcgtctctcatcgagtgaacaagaaggtatccggcccactgcacaaggagaccacctatggcgacacgggtaccaatatcctgcgccgggggactacgtaccgccgcttcgtcaccaccaagcaactattaaatataactgtgggagatgttggaaatatagttgatccccaggtaaggcatattgttgcaacatggatagaggaacggggcggcaatcccaagaaagcgtttccaccattccctcgtgtcagcgagttcggtccagaaatccgcaaggtccgaattcatgttgatcaacaggtcaggcttatggctcccgcgtccacaggatatgcggacctcggcaacaaccatcacgtagcagtttacaggacctcggcaggtgagttcgaaaccagagttgtcagtttgttcgaggcggctcgcagacttgcagccaagcgacccgtgatcgagcgtgaaagcgaagacactaggtttatcatgtcattggccgctggagagagcattgccttctctggagccgcacgtactgggctttggattgtgaggagtatttgggccaatggtcaggtggtgatcgaagccgccaacgatgcgatcggcgccaccaagacccagcctcaagcgtcctccatcctcagagacggcggcagaaaggtgtcagtcgatccgatcggccgaatacgtactgccggcgactgatgagggcgccatgttaaagaagactgtcgagattgccacacccggcacccgcctttcggttaaaagccggcaattggtgatagagcgctccggactgccggccgccagcttgccgatcgaagacattggcgtagtgatcgtcgatgacacgagagccatctatacgcatgccgtcttcattagtttactagaagccggtgcgactgttatggtttctggcaccgattatcttccggccggaatgatgctgccgatcgacgcccatcacgtgcagaccgagcgtcacagggcgcaggtggatgcaagcgaaccaacccgcaaaagagcttggcaggcgatcatcaagtccaaaatacgcaaccaagcagaagtcctaaaagcgttcgccggtgaggacgcgggacttgcagccatggcaaatcgggtccgttcgggcgatccggacaatctcgaagcccaagccgcgcagcgctattggccccgcctcttcggcaagtccttccgccgtgaccgcggtgctgatggcctcaacggactgctgaattacggctacgcggtgatccgagccgcgacagcccgagcgatcgtcgcggccggactgattccatcattaggcgtgttccaccgaaaccgctccaatcccttctgcctggccgacgatctcatggaagcctatcggcctcatgtcgactggcgcgtccggaagtcgctcgacgaaggcgttgaggagagccgagggttagccgagagacagacgcgtcaagcgatgctttcgctcttcaatgagacaatcatggtcgccggccggcgatggccactcctgcttggaattcagacaagcgccacttccttggctgcggtgctgaccggcgagaaggcgaaactcgcattgccggaaggtcttccactagcgttgtcagtcggcaacgaggccgaagaggaggagggatgatggctcatgcgacgcctatccctcaaattccctgggggtggcgctccatgtgggtcattgctatgttcgacctgccgaccgaaacaccagcattgcggaaagcctacgcacgctttcggaaagaccttctaaacgacggcttcagcatgatgcaatattcagtgtacactcggcattgcgcctctattgagaatgcagaagtgcatatcggcagaatgggaagccgacttccggctgcaggagaggtccgcttcctaaccatcaccgacaagcagtttgctcggatcaaggtgttcgttggcagaaaacgggcccccactcctaaaactccgtctcagcttgagcttttttgatggagcggaggccgctttcttgttttatttcaatatcttgagaacaaggtaatagtaccgaagggagagacggccgcaacccgcagc

SEQ ID NO: 3449 - DNA, 4992 bp, synthetic construct
  source 1..4992: mol_type = other DNA
  misc_feature 1..4992: note = Synthetic
aacccgcaagacggccctcaccggaggggtaccgggcgatttgtcataatgcctgttatccccaggccaaggcgttgcttgggaaagaaaattgggtcggacagttcgttttgtggaatcgtttttctgggccggcccggggggcgcgccggggctggaaagcggcggaaacggtagcacgaaaaggttttaaagcctagatcgcggtcggacttcggccgggaatcaaaaacctccgcggtgagcggaggtttttgaccggcaggtgaccatggggtgccgagcccgcgcgaagggtctctttgcttgcgaaaagcgaccgcttctcgttttgctacgggaggacggataacgtcgctgggtgatttgagcaaggggattggacgtggaactggttttcggtttcgacatcggcgcgacctcgatcggctttgcggtgatcgaatacgatgcgagcgcagggcatggccgcattctgcgcctgggctcgcggatttttccggaagcgcgggacccggacgggcaaccttggaaccagacccgccggcagaagcggatgatgcgccggcaattgcggcggcgccggcaacgtcggcgcgatctgaacgaactcctcaacattgcgggattgctgcccgcgttcggcagcgaggcgtgggacgcggtgatgcaacgcgacccctacgaactccggcagcggggggtggcggaggcgctttcggccttcgagttgggccgagccctctaccacttggcgcagcgccgccactttcgcggtcgcgagctggtggagcaggagcccacagaaacggatgcggtcgatgccgaggagaaggaggcagccaacaagcgcgaggcggaccgggcggagctgaagcaaagcggcctttcgctcggtgcctggctccattcgctgccggcgggcgagcggcggcggcacaagcacctgctgcgcaacgacgttcgggccgaattcgagctgttggtggcagcgcagtggacgcaccatgcgaggctcggcgagccgacgttccaaggtgccctcagcgacgcgattttccatcagcggccggtgttctggcggaagaagacgctcggacagtgccggttcgtgcccgagggcgaactgtgccccaagggcagctggctgtcgcaccagcggcggatgctggagaaggtgaacaacctctcgctgatcggcggcaatgcgcggccgctggacgatgacgaacgcgcggccattctggcgcaactgcaaacgaagccctcgctgagttggaccgcggtgcgcaaagtgttggcgccgctgtttcgggcacgcggcgaagcgggcggcgaaaagagcctccggttcaatctgcaggttggcggcgagccgaagctgttgggcaacccgttggaggcgaagctggcgggggttttcggggacgagtgggctggccatccgcacaagcaagccatccgggacacgatccacggccgtttgtggagcgccgattacggggagatcggcacgcagcgggtggtgatccgaagcgaggccgaacgctcggcgcgacgtcaggcggtcaaggcggccctcgtgcaggacttcgccttgacggacgctgaggcgcaagcgctggccgaactgacgttgccggcggggtgggagccctattcggtcgaagcgcttagggcgtttttgccggagctggaggccggggcgcggttcggtgcgctggttggcggacccgagttcgaggactggcggctgcggaccttcccgaacgccgaacggccgaccggggagctgttcgacgagctgccgagcccgcgcgatcccgacgaggccaggcgcctggcgggcattcgcaacccgaccgtggtccgggtgcagaacgagctgcgcaaggtcgtgaacaacctgatccggctctacggcaagccggatcgcatccgcatcgaagtcgcccgcgatgtgggcctgtcgaagcgggagcgggaggacaagcaggcgggcatgcgtcgcaacgagaagcgtcgcgatgaggcgcgcaaggatttggtgaaaaacgggatcgccgaaccctcacgtgacgaaatcaacaaatggttgctgtggaaagagggcagggatcgctgcccctattccggcgattacatcggtttccatgatctgtttggggagggcaactacgaggtcgagcatatttggccgcgctcacgctcgttcgacgacgggttgcggaacaagacgctgtgccggcgggactggaacctgcgcaagagcaacaagacaccgttcgagctgttcgcgggcgatgcggatggctggcaggcgttcaaggatcggctggaggggctcacggcaaagagcaaaggcgcggcgggactaccgccgggtaaggtgaagcggatgttggccccgtccttggatgaggatttcacgcaacggcagttggtggacacgggctatgcggcgcggcaggcgctggcgatgctgaagcggctttggccggacgtggggccgacggcaccggtcaaggttgagcccgtgacgggcaaggtgacggcgcacctgcggcggctttgggggctgaacaacgttctggccgacgacggcgagaagacgcgggccgaccaccgccaccatgcggtggacgcgttgacggtcgcctgcacgcatccgggcatgacgaaccggcttgcccgctacttccagcaaaaggacgacccgcgggcgcagagcccggcgctgccgccgccttggccgggcattcgcgccgatgcggagcgggcggtcgcggagatcgtggtttcgcaccgggtgcgcaagaaggtgtcggggccgttgcacaaggagactgtctacggcgacacgggccaagaggaggtgcggcgcggggtcacctaccgcacgctcgtcacgcgcaagccggtggacagcctctcgaaggcgatgctggaccagatcgtcgatccgcatgtgcgggaggtcgtgaaggcgtgggtggcgcaacgtggcggcgagccgaaaaaggcgttcccgccctatccgcgggtgagcgagcacggccccgaaatccgcaaggtccgtgtgcacgtcacccagcaattggcgctgatggcgccggtcggcaacggctatgccgatcttggagacaatcaccacatcgccttgttcaagactcgtgatggcaaagctgctgccgaggtcgttagtcttttcgaagcggcgcggcgcttaggcagccgggaaccggtcatccgcagagccggcgaccctgacaggcgtttttggatgtcgctcgcgcccggtgatgcggtccgtttttcaaaaggcgaaagaaaggggatttggatcgtccaaggcgtgtgggccaacacgcaggtcgtcctggttcgccacgacgacgccctgggcacgacaacgacgcggccgagacccgcagcatttctcaaggacgaggcggagaaggtttcgatcgatccgatcggccgcattcgacctggcaacgattgagggatggccgatgattcgcaagaccgtcgaattcggcacacccggcacgcggctgtcggtggcgcatcggcaattggtgatcgaacggcccgatcagccgaaggcgacgctgccgatcgaggatttgggggtggtgatcgtcgacgacggccgggcgatctatacgcaagccgtcttcgtcgagttgctggcggcgggcgccacggtgatggtgaccggccgcgaccacctgccggttggcatgatgctgccgttggacgcgcaccacgtgcagacggaacggcaccgggcgcaggtggaggcgagcgagcccacccgcaagcgctcgtggcaggcgctggtgcgggccaagatcgggcagcagggggccgtgctggcgcatttcaccgggcacgacggcgggctcgggcccatggcgcggcgggtgaagtcgggcgatccggacaatttggaggcgcaggcggcgcagcgttactggccgcggctgttcggcgcggactttcggcgggaccgaggggcggagggggtgaacgcgctgttgaactacggctatgcggtgatgcgtgcagccacggcgcgcgcggtggtgggggcggggctgatcccctcgctcggggtgttccacaagcatcgggccaacccgttctgcctggccgacgatctgttggagccgtttcggccgttcgtggattggcgggtgaaagggcacgtcgagggcgggggcagcctgtcgctggacgacaaggcgacgcgggcggcgctgttgtcgttgctcaacgagacggtggtggtcggcgggcggcgaacggcgttgctcttggcgctgcacgcgagcgctgcctcgctgtgccgagcgctgaccgcgagcgagcggcaactcgccctgccggaagggctgccgctcggacaggacctgttggaacccttgggcgaggcgtgatgggacatgccaagccgataccgcaatggccctggggatggcggtcggtgtgggtgatcgcgatgttcgacctgccggtgacgacgcaggcggcgcgcaaagcctatgcgcggttccgcaaggcgctgatcgaggacgggttcaccatgatgcagtattcggtctattcgcggcactgcgcgtcgatcgaaaacgccgaggtccacgtcaagcgcatgggcgcgctggtgccggcggcgggcgaggtccggttcctgacgatcaccgacaagcagttcggccggatcaaaatgttcgtcggaaaacgacgccagcccgcccccgcgccacccgcccaactcgaattcttctgagttcgagggcaaaaaatgcttttaaatcaggcgattagggcgggggcgactgtagcaaaacgagaaggggccgtaatccgcagctcgaggtgcatgggtcgatgacgctcgacgactgtagcaaaacgagaaggggccgcaattcgctgccggggcgggaacgaccttgcgatgcgcccgacgctcgtgcaacg

SEQ ID NO: 3450 - DNA, 4932 bp, synthetic construct
  source 1..4932: mol_type = other DNA
  misc_feature 1..4932: note = Synthetic
ccttcggcgtcctcgaccgcatccccaaggaccggatcgtcgaaacggaggaggaggccaaaaggctcgcctggtccctggtgaaacgggcgtagggggccctgtcgacgtacggaatttggcctggaatgcgaaaaacccccgtccgggggacggaggttcgaattcgccggcggatgaccttgggacgccgagcccgcacaaagggtcgatttgctgcgaaaaggaaaccggccgcttctcgatttgctacaatggataccataccgcccgacgcgcgggatgcaatggagaatatctgcatgaccctgattttcggcttcgatatcggcacgacatcgatcggctttgcggtcatagagcacgatcaagaccgcgcgactggaacgatccggcgtatgggcgtccgtatttttccggaggcccgcgatccgaaaggcgcgccgctgaatcaggagcggcgggcggcgcggatgcggcggcggcagctgcgccggcgccgggaacggcggcgtttgctcggcgatctgctacatcaagcggggctgctcccggcccgaggatcgccggattgggacgaagcgatgaaatccgacccctacgacctgcgcaagcgggccttcgaaggcgacgcgctttcgccgttcgaggtcggacgggcggtctatcatctggcacagcgccgccacttcaagggacgggatatcgacgagatttccgaacaaggcgatttggtcgaggataaggaggagagcaccgacgagaagaaagcgaagaccgggcgtgaagagacgctccaggaattgaaggaagccggtggaaccctcggcgcctggctggcgaaccgcgggccgcacgagcgcaaacgcggtgttcacgcaacgcgaaagatcgtcgagaaggaattcgaaagggtctggaaagaccgcttgcccggcaacatttcagaggccgtgcgcgaagcggttttccgccaacgccccgtgttctggcgcttgaacacgctcggagaatgccgcttcgttcccggcgcgccgctgtgcccgaaaggttcgtggctgtcgcagcagcggcggatgttggagaagctgaacaatctggagcacgccaccggcaaccggcgaccgctcgacccggaagagcgcgcggcgatcctcgacaggttgcagacgcgggcgtcgatgacgtggggcagcgtccgaagtgcgctcaaaccggtctacaaagcgcgcggcgaacccggcgcggaaaggcgcctcaagttcaatctggaggaaggcggcgagaaaacacttctcggcaacgcggtcgaagccaagctgaccgggattttcggcgacgattggcaaaaccacccgcacaagcagggaatccgggacgccgcgcatgactatatccggcaggcggattatggcgagatcggcaaacagcgcgtcgttatcctttccgccgaagaccgcaggaagggcagggaacgggcggcgcagcgttttgccggcgatttcggcatttccaaggagcgcgccgaggcgcttgccgcgatcaagctgccgaccggctgggaaccctattcagtcgaggcgctgcgggccatgctgccccggcttgaggaaggcgtgcggttcggcgctctcgtgagcggtcccgattgggagacctggcgtaacgagacgttcccggcgcgggaccggccgaccggcgaaataatggaccggctgccgagcccgacgcgcaagaaccgcgaggaaatggagcgcattgcgcgcctccgcaaccccacggtcgcgcgggcgcagaacgaactgcgcaaggtcgtcaacaatctcatcgacatgttcggcaaaccggacctgatccgtgtggaactgacgcgcgatgtcggcctgtcgaagcgcgaacgggaagagaaatcgttcggcatccggcgacaggagcggcgacgggaggccgcgcgcaaggacctcgaagagaagggcattgtcgagccttcacggcgcgatatcgagaaatggatgctgtgggaagagtgcggtcgccgctgcccttatacaggcgaccatatctgtttcgacgacctgttccacaccggcgaattcgaagtggagcacatctggccgcggtcccgttcgctggacgacagctaccgaaacaagaccctgtgccggaaggacgtgaacatcaagaaaggcaacagaacgccgttcgagtatttcgaccgggatgcccacgacgaatgggaaacggtcctgaaccgcttggatggcatgaaggcgtcgaaaggcggcgccgggatgtctcccggcaagatcaggcggttcaaggcagagtccattcccgaggattttgccgcccggcagttgaacgacaccggatatgccgcgcgggaaactgtggctttcctcaaacggctgtggccggacgtcgggccggaagcacccgttacggtgcaagcagtcacaggacgggtcacagggcatctgcgccggctctggggcctgaacaacatcctgtccgaagacggcgagaagacccgcgccgaccaccgccatcacgcggtcgatgcgctggtcgtggcctgctgccatcccggaatgacccagcgcctgtcccgctactggcagcaggaggacaaccccgaaatcccggacccgccgtccctgccgaaaccttgggaagcgatccgcgccgacgctgaccgggcggtcgccgaagtcgtcgtgtctcaccgcgtccgcaagaaggtctccggtcccctgcacaaggagacggtatacggcgacacgcacgaagaggagaccggcaaggacggcacagtttatcgctatttcgtcacgcgcaagcaattggaggatttgagcaagagcgactttgcggataaaaacgccgacgcttggccggacgaaaaaatccgcgatatcgttaagaattgggtcgatagacacggcggcgaccccaagaaagcgtttgcggagggttatccgaagcgaggccgaaaggggccggagatccgcaaggtccgcctgcgcagaaagcagcaggtaaaactgatggcgcgggtctctaccggctttgccgatctgggtaacaaccaccacatcgcgatctatcggatggccgacggttcggtcgattacgacgtagtcagcttaatggaagcctctcagcggctggctaatagagaacccgtaatgcggcgcaagcgcggtgacggttcgcagtttgtaatgtcgctgtctgccggcgactcattggaattcactaagaatggcgagaccaaggtacgaatcgtcgagggtgcttgggacaatgggcaggtggtcttggttgaccatgacgatgccactggcgaatctcgctttcgccccggcgcgaaggcgatagcatcgagcggtgctaagaagttctctgtcgatcctatcggccgtatccgtcccgccaacgattgagccggtgcggcgatgatccgcaagaccgtcgagttctctacgccgggcacccggctttcggtcaagcaccggcagctggtcgtggagcgcccggacgcgccgaaagcgaccctgccgatcgaggatctgggtgttgtgatcgtggacgacgcgcgcgcgacctatacgcaagcggtgtttctggagcttctcgcggcaggggccactgtgctggtcaccgggcgcgaccacctgcccgcaggaatgatgctgccgctcgaagcccatcacgcacaaaccgaacggcaccgcgcccaggtcgaaaccagcgagccggtgcggaaacgcgcctggcaagccatcgtgcgcgctaagatcgcccagcaggcggccgtgctgcgccatttcaccggccatcatggcgggcttgagccaatggtccggcgggtacgctccggcgacccggagaatatcgaagcccaggccgcccagcggtactggccgcgcctgttcggcaagggcttccgacgcaaccgcgaggccgacggcgtgaacgctctgttgaactatggctacgcagtggtccgggcggctttggcgcgggcgattgttgccgcgggcctgattccctcgctcggcatacaccaccgccaccgggccaatccgttctgcctcgccgacgacctgttcgaaccttatcgtccgtttgtcgattggcgggtccgcctgctggccggcgaaagcggggcggcagcgccggacttgtccgaacgggagactcgcgccgtgctcctgtccctgctcaacgagactgtcgtaatcgccggccgcagggaaccgctgctgctcgcgctgcattccagcgcggcatctttgtgccgggccctgaccggcggcgaccggaccctgtcgctgcccgaggggcttccggtgcagcccgatctggtcgatgcggcggaagccggttgacgcccggtggctgaggtcgcgaaggcactcccctggggctggcgcacgatgtgggtcatcgccatgttcgacctgcccacggacacgccgaaagcgcgcagggcctacgcccggtttcggaaggacctgttgaaggacggtttcacgatgatgcagtattccgtgtatacgcggcactgtgcatcgatcgaaaacgcgaaagtccatgtcgcgcgcatgggccagcgcgtcccctcggcgggggaggtgcggttcctgaccatcaccgacaaacagtttggccggatcgagacctatgtcgggaaaacccggaaggcacccccgcctccgcctgcccagctggagtttttctgatggctggacgggcgaaaagcgctctttttcaaggccttacagccggggcaatgtagcaaatcgggaaacggccgcaatccgcagcccatgaatgcttccggcctgatgggcaccgaatgtagcaaatcgggaaacggccgcaatccgcagctctacttccacaccaaccaagggagtgtcaaat

SEQ ID NO: 3451 - DNA, 4053 bp, synthetic construct
  misc_feature 1..4053: note = Synthetic
  source 1..4053: mol_type = other DNA
ttggatcgccgcgtaggctcctggctcgtccttcagctccgccaccaggtcaatgcctgcatcgtctgaagacaacccccgctggcgcgcccactccccataggtttgcaccgtgctgaattgcgctgcctgcacagggtcatggcgaagaaaagcggtgcaaagccgctcaaacgctgtccccatgtcccgcctgcggctgaaggtcgcctggacggcctcttgacgccagctttgcagaatctcgtcaaggggatgcatggcggtgggcaagtgctgccttgggggcagtcgccgagaaggggtgttggtcgagaataggggtggggggcttgtggacatgggacctcgaacctcgataaccccggttccggataaggagatcagagggaaacgaccttgcccgtacgacgacctcccagcatgagaaagtcggaatcggcggcgtcagggaacgccgcacctacggtctgatgcaacaaacccccgccctggggcgagggtttgggtgccggcgttgaccttgggatgccgagcccacacgaagggtcgttttgctgcgaaaagcggctgcttgcagccgatcacaggatggacctcttctcggtttgctacagtgttatgctagcgctctgcctcagcttgtgcaagggtctgttgcatgaaattgatttttggttttgatatcggcaccacatcgattgggttcgcagtcattgagcacgatcctgagcagagcaccggcaagatccggcggcttggggtacgcatcttccctgaagctcgtgatccaaaagctctggtccctctgaatcaagaccgccgtgaggcccggatgcgacggcgccagttgcggcggcggcgctcgcggcgccaggagcttggcgcattgctgaaccagcacgggttcttgccaaggcgaggagatacggaggcgtgggacacagtcatgggagctgacccttacctgctgcgcaaatgggcattcaacctccaacagccggaatccgacttgcaggctgagcaagtcaatctccccgagtgggcctttgagggtgagggcctgtccccccatgcggtggggcgagccatctaccatctggcccagcgacgacatttcaaggggcgggatattgatgaaatcgccggtgacgatgggaccaagcccagcaacagggctgcggatcaagatgaagaagacaagcaagcaatgtctgcgagggaggccactcggaaaaccttggaacaggagggcaaaacccttggcgcctggctggcggaacggaaaccgaacgagcgcaagcgtgatgttcatgctctccggcaaaacgtggaggaggagtttgaccaggtatgggcaccccatttgcccaataatcagatcagggcaaaggtgcgcaaggccatttttgatcagcggcctgtcttctggcgccagaagacgcttggcacatgtcgctttctgcctgagaagaaaggccgagacctttgtccacgcggatcctggctatctcagcaacggcggatgctggaaaaactgaacaatctccagcttgtgagcccagagcagtgctgcctggatcaagaagagcgtcaagccatcctggccaagctacaaacccaagcctccatgacatgggcaggagttcggaaagctctggagcctctctatcaacaacggggccagcgtggagataaaaggctgatgaaattcaacttggagcagggcggagaaaaaaagctgctcggcaatccgattgaggcaaagctggcgaatatctttgatgacggttggccggatcatcctcatcagcaagctatacgagacgctttacatgagcatctctggaacgcggattatgagtggttgggtcgggagcgcgtcgtcatttgttcggacaaagagcgcgaaaaacgcaggaaacaagtggcacggtacttcatggaaacgtttggcgtatcccatgaacaagctgagaaaatcaaggctttgaaactgcccacaggttgggagccttactcaactgaagcattgcggaggatcttgccccggctggaagaaggtaagcagtttggtcaaatcatcaacggtcatgatactgaatcggtgcgatggcgcaaagaaacgtttcccaatcaccaggagaacaccggccacggctgtggtcgtctacccagcccaaagaacgagcaagagtgtaagcacattgccagcttgcgcaaccccaccgtggcccggacccgcaacgagctgcgcaaggtggtcaacaacttgattgacatgtttggcaagccggatcagatccgcgttgagttggcgcgggatgttggcctgtccaagcgggagcgggaggaaatgcaaacgggaatgaaccgccaggaaaagcgccgcaacgcagcccgtaaagacctgaaagagaaaggcatatccgagccctcgcgcaaggatatcgagaagtggatgttgtgggaggagtgcgaccatcagtgcccttacactggggaccatatttgttttgaagccttatttagaaataacgaatttgaagttgaacatatttggccacgttcgcgctctttagatgatagctttagaaataaaactctttgccggaaagattttaatgcccggaaaggaaacaaaacaccatttgaattgcttagcagcgatgaggagaaatgggcagccatagggcagcgactagaaaaaatgaaagcaaaaaggaaaggagagaagggcatgtctcctggcaagatcaagagatttctggcccaatcaatcccggaagattttaccaatcgacaactcaacgacacaggatacgctgcccgagaggccgttgcctacctcaagcagctatggtcccctgatgaaacaacaggcacggtagttcaagccgtctcaggacgggtaacggcacatctacgccgattgtggggcttgaacaacattctgggagacaccggcgagaaaaaccgtgccgaccatcgccaccatgccgttgatgcgctgacagttgcctgcacgcaccctggcatgacacaaaagctctcccgctactggcaagacaaggataatccccgccctgttatccagaaaccaggcctcccacatccttgggagacgatccgcaatgatgctgagaaagctgtacaagacattgtcgtttcccaccgcgtccgcaagaaagtttccgggcgacttcataaagagacagtctatggtgatacgggtgaagaagaaacaacaggtaacgtgacgtatcgatatttcgtcacacggaaaaaggtggaggcgttaagcaaaaaagaactgaaggagcagatctgcgacgatagggtaggcagaattgtcagagattgggtggaagaccatggtggtgatccaaagaaggcttttaatgactcctcttatccaatgctcggagaccatggtccagagattcgcaaggtacgcttgcgcataaagcagcagattgagacaatgaccccagcttctacaggctgtgcttatctggacgggaatcatcacatagccctctatcaattgcctaatggaaaaatagactatgaaatcgttagcttactcagagcttcacaacgtttagcgggccgagagcctatcattcaacgtgagcatagtggcagtgcaaagtttatcatgtctttatctaaaggtgattcactgaaactcacagaagataataagattaaaatagtaattgttgaaagtatttggtcatctggtcaaatcgtaattgttgaccatagcgacgcaaaaggtagcagtaaaaacaaccaaaagctggatctttattactgagaaacaaggcaaagaaaatctccgtcgatccaatcggacgagttcattcgtccaatgattgagcactgcaacaatgctccgtaaaacagtcgagttctcgacgcctggaacgcgtctctcggttgcccatcgccaactcgtgatccaaaggcccgatcttccaaaggcaacactacccattgaggatttgggagtggtgattgtagatgatgtccgtgcaacctacactc

SEQ ID NO: 3452 - DNA, 23327 bp, synthetic construct
  variation 8394..9068: note = note, n is a, c, g, or t
  source 1..23327: mol_type = other DNA
  misc_feature 1..23327: note = Synthetic
gcgatttgggggttaaaccagcgtgataaatcagaggtataggcagtactattgccgtggaacctattttgctgttcggagatctcagtggttgaaagcgtgagctcgccgccatctttgatctgatcccgctctaaggggttataggagccagcgggtttaatctcaaaagcttgggaaggggagccagcgccagaaccagcttgggaatcgcctgactgggaacatgccccaagcgagagcgcggcgacggataacgccgccagcgcggctaggcgaaatttctttttcatatagaaaatctccttgagtaggcgaacagtgcggggtgcagagtccttctgatgcggctgcggctgcagttgcggttgcggttgcttgctgcggctgcggcagcggcggtgaaagggctctccctggcactgaatttggtggtttcagtgcccgggacaactctccaaacgaggcgttgtttagcggcgggctacggttgggtccgggatggggattgctcgcaaaagcttcttggtgtagtcatgttgcggattatcaaagacctcatcggtcttaccttcctcgatgaaagttcccttgtacattactgccacacgatctgaaaggtggcgtacaacagagagatcatgggccacaaaaagataagacaggcccagcttgcgtttgagatcctctaataaattgatcaccccagcctggatagatacatccaaggccgataccggctcatctaaaacgatgatgtctggattggtggccaaggccctagctaaaccgatgcgttggcgttgtccaccagaaaaatgtcctgggaagcggtcaatttgagaagtatctaaacccaccaaagccatgagttcttgcacgcgacggtcgatatctccatcaaaacctaaagactgcaaaggttcggcaatcacttctttgacggtgagtcgcgggttaagcgagctcatgggatcttggaagacgatttggatctgcttgcgggctgcgcggcgctgcgcgttggtcatggacgcggcatcggtaccatttagtaaaacggtgccatctttgggcttaagatccatgatttctagcaaagtggtggtttttccgcagcccgattcgcccacgatagctaggcattcgccctggtgaatatcaaaagaaataccgtctacggccttaactgttcccactttgcgcttgactagggccccttttgtcagcggaaattccttgcgcaattgctgcacactgagggtaattttgcgctcacttaaaggcacttcggcaaaaatatcagggcttaaaggcggcacttggtacattttttgcccattgatcatgccatctacgatttccccggcccggatgcacgccgtttcatgccccaccaaaccaggtaccgcactcagggtgggttcgcagctcaggcactgcggttgcaccactgggcagcgaggagcaaattggcattcctcttttaagttgaccagcacaggcgggttaccctcaataggagttagaggttctgctgcagggatatctggtcgcggggtggaacccaataagcccacggtatagggcatgcgcgggtgggcgaaaacctcaaaaacattgcccttttccacggggcgtccggcatacatgaccaccacatcatcggcggtttctgcaactacgcccatgtcgtgggtgatcataatggtggcggcgccggtttcgcgttgggctagtttgattacgtctaaaatttgggcctggatggtcacatccaatgcggtggtgggctcatcggcaatcaaaactcgcggattattagcaatggctagggcgatgaccacgcgttggcgcatgccgccagaaaattcgtgcggaaatgatttcacccgcaaatgcggttctttgatgcccaccaaatcaagcagttcgatggcccgcttaagagcagctttgcgcgaaatcttttgatgcgcctgcagggcttctaccagctgatatccgatatcaaaaaccggagtcaaagccgaaaggggatcttggaaaatcatcccaatgccctggcctctaattttggacatttgggcatcggttttccccaaaagttccgcagactggaatttaatagaaccagaaaccttggcatattcgggtaataaacccattactgccagcgaggtcaccgattttccagagccggactcacccacaatccctaaggtacgaccagggtagaggtcaaaagaaacacctcttaccgcattgactgcaccggcttcagagggaaaggaaacactgagatctcggacttttagaaccggttccacactgggttgaatgattccgggtacggcggattgaggggagatcatgctgttcctccggattttgagttggggtcaatagcatcgcgcaaaccatcggcaactagtgccagggataccgtcagtagggtcaaaatggcggctggaacatagaactgccaaggtgcggtgataagggtggccgtaccgccagaaagcagggtgcctaaggaaatatcgggtaatttcacacccaaacctaggaaggaaaggccagtttcacccatcacggtagaaatagttcccagcacaaactggatcaccagcaaggaactgatattgggcaacatatgccgcacgatggtcttcgtgcgagacacccccatatagcgggcggcgcgcacaaaatcattttcgcgaattgacagcgaaagcgaccaaatcacccgggcggcgtacatccacccgaataaaatcatcacaatgatgagcattttccagtcgccaccagcatcggaaactaataatgccaagatgaggaaactgggcactgccagcaaaaagtggatgaccgtcaagatcgatttttcaacccaaccgcccaatagggcagcacctgcgccgatgagagcagaaattaaagttgtggataaagccaccgaaaccccaatgattagcgagcggcctaaaccatgggcggcttgcgcaaataggtcatggccaccgtcggtggtgccgaaccaatgctcagcagaaggtggggtagataggttcaaaaaatcaggatcagtgaatttccagggcgataagaaaccgccgagcatcgcaaaagcgatcaataagataaagatagccagaccaataacagcacctttattgcgcagaaaacgacgcatataaagcttgagacgagaagtgccgcgcactaattccggcaaagaacttaagatgacctctgattcatccttatcttgcggaaccataacgtgatgcgagtgcttatcagacatatttagctcacccttactcgtggatcgagggctacgacaacgaggtcagcaagaatcgcagaaacccccgtaagtgccgcaccgaaagcagcaacggccacagcgccgtggacatcatttttggccatggtgtccacaaaatacacacccatgccattccaagcgaaaatcttttcagtcaaaactgcaccggtaaaaatacccggtaccgcaaaggccaccgaagtagccaccggaataattgaggtgcgcagcgcatgtttacgaatagcctggcccttggttagacccttagcccgggcagtgcgcacataatcggcattgatattgtccaaaagcaaggagcgctgcatgaagtgataaccggcataaccaatggttactagggcaatcgtcggcaaaatcaagtgttgggcataatccaagatacgaggaaagaaaccgaccacatctggattagaagcgccggtgacatacaggacgcgggtgcccgcccaatcgttgattttgatagctgcggcaaccacaatgatggaggccaccacaatatggatattcatcgaaataatggaaactgcctgccaaattcgatccccacgcttatattgtcgggaggccgtgtacaccccaactgaaacacccaaaataatggtgagaatagtagccaccagcatgagctgcgcagatacccaaatacggaacccaatttcctcattaaccgaagcccccgtgggggaataaccccagttccagtggaaaataatttcactaaaccacgaccaccagcgctgccaaatgggggtattagggctgagatgatagggctctaaaagaagatcaatttgttctggcgtcatcggagggcgccgacccagataattggagcgcggatccaaaaaggcagaagctaagaagaaggtcaggttagttgccagaaatacaatgagcgcccaaccagaagctttcttcaaaaggtatttgaacatcactaatctccaagaattatggaacgtatatggccggtaaatcgcgggggaattgattaattagccaagaatgctcaatgccgtgacctagtatctaagactgcgaaaggttgagcgagatcacattcttttaaggggagagtataacttagctgtgtataggcaaaagaaatatttggaagttttgtttatgaaattttatgtcagggcaaagcccgcaaccggaggctgcgggtggggttttagggccgggctgcgggtgaggtttagggcagcagcgtgcttggctctcctgacatggtgatcatcatggcatcgcgggcgcgggaggccgcaacatagagcagcgcgcgctcttggaggaggcgttcttttttatctgcttcgctaagcccatcgaagcgataccattgcggaactaagtcatgggacacacccattaagatgacgtgtgtaaattccaaacctttggcttggtgcatggtgattacggtgacgcgatcactatctgcactgttgttgctgctcaggtggttttgggaggcgattccgtggccttctagaccggtggatacttgggagacccgagagttagagcgcactaaaaccccgatataggcgtggggtttttcttgccaccactgtttgatttgggcggccacaatatcaatttcttggctgagggtggcagctggtctgattaatggcttgggtccagagcgtaaggagtggtagccggtgagggtatcgacttcgccgctggaatctatccattcggtattagctacgccttctaggatttgcacggcgtagtttaggttttctttggtagtgcggtagttcagggatagttttttgctggctcgaccgcgtgtttctatcccaaattggcgcagaggtaggcgttggccataaatccgctggtgggaatcctctgctaggaagatgtcattagctccaggggtggtgactgcgcgaagataagaaacaaagtattttgccagaaggattcttcataacgtatttcaatgataaatccagtcgctagctgtaccgaactatcccaaaaggtagctggctgacggctgctggctaaaagatatgcgctataaattcgtgaaacttgggatatctgataactgctatttaagggtcacagatttgacatacccttataacttaaggagaaagaaacctagccatctccttgtttcttggcaataagtcggttagctgtgatgccgaaataagaaaattcgcaaattggctgcattctcagcaactccgttacacgactctcaaggcccatatttgtaattaaatagcgttaagctaccttttgaccacatattttctagctgattgtttttaaaattggctatagacaggtggttgtagcttgtagagtgcaatttttttaagctaaaaatggcaatttcctctgatctaccagggaaaatgtgattttctcaagtatatcagaggaaatttgtattagaacccagcaatctttatgaccaaatacgtgctgcttcaagtatatcagaggaaatttgtattagaacccagcgatcattaagagagtctggccaatctagtcaagtatatcagaggaaatttgtattagaacccagcgggttttcgcatatccaaaactagcgcccaagtatatcagaggaaatttgtattagaaccaacaataaaattgcaggtaggtaaggggaaaccggtatatcagaatggatgattgttgtctaattgaagaagaattcgctgttgcgttgaaagtagtacgggaatatgtggagcggccgaagtttggcggcttgcgtgatgttgtgaaggttgatgagaaagcgttcggttttggattttcttaaaagggcgaggccgaaaatgtttagggagtcatcgataattgtggttgatagtggtaagagactatagggggatgtgttgtgtcactattctttttataacggtaacgaggtatttgttagatagtcgctttcttagggtggtggaagcgaagctttcggtgagatagtcagaattaaaactcgttacaactttttgtgagtacaaaattagcgatgaaaacattgatttgcggcgagtagggggtaatcacatatcagagaggatttgtccacagataacgtcttaaaattgcagcgaatacttcgcgtacaccatttaaggaactggtcatgttaagtaactgtggtgtaacggcgtcaagggtagaaaattgttttctagtatttctaggatttgttaattaagtcgtattactgtgcggtagaggtgtagaaactcaactagctgtgcttaatttgttcgttgtcagcggaatcgtcctagaattatggtcatggccagacctcagagcaaagatgaactacttgctgcagcgaatactcaattcgataaacttttgcagctcttggagtcaatcccgacgaaagatcgtgaagctgatttcccgcaaagcttcgcaaatcaggggaccgaggcacactggcagcgcgataagaattgtagagatgtgctcattcatctgtatgaatggcaacaattatggctgaactgggtgcatgcgaatttggccggtgaaaaacgtccgttcctgcttcctccatacacctggaagaactatgccgggatgaatgaagttttcaaagctaagcaccaaaatacttcctaccacgaggctattgaacttttacaggctgcacacgaagaaattttgggggaaattcaagcattaaataacgaagagttgtttactaagaagtatttccctttcaccggtagtacttctttgggttcttatacggtgtcggctactagttcccactatgagtgggcaattaagaaaatccgtaaatacaaaaaatctctgtaatttttattacctgaacttaaactaggtaagttcctaggaatcaagggcgatagtggtataaaatagccagtttttattatgttatagatataattttgataattacaccttggatgatcaaaattttccacttaatgaatgtataaaattcatttcatctaagagttttctttcgctgaaagtgatgtatgtgcgatgactgattcacatatagcgggataaacacactcgatcgttatttcagtgtctgctgtgtgagctcgcaatagttaggaaaaggtttttaggtaatctgactagtggtgatattgctttgagcgaggaatgctttaccggacaccgtataccgaggtcagggtgtttctgttataattcttgagggggagtggagggtaaaacggaatcgtttcaaagtttattaaggatttcctaaagccctgtatagatcccaaaatcggattactgcatcttttagggcaatctttagaattgctggcttttaacaaagctagatataaaaggcataactgaaaattgaaaataataattagaaaaattagtgttttatttagtgggattgtattaagttatagtgtttctagatattcaaatattgaaggctggattaactagggtatggaagcatttacaatatttatgattagattggtatcgttgaaagtgttggtcataaaattcgtaaaagcgatcgtaattctctattccaggtagtagatggcaagcaagaatagatagctacacttcgtccagtgtatttttcttagatgaaaacctgatggaatcaggtttatttgcaattcccgaatatctacttctaaaaaatgcagtttaaatttgaaaatatataacgagctgaaagttcaccaattttcgctacataatccaaagcctagcaagcggaaagatatgctacgaacagtcagtattgccaacgacaaaatgtgaaaacctaattacaggtgccatttttgtcttaggtccggctatacgatgatgcgtccacgtaagagatgtcaaaggagtatagctcgtaaccatctgtactgaacaagactgatttctcgaatttcttgcgtaaaaaactggcccctagatagtcgcttacaggttgtaattcatgatttttttaagctaaaaatggcaattttccctaatctaccagnnnnnnnnnnnnnnnnnnnnnnnnnnnnnnnnnnnnnnnnnnnnnnnnnnnnnnnnnnnnnnnnnnnnnnnnnnnnnnnnnnnnnnnnnnnnnnnnnnnnnnnnnnnnnnnnnnnnnnnnnnnnnnnnnnnnnnnnnnnnnnnnnnnnnnnnnnnnnnnnnnnnnnnnnnnnnnnnnnnnnnnnnnnnnnnnnnnnnnnnnnnnnnnnnnnnnnnnnnnnnnnnnnnnnnnnnnnnnnnnnnnnnnnnnnnnnnnnnnnnnnnnnnnnnnnnnnnnnnnnnnnnnnnnnnnnnnnnnnnnnnnnnnnnnnnnnnnnnnnnnnnnnnnnnnnnnnnnnnnnnnnnnnnnnnnnnnnnnnnnnnnnnnnnnnnnnnnnnnnnnnnnnnnnnnnnnnnnnnnnnnnnnnnnnnnnnnnnnnnnnnnnnnnnnnnnnnnnnnnnnnnnnnnnnnnnnnnnnnnnnnnnnnnnnnnnnnnnnnnnnnnnnnnnnnnnnnnnnnnnnnnnnnnnnnnnnnnnnnnnnnnnnnnnnnnnnnnnnnnnnnnnnnnnnnnnnnnnnnnnnnnnnnnnnnnnnnnnnnnnnnnnnnnnnnnnnnnnnnnnnnnnnnnnnnnnnnnnnnnnnnnnnnnnnnnnnnnnnnnnnnnnnnnnnnnnnnnnnnnnnnnnnnnnnnnnnnncccagtatatcagggaaaatttgtattagaacccagcctcgaaagatatcgagggattacgcgaaacccagtatatcagggaaaatttgtattataacccagcttccttaactggataccagcccactgagcactttaagtccattagatttagattgaatttaataattcccattagcgccccgtactgccatgcggtcatatctgattccccagctgcgcgcgcggctgcgtcagaaacataacgcgaaagaagcactccttgagtggggcttttctcggctagctcttttgccccggctaggatagttgcaactttttctaggtactcttcccacaaagtcgttatccagttcacagctgaactaggaggcggaggacttccataatgttcccacctcctggcagtgcgaacatttacccccaatgcatcggcaacattttgagaggtaagccccatgacttcccgcatcgtcttaaattcagctgtgttcatgtttttttaaattttccatttctgcgcattctcagtatgtcagggaaaatttgtactagaacacagctgcgctaggacgtactcgaaccctgtatgccagtatatccgggaaaaattgtattagaacccagcagggttgcaccaaatgaagcaccctcaatcatagcagaaagaatttatacgagaccctagcccaggtgtaagcgccatatttcacgcgcatctctattccagctgggaaacagggcttatgtagagtgcttgtataagacggctatgttctttggtgcattaggtataactgttgcttcaatttagctaaaatatgggaatttatgatctctacctaggtgatttaatggctactcgaacaaagttgcgggtgcttgtccgggtgaggttttaaactaactacatcaagtattaaccatcatgtttgcagaggcaggcatgtataaaaggaggcctaatagtgacccgctatgttgttggtattgatgttggttcttattcggttggcatggcagccatagaattggacgaacagggttttcctgtccaattattgaatgctgtgtctcagctgcatgatgctggtgtagatccggacagtcagaaatctgcagactcccgcctaagtaaatcaggtttagctcgtagaactcgacgggtgattcgtcgtcgtcgggaacgtttgcaaaagctagataagtttattgcagcgcaaggctggccgattatgagccttgaagattatgaaaacccgcatcatccgtggattgtccgtgcagaacttgctaccaccaagatttccgatccagctgagttgcaagaaaaactatcagtggcattacgacatatcgccaggcatcgaggctggcgaaatccctacagcagtaccgcttctttgctaaatgtagagaaaaacagtgagccttttgaacaaatcttggccaatattgctgaaaaaacgggcaagttaataccagaaaatactacggtagggcaggcaatattaattgggatcgataggggataccgcatacgaaaaggtgctgcagatggggatgcacaaactgagggtctgctatcagcacacttgcagcagtccgatcacgcgcgagagttagccgccatattcgcaaagcaggaattaagtcatgacctttataaagacgttattgaggtagtttttgcagctaaatctcccaaaggttctgctgctaggaaggtcggaaaagattcgcttccagggcaaacccatttaccaagggctcttaaagcaagtgaggcatttcagctatatcgtatagtttcagtaatagccaacttacgtttaatagttgaaggaactgcccgccccttgactaaagacgagcgtgtggctgtatatgaatacttaagcactgctaaatctcgcaataaagcctcctgggatgaggtggcaagcattctgaaagtagatcgcggtcaaattcgaggcacagctgcgatgactgacgacggagaacgggtaagtgcacgtccacctattcatgataccaacgcaattatgggttctctcaaattaaaagctttagctaatttctggaagaactcggatagcgaaattcgtgcggcagtactgcgagcactatcaaatagtgaagcgcgtgatgactcctcagaagcggatgcacagctcgatgaattcctagccgatttatctgaaaaagaacaagaagagctcgataaaatctctctcccagtaggccgtgctgcatattctgaagattcgctcacacgtctaactgcagtaatgctaaacgaaggcgtagatctttcgacagcacgccagcttgaatttggtattccgaaaaattggcaacctccagctcctgaaataggcgagcccgttggtaatccagcagtagaccgagtgctaaaaatcgtggcccgctggctcgctggcgttactaaaaaatggggcgaacccgaacgtgtcaccattgaacacgtacgtgatgcgtttagcagtaaaaagaaaaccagcgagatttctcgcaagataaatgagcgggcaaaacgtaacgaatctctacgagaaaatatccgtaaggccagaggtttcgatgggtacgtaagccgtgcagatctatggcgttaccaatcaataacgcgccaaaacgggcagtgcgcatattgcggcacacatatcactatgagcaattcccagatggaccatattgtgcctcgcgctggtcaaggatctactaatacccgcgataaccttctggcagtatgttctgcctgcaatagcgacaaaactaacttgccttttgctatttgggccgcaaaaacatcgcgcccaaacgtgagtttaaaagaggcacaagaacggataaagcattggaataaagatccggcaatgaaagccttagactttgcctatttcaaacgctctgtcttaaagcggctgaaacgcaaaacaattgacgaagagattgatacccgttcaatcgaatctgtagcctggatggccaatgaacttcgctcccgtattgcacataaatactcgttactagaaggccagcaagaatcgcctaaagtacaagtatttgccggtgcgattacctccgaagctcgaaaagcagcaggaattgagaaagaacttaaatatattggaggtgtaggtaaaactcgattggataggcgacatcatgcagtagacgcggcggttgtggccctgattacgccttttgttgcccaaaccttcgaggaaagaatgaacctgcgattttccgaggagctctctaattctaagtcgacctggaaaacttataccggtgccgattacgcgcatcgacaacaatgggaaatttggcaacttaaaatgcaaaagctattacaacttttgcaagacgccctggataatgatcaaatccctgtgatgtcaaatattcggctgaggctaggaaatagccgtgtacacgaagacaaagtgtctgccctggaatatcaccctctaggagaagaactttcctcgtcgctaatagatagagcttcatcggaagctttgtggtgcgcgctcactagagatcccgactacgtgtttaagaaaggcctgccagcaaatccaaaccgaactattcaggtaaatgggacacattatggcccttctgaagaaattggtttctttgctgtgaaagcggcttcaatacctttacgcggtggatatgcggaactaggtaaatctatacaccacataagaatctatcgaattaataccggcaaaatgcctacttacgcgatactgcgcgtatacgctgttgatctgcaaagacaccgaaataatgatcttttcaacgctgaaatacggccgcaaacaatctcaatgagaaaagccccagatacattaagaaaagccatagcagcagaagctgcggaatatattggctgggtagttaccgatgacgaattattcattgatagcgtgttgaataccgaactcaacgaggcttacggagatgttaaacggtggagaatagttggatccaccgatgacaatagatttgttttgcgcccatcccagctcagcagtgaaggcttagatagtaaggcttccaataatattcaaaaaatcatcaaaataggcttgagaatatcggtaaatgagttattaaaaaaacatggcataacggtagtaaggcgtaatgctttgggtgttgagcggattaaaagttccgctaatctgcccgtaagttggtccattaaaaagatatgaactccggatggagagttatcgatttaactgccatggaaggttccctaacatatatgtatgggaatctttcagtgcagccaactgggaaagacagggttttaattcccctggctgatatagcagttgtacttgttggtttgaaagtcagtatctctgggtcggtactattaaaactcagcgaatatgatgccagtgtgttggtttgtgactggcgcggtgtgccctgtgcaggggcatatccctggtcagagcactcacgcatagcggccaggcaattggcacaagctgctttatcgaaaccgcgacgtaaacaagcgtgggcagctgtagttaaagcaaaaattttaggccaagcccgcacagtgtcgacatgttctgaaacagctgctaataaactggtagaactagcagcttctgtgcgcagtggcgaccctaacaatcatgaagctttagctgcgcgcatatattggtcagctctatccccaactgcagactttagacgcaaccctggcaaaggggaagacggttttaataactgtctcgactatgcctataccgttttgcgtggctatggcataagggctgtagtgagcgcaggtctttccggaacaattggaatcttccatcataatcggtcgaatgcatttgcactggtagacgatgtaattgaaccttttaggccggctatagatcaccatctaataacaaagctagacgattttgatgtctctgacccttcggttaaaaaagttttagtgagcgcatctacccaggtatttgatgccgcaggcaattctttaaacacgtgtttagaggacctatgtcaatcgttagggttattcgttgaaagaaaaatagacacactaaaagtacctacttggaggtaattgacatgccgaagaaaggatctgaccaggtgtggcttttagtaatgttcgacttgcccgtaaaaacagtcactcaacgaaggagtgcaactagttttagaaaacaccttctaaaactaggtttcttcatgacccagctgagtgtttatgtgaaatatctgcctgcaacgggtcggtctgtgtcattagtaaaaagcataaagcaagcacttcccacaggtggagtcgttcaaatactaagcattacagacaaacaatggtcaaaatcaatacgcttcatacaaaaaactgaggtaaaaaccgaagaagccccgacgcaactagcaattttttgaccgtaaaaaggctaatttcctttgatctacctgcagaaatataagtatctgaagtatatcaaaggaaattcgtattagaacccagcatcgattttatggcaaataacgccaaaggaagtatatcaaaggaaattcgtattagaacccagcctagttccagcgatagttcggcctcggtgaagtatatcaaaggaaattcgtattagaacccagctcaagagaaagccaagaagatagctcacgaagtatatcaaaggaaattcgtattagaacccagccagtactgattttgagttagttaaaaatgaagtatatcaaaggaaattcgtattagaacccagcctgttagtagtggtggtgctaaaactgagaagtatatcaaaggaaattcgtattagaacccagcgcccgcgtgtactagtacaaactgcggagaagtatatcaaaggaaattcgtattagaacccagcctgtcggtggctagaattgatgattgtgacccaattgatggagtacttgatgtacttggaggagagttagagcaatggaaataacctttgaagaggaattcgctgcggcattggaaaaagcacggaaatgtgcagaatctccaaggcatggcggtctgcgtgatgtagtggcggttgatgataaagcgtttggtttcgagactttcctaaaagggacgccaggtatcatagggaattcgcatataattgtggttgatcgtcatactggggtagtacgtggcgggagcagcgcgccagtatttttcccgtataagggtaaaaagtattccctagatggccggctattagagcaataaaacaaactagggccataaaatagttattccattgtgtagcgctacctaggtaggttagcaatattggatttaggtaaaagaagaaggccggcacattgtgccggcctttaacttgctgctttaatagcagcggagcattcgaaagtcactaataatgtgactcttactgagttctaatacatgcccagtataaaataggaatgtcaataatgcaaatccaaggaaaaatcggaggcattcttatgtacagttgccgccattgcttatttgcgagttgcattaattgggctggccactagcgaggctgctggtagtgggtcataataggggtatgaccactgaaaatgatgccatcgttaagctcactactgaggaatctctggcgaagttgcgttcggaatccttgggaagggtggtggtgcatcgttctgcggaaatggatattttcccagtgaactatgtgctagatgcggataatcggatttatttccgtaccggtgctggaaataagctatttactattaatctcaaccatgacgttctctttgaggcagaccacgtagaacgccatgcagatagcggaactgcctggtcagtggtagtgcgtgggaatgctcggctggtggataccaataaagaaatcgcgcatgcggaaagcctgccgctaaaaccgtgggtgcccaccattaagcaaaactatgtatgtatcactattgaaagcataaatgggcgtagattcgtgctcggcccagagccagaactctactaatgccaccacttatcttgagggccaggaggcaggtggcgtttatggttgccgcgataccagagctcagctatccgctgttgtgcagccgcggaaaccggaagaccttctaggtaatcgtctatttcttggtaagtgagccccagtgcgacttcatcgggaagcgcaggcctttcgagctctaaatcagcagtgggaactttctcccacgtggaactaggcgccccaaggtgcttcaaaagggctgcaccttggcgtttagtaaggccagctagggggaggagatctgctgcaccatcaccaaatttagtgaaaaagccagtgaggttttccgccgcgtgatcagtaccaataaccaataagttcttttcgccagcgatagcatattgggcgatcatacgctcgcgcgctcgcaaattcccagcattaaaatcaccgaggctaggctgttgaagagcctgcgcagcggcgatgcaggcggcatcggcagccggcttaatattgataataaggcgatgatcaggggagatgatatcgagcgctaactgcgcatcagcttcatctgcctgcaccccataaggcaggcgcaccgcataaaactccgccggacgcgccaaagtcacagctcgctgcgccagcatgcctgccaatgtggaatcttggccgccggaaataccgagcacgaaacctcgcgccttagttttttggagataatccaccaagaattggacgcggcgttgcacctcttcttctggatcgataaagggcctaacacccagcgacgatgcgattttttgggccagggaatccgaatttccgaccatggtattccttccagaaagtgagaaggtgtgttcactatgaactcacgtcgatacgtggccactgtagcgctggtcgctgcctttggtggcctactttttgggtatgacaccggagttatgtccggagccttgctgtacttatcccccgaatttggactaaccccagctcaagagggctgggtaacctcaactctactaataggtgccgccattggagcactcagcggtgcgcgcattgccgacggtattgggcgccgcatgacgctgattttaggcggcctgatatttatcggcggttcgctctggtgcgcctttgccggcggtcctgcacaacttgccacagctcgggcactgttgggggtggcagtaggggcagtaagcattgtggtgcccatgtatatttccgaaaaagtgcccccagcagtacgcggaaaactagtgagcctcaacagcctcatgatcgtaataggacaactagtggcctatttagtcaactcttcgctggcacacactggcagttggcgggccatgttagggctagcagcggtacccggagtaatccttaccgtaggaatgctatttttgcccgatacccccatgtggtacgcccgtcgcggcctaatggataaagctcgtgaagccgccgcaaaagtgggcatgaccctagaagaattaggagtaggggcaaattcactcaacagcaataccaatggcgatcaagccggagtgcgcgaacaactgcgcagactacgctctgtcccgtgggtgcgcagcgccagcatcaccgccatcggagtagggataacccagcaggtcaccggggtaaatgccattgtttatttcgcgccaaccctcatgcatcaagtgggcattcccaccgaaaatgccgtccataccgccatcctcattggtgcagtatcagtagttgcctgctatgtggggctgcggatagtggatcgggtaggcagacgccggctattgctcatcggattggtaggaaatacctgtgccctagttatcttggcagtggcctattcctatgcagaacgctccaccgcaatcgccttcttagccttaggaataatggcgctatttattgccttccagcaagccgcagtatccctcaccacctggctcttgatatctgaactaattccaagccaagtgcgcggggttggcatggggttagctggactagggttatggggtgctaactgggtggtcgctcaattcttcctcccgatggtcagctggctttctgccccgtggacttttatagtattcgcaggctgtggggtaattgccctgattttcgtgctgcgcagagtgcccgaaacctccggacaaactctggatgaagtaggagaagccttcgttattcgctacggtaagtagttagaaagatctccaaatagtttttaagtattcgcagagttttgctctgtgcctactacgtggggtaacatagtccctcgtgtcatgatcgcccgtcaaccagcagttttgctaagacgtgcggcgatcttaaatgaaatgcgtgaacagaaaggagcgcccgatgaaggtccgcaagtcacttcggtcgctgaaaaacaagccgggcgcccaagttgtgcgtcgtcacggcaaggtgttcgtaatcaataaaaaggagccacgcttcaaggctcgtcagggctaagcgcaactgctttttgaaattccggctattccttagttatttagggaagtggccggttttttcatgccttttctattgcggatatcgccgctaatcgggcactatttcggcaaaatgtgcaggcagttaccttcctggtttatggaggaaatgtcacagcgggaacttgggtggcagtggtgctaatttcagcccatatttaggtacggattgcggttctagaaaaattcaggcttcgtgagtggaccacaatgtatagttacccctttcgtagttctcccaggagacccggaagcatagccactatatgtagtggtacttgcggaaattggccacaaagtatagtgttgtagcaagttgtcacggggaagtggcagcatctcaaatccgcttattgagggagcttttaatgtctataaccgtctataccaagcctgcttgtgtgcagtgcaatgccaccaagaaggcactagataaagctggcctcaactatgagctagtggatatctccctcgatgatgaagcccgtgattacgtactggccctgggatacctccaagccccagtagtggaattcgatggggaacactggtccggattccgtccagaccgcatcaactccctagcagccaaaattgctgcttagaacttagcttcaaactagcgcgctgcagttccagctgtagtgcgtaaattatgtaacgggtgccttgtgtgctctttcagctgcaatatcgaagaaaatgggggcagcagtgagggctacagagggcacccgtaggcataatttcataaggcaacaccattagcccaggaaggactagtgagaagaagtgctcattgtgtacttctcttcagccactgagaatactcaccgctttgtgcagaaactaggttttctcagtgcgcgtattccaatccgtaaaactgctccaccgctgatagtagaagaaccctactgtttgatagttcccacttacggtggaggagcctcaatctcacacgaaaatgtgcgcccggtacccgcaccggtaattcgttttctaaataatgaacataatcgctccttgttgcgatgcgtcgtcgctggtgggaacaccaatttcggctcagatttcggcaaagccggagctgagatcgccgcaaaatgtaaagttccctatgtgtatcgcttcgagctgctcggaaccgatgaggatgtagaaacactgcgcgccggcttgctagaaaatgccgccgacctaggtttcgcatccatataatcccgcgccacttcaacttcttaggaaaggcctctaaattatggctccacacggccgctcagtagcagaaccagtgaaaaaagaagaacaactggattaccacgctctaaatgccatgttgaatctttatgatgaaaatggcgaaatccagttcgcgaaagatcgtgaagctgctaaccaatacttcttgcagcacgtcaaccaaaatacggtcttcttccacgacctgcgcgaaaaactagattatttggtaaccaataagtactacgaaccagaagttctagaaaaatacgatttcgaattcatcaaagagctattccaacgcgcatatagctataaattccgcttccgttccttcttaggcgcatataagtactacacctcctacaccctaaaaaccttcgacggacgccgctacctcgaacgcttcgaagatcgcgtatgcatggtggcgctctcgctagccgatggtgaccggaaactagctccgcgcatcgtcgatgaagtaatgaccggccgtttccagccagccaccccgaccttcctaaatgctggtaaagcccaacgcggcgagcccgtttcctgtttcttgctgcgcctagaagacaatatggaatccatcggacgctccataaattccgctctacaactatccaagcgcggcgggggagtagcgctactgctaagtaatctgcgcgaagctggggcgccgattaaacacatccagaatcaatcttccggggtaatccccgtcatgaaattgctagaagattccttctcctatgccaaccagctcggggcacgacaaggtgccggcgcagtatatctgcacgcccaccaccccgatatcatgaatttcctggataccaaacgcgaaaacgcggatgaaaaaatccgcatcaaaaccctttcgcttggggtagtagttcccgatatcaccttcgaacttgcccgcaataaagaacccatgtacctattctcgccctatgatgtcgagcgagtttatggcaagcccttctccgatatctccattagcgagcactaccgcgatatggtcgaagatccccgcatcggcaagaaaaagatcgacccccgggtattcttccaaaccctggcagaaatccaatttgaatccggctacccatatatcgtttatgaagacaccgtaaatgcggcaaaccccattgccgggcgcatcaatatgtcgaatctatgctccgaaattctgcaggtaaattcgccttcagaatataatgcggacctatcatataaacatattggggaagatatttcctgtaacctaggttccctaaatattgccctgaccatggattccccagatttcactggcaccgtggaaaccgccatccgcggacttaccgcagtatctgagcaaacctcaatagactcagtgccctccatccgcgaaggtaacgacggctcccacgccatcgggctaggccaaatgaacctccacggatacctcggccgcgaacacatcaaatacggttccgaagaaggcctagacttcaccaacgcctactttgccgcaatactttatgccgtcctccaagcctccaataagttggccaaagaacgcggccaaaaattccgtggtttcgaagactccgaatatgccgacggcagctattttgatcgctttgaccccgcagaattccttccccgcaccgagaaggtaaaagagatttttgccaactccaccgtagtaattcctaccgcagaacaatgggccaaattacgccaagacgtcatcgaacacggcctatttaaccgcaacctccaggcagtgccacctacgggctcaatttcttatatcaataactccacctcttcgattcaccccattgcctccaaagtggaaatccgcaaagaaggcaaaattggtcgcgtttactacccagccccacatatgaccaatgaaaatttggaatacttcgaagacgcctatgaaattggctatgagaagatcatcgacacctatgccgtcgccacaaagtacgtggaccagggattatctctaacccttttcttcaaagacaccgccaccactcgcgatatcaaccgcgcacaaatctacgcctggcgtaaaaagatcaagacgctctactacattcgcttgcgccaagtagccctagaaggcaccgaagttgaaggctgcgttagctgcatgctctaagcgggcaaacctataaacgcgcaccgtcgaaatattttttgtaaataagtaaggaataaaatatgggcaatctaagtggcgaagagctacgagataagtatttgcatgacccaaaccccatcaaggccatcaactggaatgaaatcccagatgataaagatctcgaagtatgggatcgcctaactggtaatttctggctcccagaaaaaattccagtatcaaatgatatccaaagttgggccaccctcaccgcgcaagaaaaaaccaccaccatgcgcgtatttaccggcctgaccttgctagataccattcaaggcaccgttggcgcagtatccttactacccgatgccaccaccctgcatgaagaggcggtatataccaatattgcctttatggaatcagtgcacgccaaaagctattccaatatcttcatgacgctggcctccaccccagaaatcaacgatgccttcaggtggtcagaagaaaacccgaatttacagcgcaaagccaagatcattttgtcctactacgacggcaatgatcccctaaaacgcaaggtagcctccactttattggagtccttcctcttctattccggcttctatctacccatgtattggtccgcccacgccaaactcaccaataccgccgacgtcattcgcttgattatccgcgatgaagcagtgcacggctactatattggctataaataccagcaagccgtgaaacaagagagcccagagcgccaagaagagctcaaagagtggacttatgatctactactcgaactctatgataatgaaactaagtacactgaagatctttatgatcccgtaggttggactgaagacgtaaagcgtttcttgcgctataacgccaataaggccctaaataacttgggctatgaagcgcttttcccaaccgatgaaacccgggtttccccagctattctttctgcactttctccaaatgccgatgaaaaccacgacttcttctctggttctggttcctcttatgtaattggtaaagcagaggaaaccaccgatgatgactgggacttctaaaccttagaatccagctcagagcttgcataacaacaacagctaaaaacgccctagccaatcctgtgattgcttgctagggcgttttgctcaatctttggggtgatcacatgcgggggtgaaaaatagggccctagcagctgaaatccaacttcttcttc

SEQ ID NO: 3453 - DNA, 17564 bp, synthetic construct
  misc_feature 1..17564: note = Synthetic
  source 1..17564: mol_type = other DNA
tgacgagccgtgtgccatgaaacccccagctttggagctactgcctggcacgcggggtgcatcgacatattttccgccacgatgcgatcttccacgagacggaccacacgatcctttgcatcctggtcaaattttctcggcacgttccagattttcccatctactcaaacggaacaaaacctaggacacttcacacaagcatttagaaactactgctcatcgttaggtgtacgccagtccatgggcgcggttggaacgagtgccgataatgccctggcagaatcatttaacgccaccttaaagcgggaagtactgcgtgataggaaactctttgaaagtccaatcagctgccgccaggaagtctttcggtggtgcatgggctacaacacccgaaggcgccactcctggtgcaatcttgtagctcctgatgtctttgaagccgagacttcagctacactaactaaagcagcatagctacccccgacgtgtccacatttcgggggtcaggcccttatgccgaattcgcccaatcgggctggcaacaaaaaattaaagaacgccctatggcaatcgtcttttgcatcgatcagattccacgagcgttcccggcaattctatgaacgaaaacgcaaagaaggcaaaagactcaacgccgcagcaacctaaagtcaacacacccccagcaagcccacccacgaagttgacaacctatataggaacatcctctcgctctagccgttttcgagcagcccgagcagccgctcgcgcagctcatttttccgctccaccaccgcggagtcttcgctgccgctgcgcgggcggggcaaccccacctcgatgtcctcgatgatggtggcctctggccccggcgacatcaccaagatgcggtccgagagcagcaccgcctcatccacgtcgtgggtgaccatgaccaccgtgcggcggttttcttcccatacgtttagcagcagcgactgcagctggcggcgggtaagcgcatcgagcgcgccgaagggctcatcgagcaaaagaatatccgagccgatggcaaaggcgcgcgccaacccgacgcgctgctgcatgccaccggatagccgcgatgggcggcggtcggccgcatggcctaggctgacctcgtcgaggaagtcctgcgcaatctgggcgcgctctgctttggatagctccgggcgagccgaacgcagcccgaattcgatattcccacgcgccgtcatccacggcaggagcgcgtgattttgaaataccacgccgcggtctggacctgggccggtcacggcctcgcctcgcgcgcgcacctcgccggtagagggaaatgcgaggcccgcgatcatattcagcatggtggatttgcccgaacccgatggccccagcagggatacgaattcgccctccccaatggaaactgaggtatccccaatgatcttggttgggccgtagcttttggtaataccagcaaattcgatatgggcattagtcatagcgcaccactttctgcagggaagcaacgaggtaatccaggaccaatccgatgacaccaataagcacgatgaccacgacgatggcgtcaatatcgaggcggttccacatattccagacaaagaaaccgacgccttggccgccgacgagcatttccgcagccacgatgactaaccaggcggtcgatagcgattgccgcatgccggtgataatccctggcagcgccgccggcccgacgatgtagaggagctgttgcatccggttcgtgccgagcgtggccgccaagttcttatacgtggggtgaatcccgcgaaccgcctcgatggtattaagcagcgtcggccacagggcggagaggatgatgacgaagacggcggtattctcggcatcgcgaagcagtgccaggcctagtggcagccatgccagcggggatacggggcgcaggatctggacaaagggatcggtcgcgcggcggaaggtagccgaggaccccagccaaaagcccagcggaatggctatcaccatggcgatggcaaacccgatgagcacacggcgcagggaggccaccatgtgccaaaagatgcccaccgaggccgacccatcccggtagaagggatcagaaaggatctctacagccctatcccaggtgcgcgcgggagtgggggcgatatctgaaagccagcccgcagctgcgaccgcctgccagacggcgatgaaggcaatgaaaagcgcgatgcccaggcccatcgcctgccacgggttctcccgccgcttcttccggccggcggtgcggccttggtggggcgctgctgtgtgggtgtcagtggtgtgcgctgtgctggtactggtgctggcgctgtgatttttcagtgtggtcataagcgtggggagtccttaacgctggtatccggcggtggggtgcaggggatcgaaggtttggccgttgatctttactgggtccgtagtgagatcggcttcgcgcggcagaacggattttgtgacctctagcagcgcttggtcctccatcgacattgcttttccgcccagatcccagcgggccatttgggcggccatccacgtaattgcggtggcagaggtgctgccgccaaacttgatcatctgtggatctaccaggtctttgccgtcccaggtggtgtaatttccggccagcgcccgcgagatcagctcttccttctggttcaggtacttttccttggccagcatggaggacgattcatggacgtggtgcgggctatcgacgtactgcgcgccttcgtgcagcgccgcgaccacgcggtcgcgcacgtctcggtccacttccttggccacggcaaccgagcagcacgggtggttttcccacatctggcgggtgggaacaaaggcgcggcccgagccggtagtcagggcgcgctggttgaagggctctgggccaataaacccgtcgatggtgcctaccgaaagttgtgccaccatatcggccgggcgcaagaggcgcagttccacatcagagaccggatccaccccgccggccacgaggtaatcgcgcagcaagagcgcatgcaccgaatactcaaaggggatgcctagaaccatgccctttagatcctcaggccgcgacacggtatccaggtgggaggtggacaaggtcagtgcctgcccgttggtgttttgcgtaaaggccaattcggtgggccgggaggcattggtagccccggcatcgatggccagcggcatgggcgagagcatgtgcgccacgtctaaggcgccggtggcgtaggcggtccagagatccgcccaccccgcgaatttgcgcagctcaacgttgaggccctgctttgcgaaggcacccaagccatcggctgcaaccaacggtgacgcgcacgcgatgggcacgaatccgatggtgagggtttccccgccctgcccagattttccggactgggcgttgctttcctgccgcggcgaggagcatgcagatagcatctgcgagcctactgctaccccacccattgccactgcactgcgcagtatctgccgtcgcgacaggtttcggttgtgcaccatatgttctttctcaactagaccaagtggtttgttcagaatgaacctaggctaggtacactatggtgtcaatttctaaattcacaagctaggaaatgcggtgtccttatttttattcatcacagacctgcctttctctacaaaatagacctctcgttctagatttatatttaccttcgagctaccatggcgccatcagtaaataatcgtctgatacaaggagcaatttaatgtctgatctcaccccgaaccacaaagaaggcgacgctctcgagcccattgacggcgagaagctcaacgacctagcacagaagaacatcgacaaccctgagggcgctaagaagcacgtccgctcccacactgaggcagacggtctcttccgcaataacaccaccgtgcgcggccacaccattaaggtgggcgagcctttgccgctgcttggcgatgactccgcacccaaccccaccgaggtcgctcaggctggtcttggtgcctgcatcaacgttggcatccaggccatcgcccagcaccgcggcgttaccctgaccaagctggagctcgacatcgtcggcgacatcgacctctccccaacctggggcgttggtgacttgggcgaggacaagcgcccaggcgtttccgacgtcaacgttaaggtcgacatcgacggcgacgccgaccaggaaaccctgcagaagatcgtggacgacgccatcaagtggtccccggttgttaatacctacacccgcccagccaacctcacccacgagttggtctaaggtttagatagataaaagcgcctggcacgtgccagacgcttttcttatgctttaggagcaactacaggaattgccacgattcccgcaggcgctcgaaccaccactcgcggcggttggccggcgcggctaggtcggacaggcggtccggttctggggcgaggatctcggcgcgcaggtggccgtcgcgtagccggcgcggcgcggtgacatcttcttcgaaaaggctgcccgttgccaggcccgctgcggccggggtgacgtcgatgtcctcatcgtcatagatttgcggcaacgccgccactgccgccaagcccatattgatgccaatagaagtatccagcgccgaggccaccgtaatatccatgtgccgttcgcgcaggtgctgtgccacctcgaggacgcggcgcaccccgcccagcggcgcgggtttgaccaccgctacatcggccgcctgcagatccgccacgcggtacggatcctcgaccttgcgaatggattcatccgcggccacgcgcacaaaaagcccgttgcgcatgagctgcctgcgcacttccaccagttcttccgcgctggcgcagggttgttccatatagtccagcggcatgagcgcctgggcagcctctaccgcttcggccacactccagccgccattggcatccacgcgcagcaccgggataacgccgcgggcgctcacgtgttcgcggacggcgtggacgcgcgcgatgtcatcggcaagcgtttggcccttctccgccactttgatcttgaacgtccggcagcctggatatcgatccacaatcgccgggacctcgctggcgggaacggcgggaatggtggcattgacctctacccattcgcggacaggcttaggaaaaccctcgtaagcggcttccaacccggcgcgcagccaggcagccgattccgcgggcccgtattccaggaacggcgcaaattcaccccaaccggcaggcccatcaatgagcagcgcctcccgcgtggtgatgccgcgaaactccacggccagcgggagggagactacgtgggcgcggtcgagaacgtcatctatgttcatagagccatactatccggcattatttacccctacctaagttgggatggccacagttgctcatcggagccactcagcagggttaatatttacccccaataggtggatatattctgcctgatctacaaatgttccggataataagttatattcttatatgagaactgaacctcagtaagcgtcggctcgtttccggcgttgaatgctccagccgaaccttcgggttcggcttttcttatatctgaaaggactttcctcgtgtccctctcctaccgcgttggcatcgatgttggcacctattctctgggatgcaccgccattgaagtagatgataatgaccagccagtcaatatcctgagctcggtatcgcttattcacgattctggactagatccagaccagcaaaagcgggcggtaacgaggcttgcttcttctggcgtagctcgacgaactcgtcgcctttatcgtcgccgtcgtcgccgcatgataaatctggaaaagtttctcacctcccaaggatgggaaactcgcccctttgagcattactccgatccctatctcccctggaacgcacgcgttgcgttggtcaatggatatatctccgacgatgcccaacgaggaatgtacctctccatcgctttccgccatatagccaaccaccgtggctggcggaatccgtactggaaagtatcgagcttgtactctcccgacaaaccgagcgatgcctttgaacagatccgcaaagaactcgaggagtccactggccacaagattccggaaaccgttaccgttggccagctaatttcctttgcgcagtttggcaaggacaggctgcgcggtggcgggaagaaaaaggatgaaaagaaaccacaggagcaggttaaccaagcagtaatctcggctcgtcttcatcagattgatcacgctcgtgaaatcaacgaaatctgccgagtgcagaaaattgatgacgccctccgaaagcagattttggatcttgttttcgccgcagaatctcccaagggcgcacaaattgggcgcgtaggaaaagacccgctgcaaccaaagctaccccgtgctctaaaagcttcggacgcttttcagcaataccgaatcgtcgctttggctggaaacctgcgtatctaccgcgacggtgtttctactcctctcgaccgagacgaaaaactcatcgtctttaactacctgatcaacctctcgcataaagaggagccgtcgtggctcaaagttgccgaggtcttaaacatcgacagaggccagctccacggcactgccacgatgaccgatgatggtgaacgcgccggagctgcacccccggtgcacgataccaacagaactatcctggggtgcaagataaaacccctcgtgcactggtgggaaggcgccaacgacgatgagcgtgctgcgatgctgaaggccctatccaactccgaggtggaagacttcgactccccagccggagcacaaactcaagcattcttcgccaatttagatgaatctgaacaagagaaactagattcccttcacctcccaattgggcgtgctgcctacagcgaagacaccttgatgcgtctgactagccgaatgctcgacgaaaatttggatctttatgaagcccgcctagctgagtttgatatccccaaagactgggcacctcccgcgcctcgaattggtgaacccgttggcaatccagccgtagaccgtgtccttaaaggagtggcacggtggttagaagctgcagcagatgaacggggcgctcccaaatctgtggtgatcgagcacgttcgcgatggcttcattagcaaatccaaagccaatgaaattgaccgagctaacaacgcccgccacaagcggaaccgagagctcttcaagcaaatgcaggaaaacctaggaatcgacggaaaactgcgcagttcggatttgtggcgctaccaatccgtgcaaagacagaactgccaatgcgcgtactgcggttctcctattacctacacaacctgcgagatggaccatattgttccgcgtgcgggcgaaggctctacaaataccagggacaacttggttgccacctgtcatcgctgcaacttggcaaaaagaacattccttttgctgtgtgggctgcgcaaaccaatattccaggcgtcagcgtcaaagaggcacttgataggacacgacactggtcagaagactccggaatgacttcaaaagacttcaagaaattccgcaagaacgtctgcgaccggttaaaacgcaccgttgtcgatgaacctttagatgctcgttccatggaatcagtagcgtggatggcaaatgagctgcgcggccgagtggcgcaacggttccaggaagaaaatactgtggtcaacgtctaccgtggtgagcttactgcagaagcgcgccgagctgcaggtatctccgacaagctacggtttattgacggaactggaaagtcccgactcgaccgacgtcaccatgcagtcgatgcggcagtcgttgcgtttacccaaaactatgtcgcggaaactctagccattcgttccaataaaaagcgtgaagctcagcttctacaggctgccgaacaatggaaagaattcaccggatccgatgcagagcaccgcgctgcgtggaatgcttggcttcccaaaatgcaaaaactggctgtcctgctgcaaaaggcactggatgaagatcgcatcgccgtcacctccaacttgcgtttacgcctaggaaatgggcgtgcacacgaagatagcattggcgaattgaagaccatccgagtcggcgacgccatctccgtcaccgatatcgaccgtgcctctagtgaagctttgtggtgtgcgcttacccgagaaccggacttcgatgaaaataacggacttccagaaaacccagatcgacggatccgcattcacggtacttggtatgacgcagaagatgacattgaagtcttccctgtaggtgcgggagccatcaaggttcgtggcggctatgccgagctgagccgcttccaccatgcacgcatttacaagattcccggtaagaaagcgccggtttactgcatgcttcgcgtctataacgccgatctcattcgacaccgtcacgaagacctgttttctgttgaaatcaagccgcaaaccatgtctgtccgacaagcagaaccaaagctgcgaaaggcactggcagaaaatacagcagagtacctaggttggctcgtcaccgatgacgagctggtcattgatacgtctaacttcaataccggccaaatcgcggagatgcaaagcgagctcggtcaagtccgacgttggcggttggacggattttactccccatccacgttaaggctccgaccactccaaatgagcgcagaaggtctgcgtgaagatacttcgataggtgctaagaagattattgaccgaccaggttggctgcctgctataaataagctctttggtgagggacacgttacggtggtaaggcgtgatgctttgggcagagcaaggctcaccagcaatgcgcaccttccaatctcgtggaaggcggagtaagaaaatgaatgctggatggcgagtaatagactgtctaaatcttcacggttcacttcgatattctcggggccaactcgtcatcagcaaggtcgatgccgacgatgtcgctatacccctatcccaaattgcagtagttctgatcggatccaagagctcaatcagtggtgccgtgcttcagaagtttggtgactatgacatcgcattattagtttgcgattggcggggcgttccagtgtctggggcctacccatggaatcagcactcacggttgggtgcacgacagcaagcacaagcgcagctctctgttcctaaaaagaaacaggcctggactcggatagtcgctgccaaaatccacggtcaggcgtccgtattgaaagctctacaaaagaacggtgccaatgaactggttaaactatctcgcactgtaaagtccggggatcccgagaatcgggaggctcaagcagcccgaaaatactggtcctgcttatcgcatgaccaagcattctcgcgcttacccggtgccggcgatcctggttggaattccgcattggattacggctacacgcttttgcgtggctatgggattcgtgccatcgccggtgctggactctctggaacactcggtgtgtttcatcatggccgtggaaataactgggctcttgtggacgatctcatggaacccttccgccccatggtggaccagatcgtattcacaaccatcaactatggagatgaattagctgcttctcaaaagacagcaatttccactgctctaacttgggccttcgaagctgatggaaaatcattaagcaccgtttttaatgaatttggccagcactatggcctgtatgtcgagggagcagttcgtgatctaagcgtaccccgttgggaaggaatcctcgatgccagcgaaggatagtgaaccaatgtggtgtgtggtgatgttcgatctgcctgttaaatctaagaaacaaactagtgaagcgaacaaattccgaaaccatctcttagatctcggattctgcaggtctcaactaagcgtttatgtccagtacttcccactgtcttctagaatcgcttcgaccgtcaaacaaataaagacagctctcccagaaggtggcgacatcaggataatttccgtcactgataatcagtgggcaaaagccatcagattttctaaggcagagcccgctggagtagaggaaaaaccgtcccaactcgtaattttttgaagcaggatcaccaataaactccagttaaacggccttttttgggccgcactgaagtctatcaggggtaatgagaactgaaccccagccatcagttcaccttcaagcaggcatccggaagtctatcaggggtaatgagaactgaaccccagcctcacgatgagcgcgtttacggcggcgagaagtctatcaggggtaatgagaactgaaccccagcccgtatctggttactacgtgctatcggtgaagtctatcaggggtaatgagaactgaaccccagcaccgcggcgcacgggtggaaaacctctagaagtctatcaggggtaatgagaactgaaccccagccagaggtagacggttgttactcccatgcgaagtctatcaggggtaatgagaactgaaccccagcgttcgcgtgctctggggtgttatcattggaagtctatcaggggtaatgagaactgaaccccagcccctcatgcatcgcccggccgccccggtgaagtctatcaggggtaatgagaactgaaccccagcgtgggcagtgtctttcattatctctggcgaagtctatcaggggtaatgagaactgaaccccagcatcaacgattggtctaccccggtggtgggaagtctatcaggggtaatgagaactgaaccccagctactcggaatgctcggcttctgcgaggtgaagtctatcaggggtaatgagaactgaaccccagcaagatgggcggcgagttctctgacctgggaagtctatcaggggtaatgagaactgaaccccagcacacgttctgtgggcatagggtgagctcgaagtctatcaggggtaatgagaactgaaccccagctgcttagtcaactcgaagatttcctccggaagtctatcaggggtaatgagaactgaaccccagcccttcgatgaagttgaggtagctattccgaagtctatcaggggtaatgagaactgaaccccagcgctggtagtctgcgccgtcccacatttgggaagtctatcaggggtaatgagaactgaaccccagcggtctcacaatcagaacacgatgaacgagaagtctatcaggggtaatgagaactgaaccccagctggggtgatgggcgtcgtgagcgtgtgggaagtctatcaggggtaatgagaactgaaccccagcgtaggcggtgattgcctcccgggtgaatgaagtctatcaggggtaatgagaactgaaccccagcttaggtacggcctcaccggctaggcgtggaagtctatcaggggtaatgagaactgaaccccagctgtttgcggcctcttccaggggctttccgaagtctatcaggggtaatgagaactgaaccccagtcacctccctcctgctacctccggttcgcgaagtctatcaggggtaatgagaactaagctctgactgggagagccacaagcgatacgttcacagcttcacttttgtgtctcagccccattgaccccagcccccacccagactacgttggttcctacctaccctgaaggaggaaccatgttactggcagaggcattagcagagcgcgcgcaggcgcaggagcggctcaatgagctgcgcgagcgcctgctctccgtcgtccgcgtgcaggagggcgataccccggacgaggatccggccgagcttttgcgcgagttggagggcgttaccgggcgcatcgataagctcgtgcaggccatcaatgccacgaacgtcgccaccgattttgatggcgagaagaacctgatgcaggcacttgcgcttcgcgatggcctcgtgcgcacccgccgcatctaccacgacctcgcccaggccgcgggcgcgcgccaggatcgctactcccgcgcagagattaagtttgtggccacgctgccggtagcagagctgcgcaagcgggttgatgacctgtccaagcggtaccgggagcttgatacccgcatccagcagttgaactggaatacggaactgataactccatagcgaagctttagtcatgccacgccgcgcgcgtggcggtagcctttatgcacttgcagcgagtatgcccccgccttcgaggggaaattcgaggacatctaggcaccctttggcgttaaagggttgaggaagttcgagtcttcctacagtattgatgaccgcgccggcatagggtacacgggtacattgcgggataaccccccgcagttattgagtatcgattattaccagcatgctgggcagtgcgtagaggtgagggttgggaatggggactaaacttattcgcgcccactatgctgggcgctatgagcgagcagaagaaatacagcaccgaaaatccgttccgtgaggaattgtggcgtccagttgagggctttggggatctcacggacgtcacctaccaccggctggcggcggacggccggaagaatggcatcgtgcgcatcgccatcgacaggcccgaggtgcgcaatgccttccggccgcacaccgtggatgagctgtaccgcaccttggatcacgcccgccgcaccccggatgtgggcacgatcttgcttaccggcaatgggccctcgcaaaaagatggcggctgggcgttttgttccggcggcgaccagcgcattcgtggacgctcggggtatcgctacgccaccgagcatgcccacgatgatgcgacggcggatgaatccagcgtcgatgaggcccgcgccaaggtcgaaggcggtcgcctgcacatcctggaggtccagcgccttatccgcaccatgcccaaggtggttatcgccgtggtcaatgggtgggccgccggcggcgggcactcgctgcacgtggtctgcgatatgaccgtggcctcccgccaggaggcgcgctttaagcagacggatgcggacgtcggatccttcgatgcgggctatggctcggcctacctggccaagatggtgggccagaaatttgcccgcgagatcttctttttgggccgcacctacgatgcccagcgcatgtatgagatgggcgcggtcaatgaggtggcagaccacggcgagctcgaggacgccgccatccgcatgggccaggaaatcaatatgaagtcccccactgcccagcgcatgctgaaattcgcgttcaatctcaccgatgatggcctgatgggccagcaggtcttcgccggcgaggccacccgcctggcctatatgaccgacgaggccgtcgagggcaagcagtccttcctggacaagcgcgagcctaactgggacgaattcccttactactactaaggagtaccccgcaccgtgctcatcgcattttgtatcctgctcgcggtcctcgccgtcgcgggcgttctcggctcccgcgtgtggatgctgcgccgcattaaagaggccgaggccaataacgagcggccctttgatcaggaggacacgtaccgctgattcctgcatcgactcaccccggccgcaaccggggtttgtcccgctgtggccttaagatctagtaccgtgactatcctcgcccccttgcccgtcgacccgcacgatcccgcggccatcctgccggacctcgaatccgccattgccggtaggtcctgctttttgccgctgccgcttgccgatgccacccgcgccaccctcctgcgcaattcccagcgcgccggcgagcccatcgcagaggacatcgcgctcgtggtctccacctccgggtccaccggcaccccaaagggcgcgcaattaacgccagccaacctggtggccagcgccgatgccacccaccaggtcctcggtggccctgggcaatggctcttggcgatgcccgcccaccacatcgccggcatccaggtcctcgtccgttccctggtggccggggtggatccgctctgcctcgatctcagcgcgggctttgatatctctgccttcgcccgcgccgccgcggagctctcccgcaccggcgaccgcacctacaccgcgctgaccccgctgcagctggccaaggccatggatacaccggaaggtatcgatacgctccagagtttcgatgccatcttggtgggcggtgccgccatccacccgcgcctgcacgccgcggccacggaccggggcatcactatcacgaccacctacggttcctccgaaaccgccggcggctgcgtctacgatggccgccccctgcctgggacgaccgcccgcgtccaggatggccgaatcttgctcggcgggcccaccatcgcgcagggctaccgcaatgccccaagccacgaggcgtttcctgcaaacgggtggtttgccacttccgatgccggcgtcatcaaagacggcatcctcaccgtcaccgggcgcctcgataatgtcatcgactccggcgggttgaaactgcacccagaggtcttggagcgcgagatcctccgggtgccgggtgttgccgaggcgtgcgtcgtcggcatcccgcacccgcggctgggccaagccatcgtggccgcctataccggtaatgccgagcttggcgatatcttcgaggccctcgaagacgccgaactcccccgctggcagctgcctaaggacttaaagcgcctcgcggaatttcccaccaccggtcctggcaaggtcgaccgccaggccgtcgccgccctctttaacgcatagccccaccgcaggccccagcttcctgattgctttacgcccactacgcagtggcacaatggtggctatgacttcatcagccggtaattattccgcgaccgccaaggattggatcaatggtgctcgcccacatacgtgggccaatgccttcgcacccgttgtcgcaggtacgggcgcggccttcggcattaatagcgggcatatcggccgcgcggtgctcgcgctcatcgtggcgtgggcgcttatcatcggcgtgaactatgccaacgactattccgatggcatccgcggtaccgatgatgaccgcaccggcccgcaacggctgaccggcagcgggcttgcacaaccgcgccacgtgaaatacgccgcgttcgggtgctttgccgtcgctggcttggccggaatcgtcctgtcgctggcggctggtgcctggtggctcatcctcataggcgcgctgtgcatcgctggtgcgtggttttataccggcggcaagaacccctacggctaccgcggcctgggcgaggtcgccgtctttatattcttcggcctcgtcgccgtgctcggcaccgaatttacccaagccggccgcatttcctggacgggcctggccctggccatcggcatcggcgccatgagctccggggtaaacctggtcaataatatccgcgatattccctccgatgccgaggccggcaagatcaccctcgcggtacggctgggcaataagaacgcccgcctgctgtttaccggcctgctgctcctgcccttcgtgcttaccatcgcggtcgccttcggcagctggctcgcgctcgctggcctggtctacttcccgtttgcactacgtgcggtgcgcaccgtcaatcgcggcgccaccggagccgagctcatccccgtgctggggctgaccgggcgcgccatgctcatctgggcagtcatcgaggccatcgccgtcgccctggtctagtccgtgcctaggcttgcgcgcctaggcctctgcgcggccttccaattcggcctgcacccactgcttatgcgccttgcgctgcgcggagtattccgccagcgtctgtgtggcctcgatgcgccagtttttaaaaatcagcatcgatagcggcagggcaacaaagagcgccaggagcgctgccacgaggacgggaatggggaacttaatcgctaccgccagcagctcgatgaccgcggtgagcgcgataaaaagcaccacgcgcgcgagcccgtatttccatagcgccttgcgggagcgacggcgcagttcggggtccggcttcggtggctcagggttgtgcgtcatgggggtcgattgtacgccgtacaggtagaataatctgcatgggtcgactaatcctcctactgctttttgtcctcgccgcctacctggtgtggaaggccttcgggccatcatcctggaagtcccgccaggttgaagaacaaccgcgttccatcaagggccccgatgatgacgaggagttcctgtggaacctggaaaaggagcgcttcaagcagcgccgcaagcaggaggccgaggaagaaaaacgccgccagcgccgcactcgcgacgccgacggcaataacgggtcaaagggcccgaacgacagccaggattaatcctttggcacgaaacgcatctctaagcccagcgcttctgccacggcggtaaccttttcccagcgcacgcctgccccaccgtgttcgatggtgtggagggtggagcgggaaacctgggcggcatcggcaagctgctgctggacgatgcccaactcacgccgccgctgcgcaatctgcgcgcccaagcccaagatgagctcattatcgccggccggcttcccctgtttattgcgtgggctatggttggtggccatttagttcagccccgcataggagtgtaggccggagaccaccatattgatgaagaagaggttgaagatcatcacggccgtagccaaaatgttgatccacggcgcggccttgcggaaggccggggtcgcacgcgcgtgcaggtaggccgcatagagaatccaggtggcaaaggacacggtttccttcgggtcccaaccccaagggcggccccatgcagattcggcccagatggcgcccaagatgatgcccaggcccaaggtaggcagggtgataacgcccaagcgatacgccaggcggtcaatcttcgccgcggacggcaacgggtaagccagcgcgccaaagaatccgcgctccgcgtcctttggctgccacaggcgcagtaggctcaagagcgaggcgatgccggacacgatgccgatggacgcgcccaatgacaccaccgtgacgtggatgggcagccagtgcgactgcagcgccggcaccaccggtgcggaatctgcatagagcttggtggaaccgtaaaacatcagcgccagcaccggggtaaggatccatggccagaccgtgcgccattccttgcgctgcatggcgatattgcccaccagcagcacgccgaagcacaccatcagcacgtattcgtagaggttgccaaatgggaaacggcccgtggccagcccgcgcaggacgattgccgcggcgtgcaaagcaatgccaacccacatcagcgaggtggtcatcccgccgagcttatccagcttgcgttccttctccgcgactttgtcctcgctcgaggtggcggccgcagatgacgcctcagcctcgtaatcggtgctggcagctgctgcgcccgtgccagtggcggcgtcagag

SEQ ID NO: 3454 - DNA, 15334 bp, synthetic construct
  misc_feature 1..15334: note = Synthetic
  source 1..15334: mol_type = other DNA
cgggcacgtgattgaatattcggtgaaagagaagactatccccgcctatgagtcccaaatcagcggcaccacgaagtacggcttcctcgtcaccaatacatacaaacccacgcctccgcctaccccgacaacggttcctacgcccgtccccactccttcctctgtcgagcctcctgtaccaggtgggggactgtctcaaactggcctcgatcttttcccgggaatggttgctgtattagcattgctgactggcgggctattactggttggtggccgccaaaagcaacagtaggagcctcctcgtaaaactagcttcagctcctgagctatttagtggaggcaacgtactgtgttacagcgttatttagctgggcggtagcaaccagaatctcttctgctttcgcctcaatggcacgttgcttctccgctagagcgctagcttccgtgtgagaactacagtctgctttggcctcaggcacaggattctcatccaccaaggcttgtagcttggctagtagtttttcaccggaaacgccctcggcctcagctgttgcgaaaccctcaacagcaggattggcagccgtgtcagtggcagctttaatctcagctacagcatcatttcgccgattaatgagctctgaaacagctcccgtgtagcttgcggtggcgctctggcaggcttggaccgtgttctgatagtagatgaagactcctccaccagccacaacgatggccaccactacggcaagcactagagcaatagctttcgagtcgctgccagatttagaaaaatcagtgcgggcgttcatgctgggttccttcctgtcagatgcagaaatatgattggctctattgtagctgtcccagttctgaaaaatacgggatttcgctgattgcccattgtttttagagaaagttcttgcggagctctggtaactagggcgtcgggtcgataaactcttctcatggataactcacccttttcaagcccggcgctgcaaacagttgaagaacggccgaggattcggtttattctcagtaagggtgcggggaagggaaacgcgcataagctggccaaggaaatcctggcgcagtatccgtccgctaaacatactgagctgggacaggccggcatctatcctagtgacgttgagatctctttgaccagaggccccgatcatgtcagccaactagccaccgaatgggcgcagatgtggggaagtcagggcgtctgctatgtggcaggtggtgacggctccgttaatgaggtagcgaacgcgctggccggcacggactgtgctttcggggttattcccgcgggcacgggcaatgattttgcccgcaatctttacggtgaagataccggttatcgtggctctatagaattggtggcagcaactaagcatgcccagttcgggcccatagatctgctgcaggtcaatgacgagtactgcgtgaacgtgttctcgttgggctacgacacggaggtgttacggaaagctatggccttgcagaggcgtttccggtcgcttggctcatccgcgtacaaggctgccgtgttgcgcaccattttctaccagaaagcgattgacctggacttcgaatatcaagaacctgattcgcctgcacgtagtatggagcatacctgcactgtttttgtggtcgggaatgggcgcatgtacggtggcggctatcgtccgctgcccgccgcgatgctagatgatgggcaggccgatttgctatattcggatgatttgaatcttttggggattggccggctattggccagttaccgccgaggcacgcaccagtccagtcccaaagttcacatgacgagggtgggctcagtgagtgttcgtcggtcagatgggcagccgttgctgtggaatattgacgggatcgtatttgaaagcgatactgtgcagattaagaatatcccgcgagcagtcaatctggcccggttaagccttgtctccgaataatggcttgcgcctctgtgctgtagcagcggtgatcacttggggttgggtatgacttttggccaaaattttgtcggaattggcttttttatggcgtaaagtcataccgaagttggtgtttgggtgggatttttgcggttgggtatgacttttcgccagaattgcccgggtggtggtaaaagattaatccccctcgcctttagagcaacgcgaccattcgcttcagcgctatctactccgttattggcagtagcatctggggtcaagatgcccgccggcttatttggtctgaaacccaactaagcagtcccaagaggcactggtcgatagtgcctttgaaaagaaaataggaatcgcttggctttgcgttgagctactttgagctgcgcaacagtagtccaacacccgaacccatagttccagctatggcaacaaataggcagtaaatcagtgcgctttcgttgtagaaaatgaaaacagaaggcaaaagcagaagtgggggagctatgacccaccaccagccgaagcctttcactattccgtcccatagggagatagcaaaagtgaaagccggatgccccagtaacagaatcataatcgtccacgatgagacgaggtagatatcttgggtgaagtaatcaatcagggaaggcaaaagcggggcaagcaggtaaaaggagaaaaccagaactagacgaaccacgctgtccctagttggagtcttcatttggatatccttccgtgagttttccaattacctctgattctagcaaaatccggtttccgtttgtcctttttcgcactaaaatgcgaccgtatcgggcaagctttagttggagtgattctgggtagtgtcagaaacttttgccatagctacctatgggctttgcaaaggtttctaaagctggcgcaaaaaccgtcaagatgtctgacaaaaccgcataataacaatatgaaaacgtttgcgtaaaagctggtcagaacggatttggggtgataggctgaaccctaacgaaaacgttttcgtaaacgttttgactcatcgtagtgtcaaatcgttagccacaactaaactcatcgttttgttagctgaaaagcagcttgcagaactgagaatagtccaagggaggacaaatatgtcaatgaagaagttcatggcggtaaccgcgattgccgctctgtctgtcgccggcctaagtgcctgctctagctctgattccggttccggtaatgaaaaaggctcagtctacttcctgaactggaagcccgaagcggagacagcctatcaagctatcgctaaggaatacaaagaaaagacaggtattgaagttaaggttgcaaccgctgcttccggtaactatgagcagaccctgaagactgaaatcacgaagtctgacgctcccaccatgttccaggtgaacggcccggtcggcctagaatcttggcacaagtacactcttgacattactgactctgagattgctaagaacctgaaggatgacggtctagctctgaagggtgaagatggcaagatttacggcgttcccgttgccattgaaggctacggcatcatttacaacgaagaaatcatggataaatacttcgccatgccgggtgccaaggctaagtccatggatgaaatcaaggacttcgctaagctgaaagaagttgttgaggacatgcaggctcacaaggctgaccttggcattgacggtgtcttcgcagccacctcactggcgtccggtgaggattggcgctggcagactcacttggctaacatccccatgtactacgagtacatggctgacggtgtgaccgacaccaaggaagctaagttcactttcgctaacgagttcaagaacatcttcgacctgtacttggataactccactgttgacaaggctgttaccccgtccaagactgtgtctgactctatggctgagtttgcgctgggcaaggccgccatggttcagaacggtaactgggcatggggtcagatcaacgaacaagctggcaacactgttaaggaagacaagattaagttccttcccatttacaccggtcaccagggtgaagagaagcagggtctagcagttggcaccgaagctttcctagctgtgaacgctaaggcttccgaagctgaccagaaggccaccatggatttcatcaactggctgttcacctctgatgagggcaagaagcatgtcgttgacgacctcggcttcaacgctcctttcaagtccttcagcgaggctgaggttcctaacgatcctttggctaaagaaatcgctaagtacacctctaacactgagttgaaggctgtgccgtgggtattcaccaccttcccgtcacagaagtttaaggaagatttcggtcagtccctggctcagtacgcatccggcaacagcgcttgggaagattctgtaaagatcttcgttgagggctggaaagctgaaaagaagtagttagacgtcttctgtgggaggggccatgattaaggctcctcccacagtgtctctctagggcataacatgaaatcactgaaacattactttccgatttttgcgcttccgacactgatcgcgttcgcaattgcgttcttcgtgccattcattctgggtttcggtttgtctttcacggacttcaccactttgactgacttcgagttcgtgggcctccagaactatgtggatgtcttcgctgagcgctctggcttcacggcagctttcggttttaccgtgctggtagctattgtctcgattattactgtcaacgtttttgcttttgggattgcctggttgctgacccgtaagttgaagggcacgaacttttttaggaccgttttcttcatgccgaacctgattggcggcatcgtgctgggctacacctggcaggtcctgattaactctattttgacgaaatataatacgaccattatttctgactggaagtacggctattggggtttgattattgttctgaactggcagctgattggctacatgatgatcatttacattgctggcctgcagaacgtaccgaaggaactaatcgagtccgctgaacttgatggtgctggccgctggggcgtgctccgcaatgtcactatcccgatggtgatgcccgctatcactatctgcctgttcttgactttggccaatactttcaagatgtttgaccagaacttggcgttgactaatggtgccccgcaagatcaaaccgagatggtggctcttaacattgtgaactctatgtttgccagtgtgggtgacgagggcgtggctcaggctaaagccgttatcttcgtagtggtggtcgtggtgttggctatggctcagctgcgggaaacccgtaagcgggaggtggaagcataatgcacagcaagattggtaaggtccttagctacattgtgctggtctttttgactctagtgttcattgggccgcttctgttcattctctctaactcttttaaagctaagtttgagatttccggtgacccgttctccgttccgatgggtgattcttttgtcggcttggaaaactatgtttccggtttggctttgtccggctcattttcagctattttctggtcattcgtgatcacgatctgttcggttgcggggattgttttcttttcctctatgaccgcctactatctggcccgggtgaagacctggtggacttcagcactgtactttatttttgttttctctatggtgattccgttccagatggtcatgttcccgacggttaagattgcggactccctcggcctcgcgaatcctgccggcatggttgtgctgtacttgggtttcggttctggcctgtctgtcttcatgttcgttggtttcattaaggcgatcccgttggagattgaggaagccgcttcgattgatggctgcaaccctttgcagacgtatttcaggattgtgcttccaatgctgaagccgacggtgattacggtcgcgattttgaactccatgtgggtttggaatgactacctgttgccttatctggtgctggggccgtccagcaagtaccgcacgatcccaattgtggtgcagttcttggttggttcgaacggtaaccgagatatgggcgcactgatggctatgctggtgctagctattgtgccgatcgtgattttctacattgcagcccagaagtacattattgaaggtgtagctgctggcgctgtgaagggctaatcctttatcattgggtgcggggctggatattctgtctagtcccgtaccgtgtctttagataggttttatcatggcggctacgattcgcgacattgcgagcgcatgcaacgtgagtctttctacggtttcgcgtgctttaaatgagcaagctggggtgtctgaggagactcgcgtactggtgcaggagaccgccgcgaggctagggtatttgccgaatgttgcggcgcagcgtttgcgccggaggggttcggatctgattgggatttttattaagggcccaatgaacccgtttttccaggagctgttggagcgttttgagcatcgtttgcgggcggaaggtttcgttgtttcgattgtccgtatctggcataacgaggatgaggtcgctatcacgcaggcgactttagcttcgactcgttacgcgggcgccatcatgctgggcggctggttcaatgtgggtgccgagggtttggcgcaggttagtgtgccaacggttttctgtactacttatagtgtcgccggggcggatcttgataagtattcgactgtggtgattgatgaccggcaggcgatgcgggatttggtgactcatttgcgtggtctggggcatgagcggatcgcttatctgggctgcgatgatgatgatttgtcggttggttctttccgtgagtctgctttccaggaggctttgcaggcttctggcgtcccgttggtgcaggatttgtgtgcgggggagcgttttgaggaggacccgtattctttctcttatggttaccgtttcgcgcagaagctggcttcacatgcgccgaccgcggtggtcgcagtttctgacgtggtggctttgggcgcggtgcgggggctcactgatttgggtttgcgggttcccgaggatgtttcggtcgccggtattgatggtattttggtgactgagtttacggtcccgcgtcttacgacggtggtgcagccggctgaggagctggtgtcggaaacctgggatctgttgcgttctttgatgagcggcggggagcatcggcatgtgattgtgccgggtgttttgagtgcgcgtgagtcgactgggccggtggctagctgatgcgttttggccctgattctaagttttttcaggctttcgatgcggccgccgatttggtgattgtgaatgtgctgctgattgtttcttctttgccgttggtgactgttggggctgctggccgggccgcgcatttggctttgcgtgctttggcgcaggcccgcggtgacgcgcctgtgtggcggattttcttccgtgagggccggcgcggctggcggatgtctgcggcttggggtgtcctgacggtgctggtagccggggttgctttggtggagtggctgtggctggcggttttgcctgcgggcacgctggtgacagtgttgcgggccggtattgtggcgggctgctttgtgtttgtggttttgtcgttgtggtttatgtctttgcaggctgacggtggtcggggttttacggcttcggtgtctggggcggcctggttgtcgatgcgttttggctggcagtcgctggtgtgtggttttgttgctttggcgccgtttttactgttggctttggtgccgtcgcagtgggtggcggtgctgttctattacggtttggtgggttttgctttgccgatttatttgcttgaggtgttccggccggcccagttggagggctagttgtttttggggttagctgaggttttgctgtcttggttttccacaggattcgggttttgcttgtttttgccgttttcttttaggtagggttagggcagttgctctcctattgtttggcggtgtttgttttggctcggttgcggttagttgcgtttgtggctttggctggcctggttttggctggttgttctcatgttggtgtcgagggtgtggggtcgcctgagccttcgggtgagccgacggtcgagatgaagattgtggatgctgatggggatgggtatttggattggcctgatggggtgattggccgtggctatgtgattccttcgcagccggtgggtgctccgccgttgccgcagtgggtgaaggatttcaaccctgagatgccggccctggcgcgagagcccagtgaggaaggagctaaagccttcgcagaatacgtattcgcctccgacttctacgaattcaacaccggcaccactttgatcgctcgtagcctagtggataaaacttatgaagataggcttaaacagcttgacgagactgatgggcttataggcaatggtaaatggggtcgcattgatgagctgaagatgatcggcacatcagtggaactggaaggagaccagaaatattttattcgggtgaagtacgctatctcgcctccctacccgaactcaaaagacctctcatcattgggtctaattgagcatgaaggtggagtgatgctggtattcgatcgcgaccacgggtggaaagtacacgagcttgcctacgcgaatggcacttttaaccagtacctcgaggacaaatgatgtttttgagattgctcaatcgtcctcgcgcccaactagtgccgaaccgaataagtctgtctattgttgcgttagttttatccttgtgccttgctccctgtagcatttcgcatgcagatgatgaaaatagggaaacacgacactctcgttttagttcagttgtgactaacgatgtggctgtagtttctgcggagaagtattttgatgcaggtaatgctgagacagcttcagagcggaagaaaagtaatactcgcaggcccaaatctaggtcgaagcgagttagttccccggttgtacgttttacaaagtttgagttgtgtattaacaaggtgatggctggtcgcggttacgattatttggatcggatttctgcggggcttaaacgtaatcggtttggtgttccttctgtgtctgctcagttaagtactttgtcggcttcggagagggctgcttacgatgattgtttgaagggctatgagaagcctctaaaagcgaataaagccaacaaagctaaagctataccttctgtggtggcgatgttgaaagagagtaaagagtttgtcgtcccgaaagctgggatgcggattcagccggaggggcgacatattccttctaagccggcgattatctctacggataaagacaggcaagagtttgactttgtgttgggcgggcaaaatgttcatttgcggtttgtggctcaacggtatgaggctgatctcggtgatggtggccctgttctttctcaagcgggcaagccggtcccatatccggaagcgctaaagggcagcttctaccgtaactttgttaaggagggttcttttgttgtcacgttgcggacttattggcaggtggagtggtttaaccctgccactgggcagtgggtggtagaggctgagctgatggttagtgaggagaagagccagccgcaactggtgaagccttataactatgtgctcactgatgatgctgagcaagagcacggccgataagagctcaattttgggttgacattctgaatcgagattcataaactggtcgtgtactaaaactcagtaagagccagctcgttactggctttcgaatgctccaggctacggcctctttaaaaccggcatcttcggatgtcggtttttattttgcggattttccacaactagtttcgttcaaccactctaaattgtcccgcgggtgtcgtaaaatgagcacaactatttgttttcttcaaaggtgtggttaacgtgacacgatatgtagtcggtattgatgtgggttcctactctgtaggcatggctgctgttgagcttgacgataatggatacccgattgagattctgaatgcggtttcgcatattcatgactctggtgttgatccgaatcatcaaaaacgtgcggagacacggctcgcagtttctggtgtggccagacgaaccagacgaatgtttaggcgtcgccgtgcacgcttgcagaaactcgacaagttcatcgctcgacagggttggccacttaacagcttcgaagaattccctaatcctcaatatccttggttggtgcgtgcagagctcgccagcaagaagatcactgatgaagctgaactggcggagaagctgtccgtcgctctacgccacattgcccgccatcgcggctggagaaatccctacattaaggcagagtcattaacccagttggttggtgacagtgacgctttcgtagctgtgagggagagcgtgaaggaggctaccgggttacctattcccgagggcgcaaccgttgggcaggttatcgcgttagccagcaatggtaaacaccgcctgcggggtgagtccggactgattagcgctcggctccaacaaaccgatcacgcacgggagctcaaagtaattttcgaaacccaaggtctgagtgatgagctgttccgtgaggtaattaaagtcgtgttcgatgcggaatctcccaagggttctgccgcgggcaaggttgggcatgacgctttgccggggcagactaaactccctcgtgctgccaaggccagcgatgctttccagcgctaccggattgtttctgttatcggcaacctgcgattgctagaggctggtaagcgtcggccattagctactgaggaaagaacaaaggtattcgaatacctcgtatctgtgccttctaaggataaagcctcttgggatgaggtcgctgaacttctcggtgttgatcgcggtgaactacaggggactgccgcggtaaccgatgatggtgagcgggtgagtgctcgccctccgatccatgaaacaaacgcgactatgcgttcggtcaagctcaagtctttggctaagttctggaaggaatccgacgagggtgtgcgggctgctattctccgcgcattatccaacagtgaggcagtcgattccacctcggactatgacgctcaggtggatgagttcttgatgactctttcggatgaggaccaggcactgttggataccgtgcatcttcctgctggcagggcagcatactcggaagattccttgcgtagactgaccaaggtcatgcttgaacaaggtgttgatttgtctgaggcccgtgagattgagttcggtgtgccaggtgactggaagccgccagccccgcgggtcggagagcctgttggcaatcctgccgttgatcgggtgctgaaaaccgtagcccgctggttagatggtgtgactgcccgttggggtgaacctgaaagagtcactattgagcatgtgcgtgatgcttttaccagcaagtcgaagtctatggagattgatcgcaatattaatcgacgggcacagcgtaatgagtctctgcgtgaggatattcgagctgccagagggcttgacgggcctgttagcagggcggatatgtggcgtttccagtctgtcacacggcaaaatggtcagtgcgcctattgtggtacgggtatcacgatggcgaactctgagatggatcatatcgtgccacgtgcaggtcaagggtcaaccaatactcgtgacaacctacttgcagtctgtcacgcttgtaactccgaaaaaggtaagatcccgttcgcggtgtgggctgagaagacttcccgtccgggcgtgagcgtcgaggaagcgaagatgcgcctgaagttctgggagcgcgaccttggcatgtcagccaaggatttcggttctttcaagctgtcggtaatgaggcgtctccagcgggcaactttcgatgaggagatggatgcccgctccatcgagtctgtcgcatggatggctaacgagctacgggctcgcattgctcacaagtatgcgcttcaggcggagggggactctgctcataaggtgcaggtatttgcgggtgctgtgactgcggaggcgcggaaggcttccggcattgaaaagcagctggagttcatcggtggaactggcaagacacgtttagaccggcgccatcatgcggttgacgcggcggttgtttcgctcatgtcttcatttgtggcgcagactttgggggagcggatgaacattcgtttcgctcagcagctctccggggaggagcccacgtggaaacagtaccagggtgcggattatgctcaccaggagcaatggcggctgtggattcagaagatgcaggagcttgttcctttgctgcaggaggttttggatgctgaccaggttccggtgactcgtaatctacgtctgcgtcttggtaatagccgagtgcatgaggactcgatccgtccgctagtgaaataccgagtgggggaggagctctcctctgaaatgattgatcgggcatcctcagaggccttgtggtgcgctttgacgagggatcctgattatgactttaagaaggggctaccggcaaaccctgagcggactattcgggttaatggaactattttcgggcctgaggatgaggtttctttcttccccgtgaatgcggcttgcgtggcagtccgagggggttgcgccgagctaggctcttccttccatcatgctcgtatttatcgtgtgccaagcggtaagaaagtcgcatatgtaatgcttagggtttacgctctagatctacagaggcatcgtgataaggacttgttcaatgtagagttaccgccgcaaaccatgtcggtgcgtaaagcagacccgaagctccgcaaagcattagccgaagggacagccgaatacctcggctggatcgtcgtagacgacgagttgctggtggatacttctaaacatgggagtgcggacatgtccgtactgactgaagaatacgggaaagttagcagatggactattgagggcttttttgattctggcagattgcgccttcgcccggctcagctcagctctgaaggattatcagagaactctcctaattcaatctggaagttacttgatcggcccggatggttggcatctgtaaacaaactttttgagaactcagacactcgtcttattaggagagattctctgggaaatgaacgtgttgaaacgctttctggtcttcctgtgagctggtcattggagtagttatgaaatcggggtggcgcatcatagatttgctctccatggagggctccatcgggtataagtatgggaatcttgtggtgcgcccctcggataaaccagaggttatggtgcctctagcagatgtggccgtggtcctattgggggtccgggtaactatttctggtgcagctctaatgaagctcagtgatcatgatgccagtgttttggtttgtgactggcgtggtattccctgcgcaggggcttatccttggtcggatcattcgcggattgccgctcgtcataatgcgcaagcttctttatctcaaccacgcagaaagcaagcgtgggctgcgattgttaaggcgaaaattcttgggcaagcgcacactgtttctttgtgttcagaactcgcttcgaaacgtttagtggaaatcgctaaatctgtgcgcagcggggatcctgagaattgtgaggctcaggcagctcgtttatattggggtgctatctctccatttgacgggttcaggagagaacctggatctggcggtgacgattttaacaagtgcctcgactacgcctatacagttctgagaggtcatgggattcgctctgtggtcggtgcgggcttatgcggccctattggcttatttcatcatagtcgttccaatccctttgctttagtcgatgacgtgattgaacctttcagaccggctatcgactatgcgttgttgaccactcttgaatcctatgatgtgtcacagcctgaagttaaacagcagctggtagctgcctctacgcagactttcaacaaagaagggcagtctttgactaattgcctagacagtttctgtcaatctctggggttgttcgttgaggatgatcttgactctcttccggttcctgtttggaagtgactttctatgccaagaaaggggactgacgccgtgtgggttttagtgatgttcgatcttccggttaagacggccttgcaaaggcgcaatgcaactggatttcgcaagttcttggtggagttgggctttcatatggctcaattaagcgtgtatgtcaagtatcttccttcctctggacggctattgtctttgggaaggtcaattaagaagatggtcccacctggcggtttagtgcagatagtaactattactgaccggcagtggtcaaattcggttagatatgtaaatcaaaacccagtagaaacagaaccaaagcctgaacagttaacaattttttaaacaccagaatataagtttccctttgatatacctgaggaatcttaacttactcaagtatatcaaagggaaaatgtactaaaacccagcccgtccagctggttcaaccattcacggacaagtatatcaaagggaaaatgtactaaaacccagcgcattgacctttctgaaaaggaaggcgacaagtatatcaaagggaaaatgtactaaaacccagcgcattgacctttctgaaaaggaaggcgacaagtatatcaaagggaaaatgtactaaaacccagctgccatttttgtcatctctcctagaggtcaagtatatcaaagggaaaatgtactaaaacccagctgggggatgcgctcaccgaatcacggatcaagtatatcaaagggaaaatgtactaaaacccagctttgtagcacatcatcctgtcagcgattcaagtatatcaaagggaaaatgtactaaaacccagcgcagcggtagtcgccgtgcagaccggtgcaagtatatcaaagggaaaatgtactaaaacccagcggcggaaccgcgggcgtgaacaccatggcaagtatatcaaagggaaaatgtactaaaacccagcccgcaaaggccgttaatccgaatctcgccaagtatatcaaagggaaaatgtactaaaacccagcgcgaccaccacagcagcagttcacaccccaagtatatcaaagggaaaatgtactaaaacccagcgtcgtcgccgtggacaaccgctacctcacaagtatatcaaagggaaaatgtactaaaacccagcttgctaatagcctatggtgctttagatacaagtatatcaaagggaaaatgtactaaaacccagcgtgcgtgtgtgtagatggg

SEQ ID NO: 3455 - DNA, 14081 bp, synthetic construct
  source 1..14081: mol_type = other DNA
  misc_feature 1..14081: note = Synthetic
tgtgcgacaaaccagcttcgataggcttgcaggttatgactcccgcagacctttcacagctgatccggactgtcgcagtggattacttcactgagcagcagcttgatgcctccgtattgccccaagaagtaaccgttgagcgccctcgaaacccggagcacggcgattacgcaaccaacgtggcactgcaggtagcaaagaaggtcggcaaaaacccgcgcgagatcgcccagggtctggccgacgcgctgagcgcacaggacgcgattgccagcgctgacgtcgcgggccccggcttcctcaacatccgcctggccgcagcagcccaaggacaaatcgtcgccaccatcatcaatgcaggccagtccttcggccacaacgacagcctgagcgaagcagtcatcaacctggaattcgtgtccgccaaccccaccggccccattcacctcggcggcactcgttgggcggcagtaggcgatgctctcggtagagtgctagcagccaacggcgcgcgcgtcacgcgcgagtactacttcaatgatcacggcacccagatcgaccgctttgtgcgctccctcatcgctgcagccgaaggacaaccgacccctgaagacgggtacggcggggcctacattcaggacatcgcgaaggctgtcgttgcggccgagcctagcgtgcttaacctgcccgaagaagaaaaagcagaagccttccgcgcacgcggcgtcgacatgatgttcgcgcagatcaaggagtcactgcacgaattcggaacagactttgacgtcttcttccacgaaaattccctcttcgagtccggcgccgttgaccgtgcgatcgcgatgcttaaagacaacggtaacctctacgaagccgacggtgcgtggtggctacgctccacggaatttggagacgacaaggatcgcgtcgtcattaagtctgatggcaacgccgcgtacatcgccggcgacattgcctacgtggtcgacaaaatcgaacgcggccacaacctgtgcatctacatgctgggggccgaccaccacggttacattgcccgcctgaaggcagcagctgcggcactggggtacgaccccaaccaggtcgaagtcatgatcggtcagatggttaacctgctggaaaacggcgaagccaagaagatgtccaagcgcgccggcactgtgattaccctcgaggacttggtggaggcaattggcgtcgatgcagcccgctatgccctgatccgttcttccgtggattcttctctagacatcgacctcgggttgtgggcgtcccagtccagcgacaatccggtgttctacgtccagtacggtcacgcccgcttgtgctcaattatgcgcaaagcctccgagatgggcattgaggttccccatgacgccgcggggctgtccgccgtcgacctgtctttgctcacccacgagcgcgagggcgacttgatccgcaccttgggtgaattccccgcagtggttaaaactgcagctgaactgcgcgaaccccaccgcgttgctcgctacgccgaggagctggccggcaccttccaccgcttctacgacgcctgccagattctgccgaaggcggatcaggacgtcgagggtgttttccgcgcgcgcttggcgcttgcgcaggctagccgccaggtgttgtccaatgctcttggactgttgggtgttagcgccccggagaggatgtagatgctcgaccaacccaaaccctcgaccccgcagccgaccatcccgaaggtggatcgggcagaaatccccgacttcaatgaccttccaggccaggtgtggccaaggaacgcccagcgtcaggaagacggagtggtcaccattgctggtgtgccgcttcctgagatcgcggaagaatacggcacccctgtgttcgttgtcgatgaggacgatttccgttcacgctgccgcgatatggcccaggcttttggcggcggcgagcatgtgcactatgcgtccaaagcctttctgacaaccacgattgcacggtgggttgacgaagaaggcctgtgtttggatgtcgcctccgaaggggaactgcgggtcgcattagctgcgggattcccggcagaaagggttaccgcccacggcaataacaagtccacaagctttttgaggttgtgtgtcgacgccggcgttggccacgtagtgcttgatgcacctggggagctggatacgctgaacgctgtcgccgccgaggccggtcgtgtccaggaagtcatggtccgagtaaagcccggcgtggaggcgcacacccacgagttcatcgccaccagccatgaggaccaaaagtttggtttctctttggccgctgggtcggcgcatcgggcggcgcaggccgtcatgcgtgccgagaacttgtcgttggttggtttgcactgccatgtgggctcccaggtgttcgatgcggaaggcttcagcctcgcagccgagcgcgtgttgggtttgtggagccagctggccaaggagggcgccgagttggagatcctcgatcttggtggcggctacggtattgcctacaccgctgatgagcagcccttggatgtcaaggcgattgccgcggatttgttggcccgcattgacgcacatgcggcggcgcgagggattgaggccccgaagatcatggtggagccgggtcgtgccattgccggcccttcgacggtcaccgtctacgacacgggtgtgatcaaggatgttcacgttgatgacaacgccactcgccgatacattgctgttgatggtgggatgagcgataacattcgaccttcactgtatgacgccgcgtacgatgtgcgcgcagtcaatcgtttctgtgacggtgcccctaccgcgagccgtatcgtgggtagtcattgcgagtccggtgacattttactgcgcgacgcgttgctcccggacgatatcgcgaccggtgatctgcttgccttcgccgctactggcgcctactgctacgcgatgacgagccgctataactacatgcttcggcctgcagtggtcagtgttcgcgctggacagagcactttaatggtgcggcgcgaaagcattgacgacgtgctggccatggagcctggctacaccccaccgacgcaaacaaaaaactaaggctagactttcaagcagccctaacccccccatcagcatcgaaaggcagtcccctaggaatgtccaccatttttgttctggtcaagcacgtgcctgacacgtggtccactaagacgctgaaccccgatttcactctccaccgcgaaggtgtagacgaagtcattgatgagattaacgagtacgcagtggagcaagcgctccgtttgaaggagtccttgggcgagtccaccgttgtggctttgtccatgggtgcgccttcctctgaggaagcgttgcgtaaggcactcgctatgggggcggatcatgctgtgctgctcagcgatcctgcgcttgctggttcggatgcgttggggacggtgtgggctttgaactgtgcgattgatgccgcggcccagacgtttggcgcgcccgatgtgatcattgcgggtaacgcctcgtcggatggttcgatgggggttgtgccgggtgtgctctcggaataccgccaggtgcctgcgctgaccaacgtgcgtgagatcagcgttgacggcggcgtcattaaagctgttcgcgaagaccattcaggtacctaccagctcagcgcctcgatgccgctggttatttccgtgacggagaaaaacgacaagccgcgtttccccaacttcaagggcatcatggcggcgaagaaggcggagatcgtgcacctgagcctggctgacaccgcagctgaggccgcacaggttggtttggcgaatgccgcgaccgtggtgactgcagcggcgaaccgccccgaacgcagtggcggacggatcgtacgtggtgagcaaggcgtggaagagcttgtcgccttcctcaaagatcgcatctagcgcgaagggacaatgacaatgactaacgtttacgtacttgcagaatctgccgctcattccgccattactgcggagatgatcactgtagcgcgcaatctcggcgacgtcaccgccgtgcttgttgacgccccggagctcgccgaagagatcacgcagctgggcgcccagcgcgtggtgcacgtcaactcccagggcagggtcctgctgccggcagtcgacgccctgcagaccctggcggccgcccaacccggtcccatcatcgtgcccggccacgccaccggcaacgagatcgccggtcgcttggcggcgcgcctggcaagcggcgttctgtgtgatgttgttgggattaatcccgaccgcacggcgcagcagtccatttttggtgacaccgtttccgtgagtgcggctgtcggtggcgaatgcccggtgtacacgctgcgcccgggtgctgtccccgctgagcctgtgccggctgccgacgccacaatcgaaaccctggaacttgctggcccgggtgcactggacgccaccgtcgagtccttcaccccggcagtgcacggcgaccggcccgagctcaccgaggccaaggttgttgtcgccggtggtcgtggtgtcggcgaggatggtttcgccacgctcgtggaaccccttgcagacgtgttcggtgccgcgatcggtgcgacccgcgacgtcgtcgatcaaggctgggctgacggcagcatgcaggtggggcaaacgggtgtcaccgtgtcccccgatttgtacattgcgctgggtatttccggtgcgattcagcacaagtccggcatgcaaacctccaagaccatcgtcgctatcaacaacgatgaggacgcgcacatcttcgacatcgccgaccttgggctggtcgccaacgttgaagacgtcgtgcccgtactgatcgaacgtttgaagtagccccacggcagttatgcaggtttttctcgatcacgccgcgacgtcgcccacccgcgaggtcgcgatcgaggccttccttgagcacgcgcatcttcttaacccaggcggccaatacgctttaggcaggcaggcgaaggcagccctcgagcaagcccgcgaagacatcggggagctgctgggagcagaacccattgaggtcatcttctgtgcgagcggcaccgaggcagacaacctcgcaatccacggactgtggggggatgcgacacacggcgtggtgttcaccagcccactggagcaccccggcgtccgggaacccatcaggcacctagccggcgcgcgtgtggtcgacatgccactagaacgaaacaacactgcacgggtcgacagcgaacttttccgtcgacaactggtggaattcgccgtggcgcactctgcaggggacacagctgatattcggtttgccacctgcatgatggctaataatgagaccggcgccatccaacctatcgccgacattgcccggctgtgcgcgcagcccccggcagtacccggtgcagggccacaattaacacctttcccactgcatgttgacgcggtgcaggccgtcgggcacatacctgttgattttcatgcactcggtgcgacaacgcttgccgcgagcgcccacaagttcggtggaacgaggggcgtggggctgctgttggccagacgttccccagctctgcacccgctgctgacaggtgggggacaggagcgcggcatccggcccggcacccacgacgttgccggcgccgtcgccacagctgccgccttaaaagaggcctgttccgagatcgacgctgaacaccaacgcctagctggcctgcgcgatcagatgcgcgaacgcatcaccgcaaccatagacgacgtcatcatccacacccccgaagacgacgtcctgcccgggcacctacacatgtccttccccggggcagaaggcgatagtttgttgatgcttcttgacgtcgcgggcattgcggcgtccacagggtcagcgtgcgccagcggagtcaaccgggccagcgaagtgctgctggccatgggggtggacgaacccaccgcgcgcggagccctccgcatcaccctcggacgtacaagcacccaggacgacgtggacaagctactggcagtgcttccggacgtggtgtcccgcgcccgcctggcaggcatggcctagcaggtagtagggtactgctagtattttcccggattcacccaccacccaatcacccaccatcccaatgaggagaccatgcgagttgtagctgcgatgagcggcggtgttgactcggcggtggctgcggcacgagcagtcgaggccgggcacgatgttgtcggcgtccacctagccctgtcgaaggacccacaatcggtgcgcgaatcttcccgcggatgttgctcgctagaagacagtgccgatgcccgacgcatctgcgataaattgggcatcccgttctatgtgtgggatttctcggaccgtttcaaagcagacgtcattgatgatttcgttgaatcctacgcagtcggggaaacccccaacccctgcctgcggtgcaacgaaaaaatcaagtttcgcgcactgctggaacgctgcgttgccctcggctttgatgccgtggcgaccgggcactacgcgcggctcgtgcagccggaggatggtggcgatggctacctgcgacgtggggacgaccccaacaaggaccagtcctatgtgctgggggtgctgaccaaagaggaactcagccgctgcatgttccccgtaggtgatacggaaaagccacaaatccgcgcggaggccgccgcccatggtttctcggtagcatccaaaccggattcctacgacatctgcttcatccccgacggcaacacccaggccttcttgggcaaacacattggtctgcggccaggcatgattgtggaccaacaaggcgccccgctgagggagcactcgggcgtacacgaattcacgatcggacagcgcaaaggcctggatatcaagcagccagccgccgatggcaagccccgatacgtcaccgacatcgacgcggccacgggcacagtcacggttggctcacgcgccgacctgtcggtcacccacatcgaggccgaccgcgtcaagatactgcacccgatgatggagcagtcggaacctttcaattgcgaagtccaggtgcgtgcccacggcgggatcgttgcctgcaccgcccaggttgatggtgaccgcatccgaatcgacctcgccgaaccactgtccggcgttgcacgggggcaagcagcagtcctctaccttcccgacgacggcggcgatattgtgctgggctccggaaccatctgcgggacgtcgcgtgactgacggtctggatcgcggagagcatgcaggtggcgtagctggcggagaatgcgtagatcacgtagagcgcgtcacgagtgcggcgccctcacacttccctggaacggatatgcccgttgcatgtgacatcgtgggcagtgagtcagcggcagcctgcacgatccccttgctgccggaacgaggggcgcacgccgagcttgtagcgcgcacagcagtcctactgcccgaagtctactgcgaggtaggcgcccgcagctgggtcctcacggatcgaccccagttgaccacgcgccgggccgtagacacctggcggtgggaccttgacgcttgcgaacaacagtggggccaacgcgacgtcattgtttctgtgatgggcccgtggtccttggcgacggccctcgaactgcccaatgggcacagggcggtgacggatcccggtgcgcggcgagatcttaaccaggcgctcgaagcgggggtggcggaggccgtcgctgggctgtcggcgcgtttcggtggcgccgtgcaggtcgtgctggaggagccctgggtgccggcgttgcttcaggggtcggtgcctggcacgagtgatttcgacgagcttgcggccgtgcctcagtatgagatcagtaaggcgttggatgcactggcggtggggccagcctggttggattgtgcttcgttggcgacgttgttgcagtgggagggtcctgtggcgttcgatcccctggggttgaagggtacggcggggtttgatgcggcggcggagttgctgtcggtggacaagggggtgcggctgaccttgtcggtggatgagttgatgggggcgggagatgatgcggcgcgtggggtggcggtgcgggtcgccaggtttgtggacatgttgggggtggggagggaggtgctgcagcggattgcggtgtgtgccaaggatggtggggatgcgttgggtttggccggggcgattgcgttggcgagagaggcgaccgacatgctgcatcgggatgcgggggatctttaggtttagggggccgggaggattgcgcgtggttgagggttgtggcaggcgctggctttagctttgtagtatgtgcatgtgactgcggtggtgtgggaggcgttccgcatgccaacttgagaggttcaatacccccggaatatagtggcgcaaatcacattaagtatccttgcggttgcctatctgttgttgataaactcaacgcagagttgatcctcagtaagcgccggctagtttccggtggcgaatgctccgccggggcctgttaatgcaggtcccggccttttactatctcaaaggtgtagcaatgacaactgcagacgtgcgcgtttccgctgataaaaagcattatttagtcggtatcgatgttggtagttattccgtcggcttatctgccgtggaagtcgacgaagatcgtaatcctgtaggtttgctcagcgcggtttcctatattcatgacgctggagttgaccctaccgcccgcaaagaagctgcaactcgccgtgctgtatccggggtagcgcgcaggactcgtcggttgtatcgccgtaagcgcaagcgcttggtgaatcttgatcgtttcatcgagaagtgcggctggcctgtggtttataacgaggctttcgacgatccactgctgccgtggcgcgcacgcatggcgcttgccgagggctttatcgacgatgacaagcagcgggccctttacctgtcgattgccatgcggcatatcgcgcggcatcgtggctggcgtaacccgtacaccaaggtacagagcctccatagcccacaagaacacagtgacgcttttaaagcgattcgggaagacgtagagaaagagctcggaaggccacttccagagaacgcaacagtggctcaggtgatcggtcagctaatggtcgctggtcgacgtttgcgcggcgaaggcggagtgatttcggcccgcctccagcaagtagaccacgcgctggagatcaacacaatttgcgccaaacagcgcattccagatgatctacgcaaccagctgatagacatggttttcgcagctgagagtccaaagggtgctgccagcggaagggtggggaaggacccactctccgggcggtacagggctggaaaagcgagcgatgcattccagcgataccgtatcgcggcactgactgcgaacctgcgtattcgtcaaggtgcagagaaacgtaggcttactcaggttgagatggccctggtcaatgacctactggtcaatgccaagggggcaaagcagcccacgtgggtcgacgttgccgaggttctgggcatcgaccgaggccagctactggggaccgccacgatgttggatgacggcgagcgtgcgggtgcaacaccccctgtgcacaccactaatctcatgatggccagtgtgcggattgcgccgctgaagaattggtggctggaggccgatcagcccgcgcgtgatgcgatgattaaagccttgtcgcttgctgaagctgatgattttgactcacaggagggcgctcaggtccaagcgctgttcagttcactgacggacgaggaacacgagaagctcgatggacttcacttgcctgcaggtcgcgcggcttattctgaagacactttgcgtaagttaaccgagcatattctcgcgcacggttcagacctatatgaagcacgtcgcgcggtattctgagtgagtgaagactgggcgcctccggcccccgatattgcagagcccactggaaaccccgctgtcgatagggttttgaagatagtcaaccgatggttgtctgcagctgaagcggagtggggagcaccgctgagcgtcaacatcgaacacggacgagatgcgtttgtcagtgagctgaagagccgagagatagatcgggatattcaaaggcgcacacgacgcaactatgacctgttaaagacgatgcaagaggagcttggcattgattccaaacccagccgggcagacctctggcgttaccagtcagtacaacgtcagaacggacagtgcgcgtactgcggtagccccattacctactcgaactgcgagatggaccatatcgttcctcgcgcgggtcaggggtctaccaacaagcgtgaaaacctggtggcgacctgtgctcggtgtaaccgttcaaagctgaatattccttttgcggtatgggctgagcggtccactatcccaggagtaagcgttaaagaggctattgatcgtaccaagatgtggctaccagattcaggcatgcgtgcggctgatttccgcagttttgtgaaacaagtgcaggatcgcttccgcaggaccaccctagatgagccgatcgacaacaggtctgcggaatcagtcagctggatggctaatgaattgcgtgcacgcatcgcacaacatttttcgagcggagacgacccggcggatacaaaggtccgagtgttccgtggggagattactgcgcgggcgcgcgcggcgtcgggaatccaacgagacctcaacatgattggcggcaaaggaaaacaacgcctcgatcgccggcaccatgctgttgatgccagcgtgattgcacttatgcaggccactgttgcccaggtgttggtcgagcgcaacgatctgaagcatgagcaggctctgcgtcgccaggcacctcagtggaaagagtacgagggtgctgatgaagggactcgattccagttccgccagtggaaacgccgtatgcactctctgttacgcattctgaaccaggccctcgatgaagaccgtatcgtggtgatgtctaacctgaggcttcgtctgggcaatagccaggtccacgaagcacagatcggcaagctggcggctaagaaggtcggggatgcgttttctgtggtcgagatcgatcgtgcatccagcgaagccctatggtgtgcgctcactcgcgatcccgattatgaccccaaggaaggattgccggaaaatcccgagcgtactcttcgcgtgcatggcacacacctgtctgccaatgatgaagtgcatattttcccagtaggtgcagcagccatcgcaattcgaggaggttacgccgagcttggtgcatcattccaccacgctaggatctatcgaatcaacggtaaaaagccttcttatgggatggttcgtgtattttctgttgatttacagaagttccgccaacaggacctgttcagcgtagagctcaagcctcaaaccgtgtcgatgcgatatgcggatccgaaggtacgtaaggcgattgcggaaggcaacgcggaatacctagggtggttggtgcccgatgatgagttgctcttggacgctagttccttcactggccaagttgctgatacgcaggcagctttgggtccgatcaagcgatggaggctcgatggtcttttcagcccttcgaggcttcgactgcgcccgttgcaacttgctgcggaaggtctggcctcagacagtgaagactatctaaaaaagaccttagacatgcaagggtggcttcctgccgttaacaagttgctttcagttggacgagtgactgttgtgcgaaggaatgcgttggggcgtcccaggctggaaagtgtggcaaaccttcccgtaacgaagagcttctgatgcccccgcggttaaaccctgggtggcagatgctcgactgcacaggcctggaaggcagcatccactaccggcgcggacaactggtgatccacaagggcgaagaatgcgtttccgaggtgccgctttctaggatcgccgtcgtgctcgttggctctaaagtgtccatttcgggtgcggtgttgatgaagcttcgcgaatatgacgtgtgtcttcaggtgtgcgattggaaggggatcgttgctgccggactatacccaatgtcctcgcacacgcgtgtcgcagcccgccaccgtgctcaagctgccatgtcgctgccaaggaagaaagcggcatggtcggcactggttcgtgcaaaaatcctcggtcaagccaacgtactgtctgcgttgggggcctcctctaagccccttcgggaattagccaagaaagtacgtagtggagatagcgacaactgcgaggccctggcagcaaggatgtactggggagccctcatgccgagagattcgtccaggcaacctggggctcagacggacccgatcaacgcctgcttggattacggttatacagtgctccgttctcatgcgattcgagcggtcgctagcgcaggcttgtgcggtcccctcggcgtgtttcaccgaagccgtggcaacccatggtgcctcgcggatgatttgatggagccttttcggccgtgcattgattttgtggtgcttaagtcagccaaggacgggacgctcgatttcgatgcgatgaaacctgttctggtcgatgccgctagtggttcgtttaaccaagacaacccagcagcgcctgcagctctggttgagttaggtcagcaatttgggaggtacgcagagaaggaaatcgaccgcctcctggtcgatagctggagtcctgtggaagtactatcagatgaggtcgctggtgagtgagccaatgtggagcatggtgctgttcgatctcccggtaaaaacaaagcggcaaatgagcgaagcaaatcgcttcagaaacgagttacttgacctcggttatcagagattgcagctgtcggtgtacgtgcagtacctgccttcaggtgcaagggcggttggcctagtaaaagcaattaagcgagctattcctccggaaggtgaggttcgaatttttgcgataacagataaacagtggtcgacagcattcagatttatcgctgcagcagagtctgaggtcgaagataagccctctcagctccagattttctgataccaagattgaggaaaccccctggtagagataggattttcttcctatcgggaagtctaccagggggtttgagagttgatccccagctaattggattgggtctcacaggcgatacgaagtctaccagggggtttgagagttgatccccagcttaaattcgccgcgccgcgtgacgtcgcgaagtctaccagggggtttgagagttgatccccagcccgcgctatcgctggtgtgccgtctaatgaagtctaccagggggtttgagagttgatccccagcgacccgtggtatgggaggtggaagccaagaagtctaccagggggtttgagagttgatccccagctcgccttcatctactccgatggctgagagaagtctaccagggggtttgagagttgatccccagctccgtttcatcacaacgtctttgccggggaagtctaccagggggtttgagagttgatccccagccatcacgaacaagcgcctcatacaattcgaagtctaccagggggtttgagagttgatccccagctgttcaacggtgtcgtgctggttgtggtgaagtctaccagggggtttgagagttgatccccagctagctagtgtgtggacccactctgttaggaagtctaccagggggtttgagagttgatccccagcatagttggtcgatggtggttttccctgcgaagtctaccagggggtttgagagttgatccccagccaaggcgctgcttgttgagcaacaaggcgaagtctaccagggggtttgagagttgatccccagctcaagcattgcaaacgatagctgaatgggaagtctaccagggggtttgagagttgatccccagcctagctggtcgtgggggagttctgcgaggaagtctaccagggggtttgagagttgatccccagctcctcc

SEQ ID NO: 3456 - DNA, 5674 bp, synthetic construct
  source 1..5674: mol_type = other DNA
  misc_feature 1..5674: note = Synthetic
ggtagctagctaaaaatatgggggatagttcggtttggtgtccatcgtaccggtgcagggggtttgactgaaaatgatggaagtcggacgtgggtgtttggggtggggtgggagtgtgagggcgaacggtggtgtgtcgaattgttgcgctgctctccaatctgtggattctgggagtgttggcgtgggctgatgctgcaagaggcgcaaacttgacgacccccatccatcaagctcggctcggctgctcactggtgtttggttaggaggtgcgatagttaaaaacttttagcaaaaatgatacttagcgtatttatgggcccgtggagattcctgcgttttcgccgtggtggggatcttgtgtgtctggatagctttaacggtgttctgtagaagcttgatacatccctggttgtggagaggttcagggggtgaaagtatggattctagcgtcaagcgtctctcaagttctacctactgtttagttgactgattatatgccccagctttacctttgcagattgataatatcaattccgtagattatctttatgtagtgaatacccccgaaagggtaaaaattttgccaaaactatacgaggcatcgtagaagcatttattattaagttgagaattgatcctcagtaagcatcagctagtttctgatgacgattgctccaaccgatgcgcgcattgcgcgcgtcggttttttcaacctcataggagttgcgatggatacttcgctaaccagatatgctgttggtatcgatgtcggtgatttctctgtcggtatggcggcaataaaagtcggtgaagacggcatgcctcaggaagtactgagtgcgatctcccatatccatgattcgggtcttgaccctgacaacattcaggaagctaggaccaggcttgaaatttcgggaattgctagacgtactcgacgactatttcgccatcgacgccgtcgtcttattcggcttgatgcattcatacaaagtaaggggtggggacttccacaaaatgacgagtctgatgatccctatctcccttggcgtgtccgtgcggagctggcatcacgtccaattccgacagaagaagagctaggcgcaaaattatccatcgcaatccgtcacatcgcgcgccatcgggggtggcgcaacccctatagtcgagtcagctcgctcatggcagatgtcccaccaagcgatgccttcaaagcgatacaagaggaattttcgaagatactcggtcgatcacttgctgatgatatgacgcttgggcagatggttgctgcctgcaatctcaccaacattaagttacgtggagaaggtggtgcaatatcagcacgactgcagcaatctgatcttgctcgcgagattagaaaaatctgtgcgatgcaagagatagatgaaagcactgttcgagagattattgaatatgtcttcgtcgcagagtctcctaaaggtgcaaatgctgctcgtgcaggtaaagacccacttcagccaggtgaacctcgtgccttgaaagcaactgacgcctttcagcagtaccggatcgctgcgttggttggaaaccttcgtatccgtgaaggaagagaaggaagagaactcaatcttgatgaacgaagactagtttttgaccatctcgtccatctaaagcccaaggttgagcctgattggtctgctgttgccgaaaagctcaatattggtcggagagatttgttgggaacagcgacaaccatggatgatggtgaacgtgcaggcgcacgtccgccagttcatgaaaccaatcgtcgtattctcacgtgctcagtgaagcctcttgttaaatggtggcaagaagcagatgatgcggagcgcagagagatgctaatagctctggggaacggttcggttgaagattatgacagcgcacaaggtgcaaaagtttaagcattcttcaccgaccttccagatgaagatatagaaaagttagataagctacaacttccagtaggtcgcgctgcatacagtgaagatacgcttacaaagctaaccgaagccatgttgtcaaacggcgtagacctctataccgctcgccgtcaagtctttggaatatccgaagactgggcaccgccagtgccggaaataggtgaaccagtaggtaaccctgcggttgaccgcgtgcttaaagtagtagcacgttggttgcgtgccgcagaaaatacttggggagtaccagagagtatcaatattgagcatgttcgtgcaggctttatgagtagaagcaagtctcttgagctagatcgtgacaacgaacggcgagccaagcgaaaccttgagcttttcactcagatgcaacagaagtttgggcaagacatcaggccgtccagagctgacctgtggcggtatcagtcagtgcaacgtcagaatggacagtgctgctattgcggtgcaacaactacttatcaaaactgcgagatggatcatattgttccgcgtgcaggacgtgggtctacgaacacgcgcgataacttggtggccgtctgccatgactgcaacttgtcaaaaggaaacactccctttgctgtgtgggcggagaaaagcaccaagcctggcgtcagcgttgctgaagctcaagagcggctacggcattgggtgtgtgaccctgggctaaagaccccacagttcaggcgctttgttaagtcggtgaatgatcgcttgtcacgtaagactattgatgaggaactcgatgccaggtccatcgaatcggttgcgtggatggctaacgagcttcgtggcagaatcgctcacaagtacaaagatgcaaaagtgcgggtatttcgagggcaactcacagcagaagcgcgaaaagcatctgggatcagcaaaaagattgcattcattgatggtcctggaaaatctcgccttgatcgccgccatcatgctgtggatgctgctgtcatcgcattcatgtctgcaaaagttgcggaaacacttgccatacgaagcaaccttaagtttgaccaggagcttcgcaaagacgctccacagtggaaagagtttactggttctaccgacgcgcacaagatcatctggtcgaagtggcgtagtcgcatgatagctttagctgatttactgcaaactgcattggacgaagaccgcattgtggtgatgtctaacctacgtctgagactggggaatggtgctgttcatgaagaaaaaattcgtaaacttaagaagctcaaggttggcggaccaatctcagctgtagatgttgatcgtgcatcaactgaagctctgtggtgtgctctaacacggcaccctgattttgatccaaaggaggggctactagcagatcctgaccgtaatattagggttcaaggtaggcatcttagtgcggatgacaccatcgaggtgtttcctgtctctgctggcgctgttgcagtgcgtggtggatatgtgaaacttgggagatcatttcaccatgcacgtgtttataagattgcagatggaaagaaagtagagtatgcaatgctgcgtgtctatagtatagatctaaccaaatataaaaatgaagatctatttaccgttgaattgcagcctcaaactatgaccatgagaaaatgtaagagtagtcttcgaaaagcgcttgctgctggcaaggctgaataccttggatggctggtggtagatgatgaactgtatttggacacggcaaaacttaacactggtcaaatcgtaaatattcaggaggaacttgggaaaattacgcgttggcgagttgatggatttaaaacagaatccaaactgcgcctacgtccgctccaaatgagtaaagaagggattcgaaaagacatgtctgaagatgttaataagatcctcgatagtgaagggtggcagcctacagtcaataagctttttggggtcggaaaagttacggtaatccgacgtgatgcacttggacgagtacgcctatccagtaatgcacatctaccagttacgtggactgcaggataagttatgcctactggttggcaagtacttgacttcactggctttgatggagtattggcgtacaaaaggggtcagttagccatactatgtgagaaggagatagtgaaatccattccgcttgctcagcttgccgttattctagttggatcaagcactaccttttccggtgctgttctgcagaagctaagcgagcatgatgcggcaatcctggtatgcgattggaagcatgttcctgtcgctgctgcgtatccatggaaagagcactcgcgtatagccgcacgtcagatagcccaggctgagctgtcgcttccacgacgaaaaaatgcatgggcacaaattgtcaaagccaagatctttggtcaagccgcaactttgaacattgttgatagtaagggtgccaagtacttatactctgtggctcaaggagttaagtcaggtgacccaagcaatcaggaagcccttgccgccagattttattggcgacggcttactgcggatccaacgttccggcgactgcctggaattggtgaaagtgatattaatgggtgccttgattatgcctatgccatacttcgtggtcatggcatacgtgcagtggtttctgctggactttgtgggacaataggtgtgtttcatcatgggcggtctaacccatttgcgcttgtcgatgacttaatcgaacccttcagacccgcgattgatcactacgttattaacaaacttgataacttttgcgttgatgagccagatgttcgacgtcaacttgttggctttattgaatctgcgttttcaggcacgggacacacaatacccaccgttttcatgcagtttgcacaggaatacggccgatatgttgagggggatctgcagcggctgattccaccaacatggaaagggctacccagtgccagcgaaaagaagtgaaccagtgtggtgcatagtgatgtttgacttgccggtcaaaacgaagagacagcgaaccgaagcaacacgattccgcaatatgctactcgataatggctttgcgatggcgcagttaagtgtctatgttcagtacttaccgcttgcggcaggtgtggccaagctggcggcactcataaagtctgagctgccgtcgggtggtgatgtccgcatcctcgctgtctcagataaccaatggtcaaaaatgatcagattttccaacatgcaggctggagaacctgagcctgaacccgctcagctgatgattttttaacctaagattgccggaaaaacgcaggtaaatcacggtttttctggctatctcaagtatatcagggttaacgagaattgaccctcagcacgctggtggggcgttgtctgatgatgacaagtatatcaaggttaacgagaattgaccctcagtggcgctgggtgacccaagtatccagctcaagcttattaaagttcgaaagaattaactattgagtttgatttagcctcgtttgcgtgtcgaagacctcgtattgtagttttctgtcagtgcacctctaaaaataattccttctaatcatggtcctcgctttcatttttcatgactagtataaagcttccttctgggttttggaaataaataactatggcagatttacttatgacatcaagcgtgaatatattcaattctcgaagaatagttagaaaggcttctagtggaacatctgctg

SEQ ID NO: 3457 - DNA, 14754 bp, synthetic construct
  source 1..14754: mol_type = other DNA
  misc_feature 1..14754: note = Synthetic
gctggttcaagtgcttttgcagcagcttcaatatcttttggcagagctcttgcaagtgcacagattgtaggtcctgtcgcagtaccaatttcacgagcaataagatgaacagcattaaagtctccatcacttgatactggaaaaccagcttctattacatctactttaagcgcagctaattgttttgcgatcgtgagtttttcgtcggcattcatagatgctcctggactttgctcaccatctctcaaggtcgtatcaaatatatatattcttttatcttcagacataacgtattaactaattattttatcactttatgagaaatcaaccatctttttgccctttaattaaaacaagaatataatagttccggttctctttataaaaaagagaaataaagatcattttgtctagatccaagctacaacttgcaattttttgcctggtattcatactgggaattttatcttgccactctattaaagccgatacaaccaagccactttcaaacgcaagccttagtcagtattttggtaagaccttaatatcagagcttagagtgtctggaaacagactattaacagaggctgagattcttgaccaggcaatttctttacctggagcgacttttacacgagaaatgatacttgcagatcttcagagaatttatcaacttggtttttttgaaacagatggtgttgaagcagtaccttttttaaaagacgacaatactattcttttggaataccgagttaaggaaaatccaccaattaatgaccttgtaatttacggcaacaataacaccgaagaattcaatccctatgatattttcgctgaacttgtagggaaaccagagaacgcacaattaattaaagacaaaattcaagagcttgaaacagagtacctaaaaaacggttttattattgcaaaagtaagtgatattgacttaaatgatgctggggtacttacaatcaccatcgatgaagggattataaaaagtattagttacaagggtaatcaaaaaaccaaagaatctttccttgcacacttagtaaaagatcaaggcataaatgaaccttacaatgaatttaaattcgcaaatgactttaaaagactacagggaagtaactacttctctagcgtaaccaggacagtaagaccatctgaagatggtagtggtagttatgacttgttaattgagcttgccgaaaaaagaacagcgtcagttggacttggtggtggtgttaactctactgcgggtatttttggtaacgccagtcttaacttaggtaaccttcgcggtcgcggtgaaactttaaacgtaacagctatattaggtagtggttttggtgcagctcaaactctaaacaacaatagtagacttgttcgcaggggtaatgttactcaagtatcagcaaactattcaataccattttttatggatagtgattatggggtaaatacttttgcaaactttactaaaggtccaaacttcaacgtagatctttctaaccaaacaggtatcggtgctggagctggtcttacaagaatagttggagataatcatgtctttagattaagtacaacaggaaaccatatcgatataacagatagagatagaaaacaatatcttgatgaactcactaaaaatattatcgaagtagacaacttaagtcaaaaagatattctgaagttaaaaggtccaaatttcttaggcggtagaagagggctggcaagagcagaagcaaaaagaattcgtaacgagcaaatagtctcaggagttttcttagagcttgagccttcgtatagttataataaagtcgatgataaccaaaatcctcgtgatggctggaaaaccagaataggagcagaacctacactgggttttggagatataagtagtttcaccaaactaaatggaagtgctacaaaatacttaccaataggcaaagagtcatctttcttgtttaacatgagaggtggagctggcttgtttggagatattccgcagtttgctatttatagacttggcacaacatctggtattagaggatacagacaattcactgagcttggtgtagggtctcaccttgctatttcaacagcagagctcagaacaccaagctataacatcattagaccattgaaaaaatataatttatccaagaaagttgactttgcacttttcgcagatgctggatttattggtggtgacatcagactaaatagaattacaaaaagactttctcaagcggcagcagttggatttgggatcagagttaagttgcctttagttggagctttaagattggatttaggtttcccgttaattggtgttcttacaaacgacaagcaattgtttaggttcaactttggaccggctgatattttctaaaaattagcttaagaaacaggcgcaaaaatcctgtatctaggattttactcatatacagagccagttctttagcttaatataatatatataccgatttatcgtggtactatgaaattagatgtcaaaccaagaagaactgttagatatgaattcagctatttctgagaaatcagaagatgaaattttagaattaagcgatgaagcaagagtagcttttgctttataccttgatgttatgaaacatggagttgttactaaagaaggtactaaagttccacctcttaatacagcaaaaatttctagacttgctgaggtaaacgcaaaaatcgtatcaaaaagttttgataaacttcgcaacaaaggttttatttcaaatgatgataatggtgaattattcatccctaacgtacttgagtttgaagattggttaaaatctgaaggcgcagcagtctcttaactctaccttaacttgaatgtagtaataaactggtatgtcggtttatgaatttatcccctatatcaattccgctgaaagattagcagatgctgaatctctagttgctcagacacaatcagataacgcttttgcagagcagcttactcaacaagcagttctaggtattggtgatgcgaacgcagcaagacaacttcaagcaattgtaagacagttacttggtcatgctcgcatcaatcaacaattttggctagaagtagctaaaggcgacaaagaccaatacaaaaaatcaatcgaattaattaagtcgtcgtaatcaataaggaattaaaatgttcaaatcaagttcacaagcagcagagcctaattatattaattggagcttacaacatgactacatacaacgtggtgtaactcagctttcagctagtaattttcaagacatcttcacaatgaccaaaagagttggtgaagttgaagttaaaatgagtaatttaaaatttagagctggtggtattggcggcatgcttggtatcgcagcaggagcacttggcggacctgttggtagcgtagttggctttggtgtcggtagatcacttggtggctttgttggtagtgcgcttgcaaacaaatattatggtgaagaaaaaaatatgattaatgaaaatcttcacatagctcaaatgagagacactcagctaaagtatcaaattggtcagatggaaggtcttggacagatgattgaaactttaagacagaactctatcaacgatgataagaaaattatccaagatatgatggttctataatttcaaaattattttttccagaattgccaaatactatttctattattagctgcaatatcagcttctgttttttgctttgattgttctccagcaagatcaatagcagactgcatttgagctttttgctcagccgttattgcaataaacagacccggataattaccggctaccttttttccatttgtcagttctggttttatatccttaggattaatatgcacatgatctttaaaaccttcagtgctatcgtactctggaattaaaaatttcatactttgattacctctttcaatagttaaaaaggattgggtaattctattatcccctcttgtagacccactctctgattgatagatagtggcttgatcagcaccagaatatgtcgcactgtctagtttggaaagtatatgagctagtattggcttaacaagttttgtgttatgacttcttgcttcatccatctcagcttgcattttgacttgttgactagctaaccttgcattatattcacttgctgtttctggtttccaatttagatcttgtttaggtttggatccattccgataccaaagctcagcatttactggatcaattgacataagaatatatagtctttaatagaccttttgtgaaagtcggaattatccttagcgcaacttccgccgagtggcgtcgttgcgaccttttttcgggcgacatctactgcgaaacgatgtttcgcaagatgtctaatttaaataaatttataggtaataactcttatctattgagcgaaatcggtctattaagctcatcgcaaggaccaatataatcacgtctcaatggatagccttcccactgctctggattcaaaattcttgttaaatttggatgacctgcgaatttaattccaagcatgtcataagcttctctttcaagccaatttgccgttgggaaaatctcagttaaagtaggaatagtcggattttcttttgccacagtaactttcagtgaaactgctttaccagtctcagtttcttctagctggtatatagcttggtatccgctctttacttcaacagcagtcaaaaaattaagcaaagtcatttttttagagcgcacaagatcttttgagatagcaacaagatcattagcatcaactccaatcatctcaaaacctgaagcgttattccccaaggcttgaattttaaatttcttagcaatcaaattctcagcaatctctccaacagcttgagcttcaacggtttctactttttcaattttttcttctgacatttaatttctctttttaatcaaattattttatgaataaacctgttttatcatcaacatttttggttttatttctatggtcctgagcaatagcagatcttaaagcaagtttttctctgcgaatttttctttgaagtgtaaacaaaccatgtaataatccttcaggtcttggaggacatcctggcacataaacatctactgggataattctatctacaccttgaacaacagaataactatcgtgaaacataccacccgtaatagtacaagcacccatagcgattacgtattttggctctggcatttgttcatagagcctaattaaagctggtgccattttgcgagtaatagtacccgctgtaataatcatgtctgcttgacgtggagtcgctctaaaaacctcagatccaaatcttgaaatatcaaatctagacatccctacagacatcatctcaatagcacagcaagaagtaccataagttaaaggccaaacactattagatcgtgcccagttataaatactgtccaaaaaaccacctactgtcgttaccataaggttgtttttcaattcttcaggtatttcaatgtcttttctctcaggaagctttacctgactttgagaatatagctcttcgatcttatttgccatcaatacataaattataccaatatacaggttttgcataggggtctgactcgaaagcctttagggtaaacctcggggtctgaccccaaaagccttaatgaattatcttggttaaggaaaatggggtcagaccccaactggtagaattaccaggtacttcagatatgaccgtaaaagaaaagcagaatttattattaattgatggcagcaacttagcttttagaatgttttttgcacttgagatgagtaaccttagggatgcagatggaaatccaacctgggcagtctatggaacaatcaaagctctttttgatgttattgaagcaaccaaacccactgcaattgcagtcgcttttgatttacctgctccaacttatcgccacgaagtttttgaagattataaagctaaccgaccagatgacatgccggatgacatgaaacctcaatgggcactaatcaaagagactttcagaaaattgcatgttcctgttttagaagaacctggttttgaagcagatgatttaattggcatacttgcaaaaaaagctgagcgtcatggcatggacgttgtagtgctttctggtgataaagatttatttcaactcgtcaatgaaaggaccagaattgcaatgcccaaacgtggtggtggacttgatttttatgatattgaaaaagttatagagaaaatgggagtaagaccagatcaagtccctgactacaaaggaatagccggagatagttctgacaatataccaggagtaaagggtctgggacctaaagctgcaatcaatctactaagagattttaattcaatagaaggaatttacgaaaatatagataaagttggtcctccaaaaacaaaagaaaaattagtcgaacaagaagataaagcacgtctatcaaaatatattgcaacaattatgattgacgaaaatgatggcctcaaagaacaacttgacctagaaaaatgtcatctagatttaccaaacacagatgaattaatagaatttctaaaaaaacttggttttaattcaattctcaaaagacttccaatagttttaaagcccttcaacaaaggagagcttgtaaaagtggacgtgggagagcttcctgaagaaatagaaaaaactttcagagtgaaaaaaaataccgacaaatgggatagcctagaaaaagaatttaaagaaattcaagacgacaaaagctttaaggctcactcagtaacaactcaagaagagctagaagatctagcccagaagctctcaaagacagatgtctatgcacttgacttagaaacaactggactcaatactttgaattgtaatatcgtgggatgggcttttagtctaagaatcaataaagatttactttcatattacattccagtaggtcacactaacggaaaacaagttgatagaaaagtagttgtcgaagcacttaaaccaattatcgaaaaccaaaacaaaaaaatcattatccaaaatgcaaaatttgaattgaaaattttagaaagacaaggaatcaaatgtcacttaaatttctttgacactatgcttgcaagctatgttgacaatcctgcaaataaacatggtttaaagacacaagcaaaaagggttttcaacctaaaaatgacagaaattgaagatctcattggtactggtcgcaaacaaacactgatgagcgaagctcccatagacatagtttctgactatgcttgcgcagacgcatacgttacatataaactttacgaacattatttaactaaactcgatcaaagagaaattaaactactgagtgatattgagttccctttaataaacgtacttaaagatatcgaaaatcaaggaattagcgttgatgtaggattccttgcagtcttatcaaaagatattcatcaaaaaatagatgtcttacaaaaaagagtttttgaattatcaaaagaagaatttaacatatcctctccaaaacaacttggagtaataatgttcgagaagctccaattaccaacagttggtaaaaacaaaaaaactggttctttttcgactgacatgggtgtactagaaacacttttacaagattatgaactgagcgcgcaggataaagaatttgtagaacttataattgaatatagaactctaaccaaactagcttcaacatacatagacaatcttccagctttaattgcaaaagaagataatcgtttgcattctgattttaatcaagttgtaacaaccactggaagattgagttcttcaaatcccaacttacaaaatatcccaatcagatcagagtacggcagacaaatcagaaaggcttttagggctaaagactcttcaaaagttttattgagtgcagattattcacaaattgaacttagagtgcttgctcacctagcagacgagagtgcacttattgaggcttttaataaggatcaagacatccatgcaagaaccgcaatggaaatctttaatcttaaggaaaatgaggtcactagcgagcacagaagggtcggtaagacactaaattttgcccttatctatatgcagggtccttttgctacagctaaacagttaggtatttctatgtctgaagctaaaaaattcatagatacttattttaaagttttcccgaaagtaaaacccttcatggataggaccctagaagaagctcgtgaaaatgaatttacagagactatgtttgggcgcagacgctattttagaaatctagattctaacaacaagatactgcaaaaagaagaagagagacaagctttcaacgcaggtattcaaggcagtgccgctgacattatgaaaatggcaatggttaatcttgataagaaacttgcaaactatcctggcgcaaatctaattcttcaagtgcatgatgaattgattgttgagtgtgatcttgaaattaaagatgagataaaaaagattattattgatgaaatgtccaacgcaactaaacttaaagtacctttaaaagttgatatcggcgaaggaccgaattggcttgaggctcattaatgagattactaggatcaaatctctgtaacaattgagatgtcattgctgtaggggttacataattcgttgactattactcaataattactcgctcgcttcatctcaattatttcaagctggtcattccaatgggttcaaacttccctccgcaaaggaaaactcgattatttatatttagacctgttttgctcaagttgcactttcgcaacaggtctagtatctcacaaacgcatccgctcgcaattgcactttagacacacaaatgatttcaaactggttcgccaatcatgaattttctctttgcttcagtcgttttcacctcatttccatttaaagcttgaaataattgagataaagctattagtattaattgaatctaattgcaatcaaattaaatcaccttttttcgaagcatttgcgcaagctcatgcgcagaaaaaagagtgatttaatttgaatattgcaatagggttaatgattactacttaaactgccaatgaattacatgacccttacagcaatgacgctgtaacggctcagtacagaaaatttactctagatctttatcattaatatgtttatctaaattaaaatcagaggcttttacatcacgtaaaaattctttaaattcttttcttgcttctgggtccgtgattggatcaatctcatcatcggagtcagagagaaattcaactttagaagcaatatcctgaagtattttttctgaaaccatgattggtgcatctaacctgattgcaagtgcaatactatctgatggacgcgaatctatagcaaaagaattttcatctttatctagtaaaattattgatgcaaaaaacgtagaatcttcgtaagaatttatttcaacacaatcaatagttgcatccagtgcatcaatcaattcaacagccaaatcatgtgtcataggtctttctgtttcatgtccactaagaccacgagcgatagcttgtgcctcagcttggccaatccagatgggcaaagtatattttttttcttcgtcgttcaatatcacgaggggaatattagttcggatatcgagtgcaacgccggtgacgaacatttcgatcataagcctattattccttgcataacgctgattaatcctcagttagagcaactagtatatgtaacctataaaacgcactaacaatgataattttaattaatagtgctaatttcagggcttaacaccaactccagataacacacgttagattcaattttaattactcaatacaaaaaaagaccccaggcgtaatgcaaggggtctgaaattatggatattacaccttgttattctaaggtcaaagaccaaaagcgcaaatcctaaatgctataacccacattataacaaatatatgagctaaaatcaaccaaatggcaaaacaagcatacagacttggattagatttaggtactaattccattggttggtgtattttagacttaaagcacagtacaaaagagccttgccgaattagggcaactggagtaagaattttttcagattcacgtgaagcaaaatcgaaaacaacacttgcaagtgcacgcagagcagctcgtgcaatgagacgaagtagggatcgaaaaatcaaccgtaagaatagattattaaatacgttatctgaaataggattaatgcctttaaatgagactgaaagaaaacaacttcaacaaaaaaacccatatgaacttagatatagagcattaaatgaaagaatagaactttatgaattaggaagagcgttgtttcatcttaatcagagaagaggttttaagagtaatagaaaaactgataaaaagtctaacgaaaatgggaaaatcttgagtgcaattaaagagttaaaagagaagttagaatctgaaaaaaacaggacatatggagaatttctgtatcataaaaataaaaaatctcaattagttagactaagagctaatgcaaaacaggaatatgcattttatccagataggtcaattattgaagaagagtttaatttcatctggagtaaacaatctgagtttcataaagagttgaaaaatgaagacatgaaaaatcaaataaaaaatatcattttatttcaacgcaatcttagaaaacctgttccagggaagtgtttatttctaccagaagaaaatagatgccctaaagcacttccttctttccagttatttaggctttatcaaaatctaactaacttaagaataagaaataaaaaagacaatgaaacaaaattaactagagaagagataaatacaataattaaatcaattttaaccaacaataaagagagtgttaagtttgacgacctaagaaaatatcttagtgatacaaataaatccatcagattcacaatagaacttagtggatacataaaagagatagatggtgaagaaatacaaaatcaaatcggaagaatagaaaaaagactaaaaaaatcagggattaataatcacaaaatcatagatacctggaataatctggaattaaacaaaaaagatgagatcatttcttcaatcttagataacgataatgacgatgagttaatcaacagtatttcaaaaaagttaaatatcaatatcgagatcgcaaaacaaatcatagagatagatacgccaaacgagtatagtcggttaagcttaaaagctattgaacaatttttagctgaatggaaaaactctaatgaagaatatctccctgattattcagagatctcaaaaaaattatttagtgggcatacttggaatatagagaatggtttcgaaaaattaccttattatggcgaaatacttactcgatctaccgtagaagcccctcctggaatgattacagcaaaagacactgaatgtaccgaatggattgcaaacccaaccgttcatgttgcattaaatcaactaagattaatcataaatacaataattgataaatacggaaagccagatgaaatcgtcatagagttagcaagggaactcaaaaataacaaagagacaaaagataaaataaataaatctcaacgcaatagagaagcggactataacgaatcaagggaagaaatcatcaacctcggtggcaatcctaaaagccgagatgatctaatcaaatggcgcttatggaaagaattaccaccacaagatagaatctgcatttacactgggaaaacaataccacagcataaactttttacaaatgaaatagaagttgaccacattattcccttctccagaagtctcgatgatcatataagtaataaggttttagtattcactcaagcaaacagagcaaaagcaaataaaacaccttatgaagcttttggtaatagccctacacaacttggaataaatttcaattggaacgaaatcactaataatgtttatagtatttttgcccgtacaaataccgagactggagaaaggtttcttattcgcaaaggcaacaatatattgagagaaaattggaatcaagaaattgaatctaagttcctcgcaaggcatttagtagatactcaatacttatctaaagcaagcatgaactacttaaaatgtatttgtgataacgtaaccaatacaccaggtatattaacagctcttataagacgtaatctaggtctggatgctatcttaagtgagaataattcagaaaagaacaggcttgatcatagacatcacgctgtagatgcattcgttatagctctaacaacaagatcttatgttcaaaaaatctctcaagccaatgcaagacgcgaagctgaagatcctcaaaacttcgttaatgaaaatccacttacaccatggaataattactggattgaactcaaaacaaaaatagatagactaacagtaagccacaaatctgatcacggttactacggagctatgatggaagacactgcttacggcataattgatggaccaaataaagatgggaaatatactactcaaataagagtaagaatagaagacttaaagaatccagacttagttatagatgaatcttttaaaagtaccttaatacaattaaaagagcagcatgataataaatgggatttagctcttaaacgctttatggcaaacccacctaaacaatttcgcaaattaaaaagtataaagattaaagaagaaaatgtcttactcttaccaccaatcaagaacaaagaaggtaaaccgtataaaggttacgtaggaggtaataatgcaaaatttgttatatacgaaaaaccagatgggacttgggttggaacaacagtatcagtttattcagcgtatttagaagacaaaaaatctatcgctccatttgaaacaattgaatttgaaaacctagaatacaaaaaacttatggagctatttaaaaatgatttggtaagtataaataccgaaaacggagtggtatatcaaaaagtactcaaattctcacaatctgacctgactctatgcaatccagaaatggtaaaagatagagagaaagatgaaaatggcaaattacagtttttctatactgctaaaaaaccacatctttggcaaaaattcgaattaaagccatgcatacaatccccgcttggaacacctagaataaaaaatgagtctagaactatgtgcagaaccgtatagttgagattactcaaacaggagtctatttgtctaaagatagaggcttccttaccgtatcaaaagataaggaagaattaggcaaagtaccactaagtgatatctcgggcttaatttgtaattcacatgccttgacttttaccaataatattattctctctttagtagagcaaggtagctctgtggtcatctgtggacataattatttacccgaagcaataatctggccagtagaatccaactctcagcaacaactcagaatgagatatcaaataaatgcaagtaagcctcttacgaaacaactctgggcagaaatcattaaacaaaaaatcctcaaccaatctgacgttttaaattttattggaagaactaataatcgattaagcgtattagcaaaagaagtaaaatcaggagacaaggataatcttgaagcacaggcagctagaatatactggactaaaatattcggtgatgaatttactagagacagaatgtctgatggcataaactctatgttgaattatggttatacaattcttcgctcaacagtagcaaggtctataatggctgtaggactccatcctacactagggatacatcaccacaatcaatttaatcctatgtgcttagttgatgatatgatggaacctttcagaccattaatagacctattagtctattacttaaataagtctggacatgagaatgtttcagaagatgttaaacgctacttagcaaacagtattaacatagaccttgaaaccgaggatggaaatagcccattatttcaagtgattaacaaactttccgtaagcctagctcaatcttatgaacaagaaaaagtcttattaagatttcccattgtgatactcccggtagaaattcccgacttaccttaattaatacagaaagcctaaacttataaacagttttattggaataaagagagatgtgttgagtggatacagacttatgtggatgttagtaatgtttgatttacctgtaattaccaagaaagagcgccataaagctactaaatttaggaatttattacttgataatggatttgagatggcacaatactctgtttatttaaagtcttgttctggtaaagaacagttccagagctatttacgaagaattgaaaaaaatcaacctcgaacaggctcaatctacgtaatgggcttcactgataaacaatacgaaaactgtattagatttaaaggtgaaatcaaagaattaaaacaaaaaaatcccgatcaattaactcttttttagttaacctcatacattttttcagaggcttatactaaaaaaacctactctatgagcaggtttttagaatttgggattatagcatttaggatttgcgctcaatagaaaacgaattagaatatcaaattcgcgaagcttatgattatagcatttaggatttgcgctcaatagaaaactaaactccgaaggtcaaattttagtaatccgattatagcatttaggatttgcgctcaatagaaaacgtaacattcagcaat

SEQ ID NO: 3458 - DNA, 10157 bp, synthetic construct
  source 1..10157: mol_type = other DNA
  misc_feature 1..10157: note = Synthetic
ttattagaaaagaggaaacaaatttgttttcactaagtggaatctagtccgatcagtctgcagatcaagtccaagatttgtcagctgatatgtgaaggtcggccgttctccttgaatgattcagaagcatacaacagcagactgaacatgacagaaggaattaaacaaccatacgtctttgtacttagagcggtaaaatagcgcgccgtactgacatggcgcttctcctcaactctttgtgggaaacttccactctgatgacatcctgtttgtgtttggctcaatgtggctgcaacacacagtgtttggctgtgggactctgacaacctgagggctgtgaggctttacgtgcaatgtgaaccaatgtgtgaagtaactggctacacaaaaaaagatcctgccaaacaccgattgaggcaaaataagctgcccggccagtcaatcattcattgcacatctaattttgagtctgtcaaaaaaaatcgcggctcctaccattcggatatttaacttgtctgtggtgccatttcagttatattttgatcagtagctgagtccttatttgaaccttttattatgtggtttgatgaagtggctgaaagctgtatacagctgctgaatgagaatttaatctcagtagaatttgtagtactagcgccagaatagaactggagtgaagtcaattcagtataataatgtaaaacattgcatgatggaattttgtcccatagatgattttttttttaagagtggtatgcattttctcattactcagttattcctccagtatctaaacactttaaacacaaataagaatcattagattttgtgtaggtgcttttctcttattgagattctctttaaagcagcaatgcatcaaaccttaaaccacagtggatcacctgtaagtgtaacctgccttctttacgtctatatctttagacaagccattcattgtgcaaccatggcaacctctacgtccttgtcatctgactgcatagatccatactcaagtagtcatggtaacagtgtcctctcattctcctgtgatgacttagttctcagggactgaggctaaatatttacaggctcatggttttatcccagcactgttactgagctgacgtcaaacctggaactgtttttgtaaataacttgaaaaggtaattattacctttcataaatgtatagggaggtgggtcgtaccattatagagacgtaatgtgcacactgtaattttcttatgctttgcttcctgtctgagcagctgtatcacagtgtaagtaagtccagttgatcgctgcactcacactggaggctcttcaggtcaaaaggagggctatatttgacttgtacacaaaccaggctaaagacggtgttgctaggcaactgttcatcttcattcaacaatcatctagttgagctgataaattataaatcagcgaattgttgataactctcatgcttcaacaaacatacaccaaaatactgtcctaatgtgcttatttcagtcccagaataatgtttcaatctggtgtcaatccatttggacagagtggtcaataaccaaatccacttgaatctcaggagtgatttttttagggtttttgtgcgcgtctttcatgccttctctaagcgatgccaaatccaccacagcaggcacgcctgtcaaatcttgcaaaataactctggtaggtttgtaaggaacgctcaccgaatcccctttgccgtaagcttgtgcgattgtttttgcgtaagcaaatggaaaatcgacctcttctccattgcggatgatattctctaacaacacgcgaatagaataaggagtcttttcaaagtccccaccttgctcttgaataaactttttaacatcgtaaaatgagtattctttgtcgttcacagacattttggacatataatcgttgtactgcatgcagtgtctcctgtatttttgtatcattgtgtaattgtatacaatttttactacatgaatattataacatgtataattttttttgcaagctttttttcatttattctgcaattatttttttgactctgacatctggtggataatggtctggcaagcagtcatcaaatgtcttttgtttactttttgtaattgtagaatatccctgcttttaattaattccagcatttctttatggtcgttgtaagcttgttttatccgctctgtagatgccagcgattttatttttaattttgataaaaaaaagttgtattggtctaatatttttgaagaaaccgtataatttgagctggctaacatctccttactgaatgtggttatgctttttctagcatcttcccattcttgattttggatttctctttcgtttacgtcgacaatcttttgcagtttgtttataaattcactcgtgcagttattttcgttttctaaaatgttttctaaaatgacattttctaatgatattcttatgtggtaaatctctctgaccagtgcatcgtctatttctatgatttttatgcgtccattaggcaaacgtgtcaaaataccctcgacctccaatctcttgaaagcctcgcggataggcgtcctgctgatatttaacctatcggcaaactcttgttctattatggtgtctccaaaatccaatacatcatctaaaatgtcttgcttgactatttgatatattctatcactgacgttaatacgcttgctaatcatctcaaacacctcccataatgtatttttgtatattatagcatagataccacgataaaagcaaatttatttatagtgtgatgatattgttgattttttagcatacatattagtgtggacttatatttaccttaaattactatctaaatggtattgtaattttttgataaatatactataattaatcctaaaaaatgtaaaaatacttgagagcatatctgcatattcctgaaaattgaaagaaattaaatataaagatatgagataattactttagattgcttaaaatagaatagtttacactgcatattatggagaaatatatgaacacatcatatctgaatgataaattacaattaagacatttattggctggcaagccttatcgcgtgggtttggatttaggggtaggctctataggctttgcagtagtatcattagagtgcatagacgataaaactatacctacggacttaatattaaatggttcaaggatatttgagacttctataggagctgcagaacgcagaggctttagaggcggtagaaatgcccaccaccatgatagaaatagaaaattgtggctgtggaaagtgctttccgaacattcaatgatgctgcctccagaatacaaaggtatatttattgaccataaaaacagaaggcggcacagtgatacttcaaaagtaatgttctccaaatctgttttgagctgctctccttatgatttgagatataaaggattaacgcataaattagaattaccggagcttgggtatgcattgtatcacctgtcaaatcataggggcagttctgcaatgcgggtaaatccggatgctacggaggaggaaaaaacagctcaaaaaagcatacaggaaacccaagagtttgctaagaaacacagcacagcaaatacatttgtggaattgttaattataaataatcaagagaataatacaggttttagaaacaagctgaaaagaaaatacgcattaatgcctacaagaaatttaatattaaacgagctgagtacacttcttgatacgcagagtaagttttatcctgatatatttaccgaagaatttataaatcagataaaatatattgtcaattatgagaacgaaatgatagttcccgattcagggagatgtatattttttgaagatgagcctaagcttcctaaatgtaattttttgaatgaagaacgccgtatatgggaagcgttaaacaataccagaatagacggcaaaccattatcaatggagcaaaaacaaaacttctacgagcatttgagagcaggtaatgatttgacaccggcaatagtcaaaaaagaggttaaatatgacaatattacgcttcaaggtaggaataaagacaatcaaaaaatacaaggttttcgatttaaagatttagaaaataaagatttctggagtagattggatgatgtgcaaaaagatcggttttttgcagattggacgaattgtgcagatgataataaattattagatattttgcaatgtgaatataatcttacttacgatgaggcgtacgatacgctaaacagcataagccttattggagattatgcgcctatcggtaaaaccgctatgcagatagtggttgaatatataaaaaatgattcattatcgtatttagaggctgtcaataaagccatcgaagacggaaagctcaaatctaacgcagaaaatatagtatacgatacgctgccttattatggagctgttttaagcgagtctacgcaagggtttataggtaaggcgtggcatagctccctcaaggataagttcaaacaagaacccaagcgctacaaaacgcctcatacaaataaagatgaaaaaaaatacgggcgtatcgccaatcctgtagtacaccaaacattaaacgaacttcgtaaattagtcaatgagatagttgatatatttggttacaaacctgcagagataggcatagagctgtcacgtgaattaaaagtaggtactaaagaacgtgacaaaatcatctcagatcagaatgctaacgaaaaacaaaataaacgaatcatggatgagtattgtattccaaacggtgtagacgaaaaatatattcttagatttcaattagctgaagaacaaggttgcatatgtccgtactgcttagaaagatttaaggttaaagatgtcgtttcaggagatgtggatatagaccatatttttcctcaatcccaatctgcagataactcaagaaacaaccttgtaatggcgcataaaacttgcaatgtacagctcaaaggtaacaggactccatataatgctttttccggtgataaaaactggagtgagataatacattttgttaaagagcaactgccgaacaaattatggcgattcacgaaaaacgacgaagagtacagagaatggctcaatcacagaggatttctagcgagattcagcacggataccagctacatagcaaaagccgctgcagcttatatgcaatgtttgtatgttgataaatcaaagaaaaatgtcaggacgctgaaaggcggcgaaactgcaactttacgaaaagcttgggggctgcatggaatcacccatgagcttggtaatagatttgtcgatgataacaatggagtgtattttcaccctgctaaaaaaatgcgtttggatcacaggcatcatgcattagatgctgttacgatagcatattccacaaacggctacagtaaacttataaacactctgagcggaaagggctttgagcttcaagcaattagagaaatgatacccctgcctaatatagccaaaatctaccaaaaccaaaatatagacgagacagctctgggcgataaagaaacatttgcgacctacataaaagataaaatcaccaatcattcttatatcagcataaagtatgaccacaacaaaaacgggggattgttaaagcaaactgcgtatactattctatttgaaaaagccggcgagattgttttgtctactaagaaaaaaatagatggtataaaggataatttgatagaagtggataaacagctgcttccaaaaatgtataccgaagaaaagctgctaaaatactcggatagcgaaagagccaagctgcaaaaactattggaacacaacaagctaaaaagagaagatataatgaatgcaatgcctacagcggagcaagaattaacttctgaaaatgaatcgttaaaagcagaaggcaagaaagaaagaactattaatgaaaactctatacttaaacgagctttgagtacggtaggcagtttttactatcaaatttcaaataacgaaaaaagcaaaaaatttattgttgtagagcctgctgaagacagggtaggggtggcatacgacacagacgaaaatctaagaatagacctgtaccatgatagcaacggcaagctgtgcggcgaggttatcaggaaagtaaacgccatgaataaagattttattccggactatcagaaatccggctatacactgctggaaagtatatatcagggtgatacgctggagatagatttggtaaatcataagacattaacagataaatccaatctgttagagaaagccgcgtctgttaaagctcctaatgctccggcaggcaggacatacgtaagagtggcgacatttacagaagtaggcagcggtatacagatacacttacagaatttactaaaagcgcaaaaaggtaatgatgcttcgtttaatattaattccatgcaaaaatggaatgttagaagagtggtgttatcgtcggtaggacttacaaggtatcgttcgccaatactcaaaaacaagcaataaaattagactttcatacaaaaaataagtatactctagtagagataatttcttgaaacagggtatacttttttttgaggtgaaatatgtggagaataattgatattggcggagacgatttgtttctgcatacggagcgtgacagtcttgtggctgttagggatagtaaagagcagagcagggtgcatttttcggatatacattctattatctgtcatagctatggggcggtttattctgataagatgttcaaaaaatgtttggagtttaacattccattgattatctgtgacgataaacacacgcctcaaggaatgttattgccttttatgcagcacacagatgccggaaaacgctttaaactgcagttaaatgcaactgtaccccagaagaaacgagcttggaagatgataatcgaagaaaaattacgcaatcaagctaaactattagaagcggttgagttgccatttgataaaataaaacaattatcgaaacatgtattatcaggagattctgacaacaaagaagcacagggagcgaggatatatttccagagcttgttcggtaaagattttctgaggacttcggacaatgaaataaacgcacttttgaattatgcgtatactgtacttcgttcgtgtgtggcgagagctgtaataggtgcgggattgcatcccagtctgggactgcaccacagcgcaaatcacaatccttactgcttggttgatgatttgatggagccgttccgcccttttgctgacggtattgtattggatattattaaaaattatgatgatataacaatctgcccgcaaattaaaaaagatattattcatatgagcaaaatgtcaattcattatcaacgagaaaatctggaatttacaacagctatgcaatattacacacaaaattttttcagatatttagaaggaggggagatgaaatttcccaagttcgattatgatttcgccttataaatctatgtggctgatagtgtcttttgatatttccacgcaaacaaaaatagacagacgtcgtgcaaataattttcgaaaggatttgataacgctaggttttataagacttcagctgtctatttatagtaaatactgctatagtaaggataaagctgatagaacttcagcgaaaattaaaacttttttacctgctaatgggcatgtcacgatttttttcttgacagataggcaatttggattgactaaaaattttttcggcggtatagaagaggttattgaagaacctgaagatagtatgtttttattttgataaaaaggagcctccttacaagaaggaggcattttacgactaaagcgtcttgtcagagcactttttgtaaataaatgtaacataaatattataccacagattatctggtttgtcaatcaaaattaccaaaaaattgattattgcataataaacaatcaatgaaatatcagcttttttgaggaggtttgcttgttatattttgtattactcagcacttagcgaagtaatattatattacatttatttacaaaaagcaaccctaaccacctggagtgttgagataaaagactacgaattatattacatttatttacaaaaagcaaccctaacgattctcagctcaggcaaagattctttaaaattatattacatttatttacaaaaagcaaccctaactggattgaacaaagctttagcattgcagaaattatattacatttatttacaaaaagcaaccctaacacgatttgcaaaaaccattccaactcatatattatattacatttatttacaaaaagcaaccctaacagattgtatttgtgtaaactccagccctgctttaggcaaacaagggtatcagcgagtggatttttatatactaatctgtgtggatgagttgtacggtaggcgacacagagcggggctggatgaattgtgctgatatgcaggctgtcaggtggttttgttcatgtgcaatcgtgccggcagttttgtatataactcaaattatgtattcttatatctaagtcatgctagcgggtttttgaattatcacaatgcgagatatggtgttttaagctcatgtacaactaaacaatcgcgctggtgtgtgttggggcagggtaagataatacctgtgagctgtaggggctttaaaaggcggtttctcgcgttctaattatcggtgattgatgattagttgagcggttttgcgatgatttgatttgtgaattggatttacaatgttttgtgattgaattagtttatgcggatttgttgtgatgatatgcagattagtcgtgtaagttatgtagattgtggggctggatgaattgagttttgtagagtagctgtataaatcgcgtggagcgtttttgcgatgatttggtttgtgggttggatttataatgttttgtgattatttttgctgcactgtatcagctgtggaggacctaggcgggttggaaaacttaacaacatcgtgtctgtgctcattgcatcatcctgtagtgtatgttgcatcactccgttttcactcacagcaaagtggggacgtcaggaggaatgggggcttgccatttcatttactgcagctgatatatccattattgctgcactgtatccgttgtggaagtcccagaaacattgaaaaacttaacaatgttgtgtttgtgttcacaacatcatctggaaatgcataaagttgtgttgtatagctcctacaaaaacattacatctgctgtgaaagccatcagagactactgatgatgtagtctatcgtgttcttgaaggcgtgtcctatttcgtggggttagatttcagccacttccccttgaaactttgttctaaggtcattaataaatagactgatagtaataattatatctaaaaaaaaaatccaaatcatttggacgtttgaggtaagccttaccgactgatatcaagttttggacagacagttatgaacctcagaggatgactttcctctagcgctaccaagcttccaaatcttataattagcaaatgtgagcaaacttaccagacaaaccaggatgtaaatggtttacagtgtaatagggctggacaattatggcaaaagtaataatcccgattattttgattgatattgttatcccgattttttaccatgatttttaattggctttaagaacatcatgcattttggagcactgacagtagtgtttcctttaaaagctgctgtctttactgttaggcctacatacagtaaaactaaaagagaaatagaaattgttacatatatagaaccagcacttactgattatatgacaagtgtagtacatccttcatttaataatttacaaatagaaacatattatgatgaagaattagatagtattatagctttaaaaagattaaagaatgaaaaagatactgaaatatatatgtatagcaaattattaggtattgattttgaaaaaggaattgaaacagaaaaaacgaaacttgatactaataaaagtcatgatttaaatgtttctaaatatccattatggccagtgctttcatataaggctaaaataatattagatccttatgaaaaacagtctttttactatattgtaggtatagaagaaagtaag

SEQ ID NO: 3459 - DNA, 23130 bp, synthetic construct
  source 1..23130: mol_type = other DNA
  misc_feature 1..23130: note = Synthetic
gtcgccatctaccaagccccgccaggctcttgccagaccaataccaaaccagcagaccaagcacaggcaaaaccattagccagccgggccgcccgaaggcgaccgagatcccggcgattgatttcataaggctcggcatgccaatacccaagggtcaggaattctcttgcaatcgctcagtttttctctaaagcactgattggccagctagtaaggggcggatacgctttgggtgcgtatccagtcgatccagccggccatacaaacatattcgcacgtagggaccaaaattcatagcctcaaccgctgcactcgatgattattactgtcaatgaccgaaacggctccctgactgtccaccgccagcgaccatggattattgagctggcccggaccccggcccggacctccccaaagaccaaggctcataccttcggaatcgaatttctgaacacggctgttgccatattcgcacacatacaaggacttgtcaggcccagtgcagatgtcgtatggatagctcatctgcccgggatttgatccacgctcgccccacattctcaggagctttccagtggtatcaaaaacctggatccgatgattgcaactgtcggccacgtaaagtagatctttgtcgtcgatggccaaggcgcgaggtctcatgaactgccccggctcatagccatggccaccccattgacgaagccagaccccctccggagagaaaacctgaatcctgtcattgtcgccatactcgctgacgtaaaactggccctgagtgtcgattacaacatcggtcgggtagccgaacaggcctggggtatagccttgaacgccttggccaatctgctggagaaatcggccagtaagatcgtatatcatgatccggtagaagtgcgtgtccgccaccagaacgcggcccagtcgatcgaccgtcaggccacttgggccatccacattcagggctggcatggtccagtggaggaggtattttccgtcacggtcaaagacctgaatccggtcggtcaggtcagcaatataaagattgtcctccgcatcaaatgccgccacgcgaggcttggaaagccacccaggtttcgttcctcgaatcccccatacccgttccggcctacccgcagaaagctggccgcagccggtggggattgatccgaacgccatggcacccaaggctttcagccagtttcgacgcgagcacgatggccggtcatcaggcgggtattgcggattcccagataaattgaaccacgtttgcaatggcggcacgaggttttccagtgattcggatcggtctgacattgattttggaccggatcaggaggaattcgcaatagccctcccgacgctttatctgaaatcaaatcctgatcgttttgatgatggtgccgataaggctggcaccatagctgttttgcatgccactaccattgagcaaaacctgataattgagaggcttggggcttttggaagcactggcgaatgtcagggtgatcgttttcgaggacgatttataggccgcacttttgagtcgaacggcgtcatcgtcgcgggttccgaaaaggccgtcggcaccggcctccgtaatcgtccaaaggcttgtcagtttggcggttgaggcgttgagtgaggccgagaacacggcgtccaggctgcttagttgctggtttgcacgcttgcccttcaggctgctgatggtcggcctggggtcgtcgtcgagaactttcagaatggctgtttttgaggctcccaacaatgcgcctgcagttttgggctgaccgagttggatcgagaaaacctgatccggctgggccagtttgtcattacccaaagggatttcaatggtcgtggatgccacaccagcggcaaatgaaatctctgatggcttgatggttgagactttcgggccagatgtctgagtgattgtccatggcaaaacaaccgtgccaagggttccgcctgttcgggtgacggtcagaaaggccttgccagcggcctcgctcacctgggaattgatggaggctgcggcaaactggaaggtgccgggcttgtcaagatcgttgttgatgacattgatggatcgagttccgattgcaattgcgacaccggccgaatcggtcgagagaaccagattcaggcgggtattgggcctgacgatatcatcctgaatggcctggagcgataagccagccaccccctggccggcttcaaaatgaatgacaccctgattggccagcggttgaatcagattgtgccaggccacgcccgaacctgtaatatcgatgggctggatggtcaaatccatggggcttgtcagcaatccgctgcgcacaatattgacaatgacctggctgccttcatttaactgaatttccgtagcagattcaaaaccaatcgaagtgtcgtcattgacaacgaatattggcttaatgttcgtggttgtgagccagttggccgacccggatttcaattgcagattcaagcgtgtatcaggcctgatgattgcatcctgaagggcttgaaggatgatggtggcttccgtctgaccggcattgaaatgcaatgcgccattatcaggcaggggttgaatcaggttttgccagacttcggacgagcctggcaggttgatcagcttcaaggtcagatccagagggtccatgattgccccgctacgcatgatcttgactgttgcctggccaccctcattcaattgcaactcggtggaattgtcaaaatccacaatcccgtcatcattttgtaccaataatgttttctggttggtagagacaacgacactgggcgaatttgagaccagttgcaaggtgacctgggaatcaggcttcacaagattatcctgcaaagcctgcactgtgaatgtggccacagtctggcctgcattgaaatgcacgattccattattggtgagaggttggatcaggttctgccaggactcacccgagccgagattgacaggcgatattttgacatccaaagggtatgtcagggcattgctgcgcacaagtttcaggctgatctggctaccttcccgcacggggtcgcgggtgacggtctcgaaccagactgttccgtcgtcattcatgatgcttactgggaccgtatcgagagcggtattgaaaattgcggacgccgacgtcaatttcaggttgattttggtgtcggcccggatggttttgtcctggatggactgaatgacgatgctggcctggatgtcgttggcattgaaatggacacgtccattcagagagagcggcacgagcaggttttgccagatctccgtagagccattaatatcaacaatttgcacatccacatccgaagccacttcgatggggccagtacgaatgatatttaaaacggccagcccaccttccttgatcaggatttcatttcctgactcaaaccccacagatccaacggtatgcgctacgaaaaccggttttgtgtcgttgaggatatttgtatttgaagcggtggaggtcagttgcaggatcagatgtgtgtcggcccgaatgagtccgtcctgaatggctgtgatgatcatgctggcctgtgtctgaccggcattgaaatgcaccagtccgccgttcggcaggtcttgcagcaggttttgccagatttcgcttgagccggtaatatcggccggagtcaccagcacatcgagcggatcggagttggctccgcttcggttgatattgatggcaacctgtccgccagccttgacctgggcctccgtgggattatcaaagccgacggtttggtcattgtttaaaatcaaaatggaccgagtatcgatagagaccggaaaatttgcggacgaagatgtcaatttcaggtttaatcgcgtgtcagtgcgcacgacattgtcagaaacggcctgaatggtaaggcttgcgatggactggccggcatcaaaatgaactacgccattattggccagaggaaggatcaggttttgccagatttcactggttccggcgttgtcctgtggtgtgacggtcacgtcaagtggatcggtagccggcccgacccggcggatgtttaaaaccgaagcgttgccctccttgagggtgatctcctgcgtggaatcaaagccgacggagccgtcgtcgttgaggatgaacaggggttttgtattgattgccggaatgtaatgatttgagttcacgaccagttgtaaattcaaatgggtgtcggcacgaatgacattgtcgacaacagtctggatcgtgaatgtcgctgtggcctgattagggttgaaatggaccaggccattattggcgattggcaggatcagattctgccagatttctgatgagccggcgatatccttcggtgtgatggtcacatcaagcgagtcggagatggttccctggcgggtcagggtgatgatggcgctatagccctccttgatttggacttccgttgaggtgtcaaacccgacctggcttttgggctgctgggcaaggtcgaagtcggatttgagattattggccgagactgtgatcgaccgggtccaatactgagtgctgatgcctggccctgcaatgctcagggtatagttgcctgccggaacgccgtcaaactgatatccgcccgaggcccatgtgctggtggcgaaggttccgcccgagccggtcaggctgacgctcacgccgccattgccctctccggcgttgtagaaatggtcacttgtggtatcggtaaaaacgacacccaggacgctggaattggtgcggttgaagcggtcgccaaagtcttcggtcacgacgagagggccgacctgggtggctggatcggtttctggggtgatggagatgccgagttccttgaagccaccgctgatgaggttgttgcggtgcccacgcggcgattgcatgccgtccgtgccacttccccagtcgatcacaaagccggcctgggcataggcggggctactggcataggcgaagatgttttcgccgtaagtgttccagttggagtatcctgcggcagtgattcgggtgccgatatcactttcgccgggcaggacgtgggcttgtgaatccttagcgatcatatttaggttgtgacccagcgcggcatcgttcagataggtgttccaagccacgggcggcatagtgggcagagccgccagttcgcttttgagcacactgagagtcacgccaaagccagtgactgcgcctgcgacaccaggtatggggctttgcacagggctggttgatgagatgtagcggtcgtattcaccagacggatccatccggaagcgattgacccattcaagtagctcctgctctagatttgttggcagggcgggcacatcgcggcgttccagaaccatgttttcgataaaatagcggcggcgaagccatgaggatggtttttgtgcacgggaagagcttgaaatcaaggagaatcgcatggaatcactccgtatcggacaatatgtttataaggcattataacttagaggattagccccgtgcaaatagagaattagaaaaattcccggaaaatccaaagagttaggaattatccggggactggaatgcgaaagatatttgaggaatttgacttaaagccagattttgacgcgatctcgaatcgattcgggcaatcgtttttcgacgattttgcgaatcgtgtcggcatgctggcgggtgctgaaatgagagacgatgatgacctcgtttttgaacctgtcggcccgagcgacgatgtcttccaggtgcgtatggccgaatttgtgggagtcttcaggccgttcgaacttggtgacgaaagtcatctcgcagattaggatatcggcgtggtagattgccgggtccacatccaggccgctgggcgaggtgtcgcccatgtaggccaatcgaggcattcggaattcgctggaaacttccacgcccgagagccttaaatcgcggatctggtggccgtcgagatgggccagttccggcttcagcttcttgcgtttttcccagacaatgaaccccagagactcaatgcggtgatcggttggaaaggcactgactgccagctctcgcgagagttccacggtgtcgccaggcttcagcccgaccagtcgggcaggagcccggccgcggtcaagcctctggacgactcgcagcaaggcttcgcaaggctcgacgatctcgactggcatgtagattgtgggcggctccatcttcatcatccgtcgacgcgtcacaagtgccggcagggctgcaatgtggtcgaggtggccatggctgacgaaccagttcggagtgctcatgaacgaccacggctgaaggccgagatcgaagccgatcttccattcaggaatacgccaatacgtttggacggccgctcgcgaatagccctccaccgtgatggttccgtgcttcatggagagcacaggggcattgtctacaggcgtttccagcgattccaggtcagcttccataaagattccggctcgggtgcatccgctgacaatggcgatgcccccaatatttgacagggccagtaggctcgcacttgcgctggaagacctcttacctgatatcataacaacctcaagccgttttgtccgtaaccaaaacgccctgacccttgcttgtattgcaagcctcgtccccgaagacatggcttccaggcctgatctcatcgcctcttgcataccatcccaatgcccctcaggaaatgccagccagccatgactgacccaagttctcagaccaaggtcctcgtctacggacctgcttatctggatatagtcatgcgggttggcctgccgctggttgctcaaggccactctcccattgataaaagcgtggatgggacccttcagcacgcccccgacttgcaccaggccctggaattggtcgatccttccggcaaacgtctcatcctgacgggccttgatggcaatcggcatccgaccgggaggctcaggctcagccacaatctgcttgatcatccgctattgtcaatgccggccattgaggtgaccgaatcgcttggtgggatgggggctggctatgccgcagcactgggcggagagctcgtctctgccctgtcggacattcgcgaccagccccgagaccgcatcgaacaggccctacgaatgaaccgagtccgccattgccccattctgattcacgggcaggccacggactggaccctgattgtctcaagcggccctcatggcgacaaactccctgtcggcctgcgcggctgccatgcagctctgagagctgccgacatgatccagtccggcccttggggcgtagtcgtaggggcatccctacataacgctctactggccgaattgctggcacaccatgccgatagtctgcgcgtcctggctccggccatgcgcaattgccgcgaccagcttatgccgcttggcgatcttgccggaatggcagatctcatcagcttgaaccatcatgaatggaatgagttgcggccagccgaccgccaggcctggcttcattccgacgcgatcatctgcgtcactcaaggccccaagggtgcgcatctctcctgggtcgatcccgccggcaacaggctcactcatcatgaacccctcttcatgcggaccatgccacctgtcgacaccaatcgggccggcgaggcatttgccgccttcctgctccgggaattgatccaacagggctggtcgaaacgctccgggcctgttacacaagaggggctccaatgggccgcccgtgtcggatctgcggccgctggcctgaccgtcaatcgacccggattcgggttcccgtccgtgtcagaactcgtctcggtaatcaagcttgggcagatctcctgagggtggtgcacaatgttgaaacggctttggctgatctcgcttctctgtcatctggggcccgtgcttgcccaggcccaagaccctgtcacacagaccattgaaaaggtcgatcgcgcctcggccaatccctccactcccgtacgtaagcccggcgggcgacctcttgagactcctcaaaagactctcgtcgacccgcgccgatgggtcttcattgccgtcgtcggattcctggtccttggcggtggccgaaagtggcttgcgggcaggcgagctcgcgatatggccgacaagcttgccgccctcaaggccacgcccgacgagatcagggcctcgcacaagcatggccgaatcgtcgtccccgagctcttccgggtcatggctgatgggccttcgccggatcatagactcgccgctacccaagcccttgtacgactctggaaagccgatgagctcatccctgaagaggaaaaggccatcctcacccgctccctacgcgtggattggcaaatccggcgcaagtacccaaggctactcacaggctctctactcattcgtgcctcctatgggccgcctaagctggctgacgacggacttgaactctggctcatgcaacacctcagatggtcacatcgggtcacaggaacccgacgcgctgccgacgatgcctggcaagaacccactcccgcccctgcgccccaagccctcctccaggtcatcgccgacgacttcccggacgacggccctcaccggctcttgcttcacctcaaggtcaaaaccctcggccttaccgacaactgggaactcgacatgcccgcacagtcgaccagcttcgaatgggacgaccacctccagcccagcgccctcgtcaccctgcccgactccgcaagagcctcccaatgggcactcgcccttggtttcatgattgccccttcagccgacaatcaggagccattcctgctacccctcactgaccagttcgcccttcgtaacccacccatacccacgctccaactgccttatccctctgatctggcacaccgggtcgtgcttgagtttcagggcatctctgctctctggcttgccggcgaatggctggagcatacccactcccagccccccctgggcctcttccccaagccgtggcctgatcatgccatcgccctggaaccccaatccaccttccctcatgccggccattaccgcatgcggctcatccttcagcctactcctgaacgcggctggtccgaccccttgatccgaagcgtctggcctgacgcgatcctctccgaatgggtgggtgtcgagctggtccgtcgataagcaccccaccccccacacacacacccggcaaaacccccttcagccttgtttcgcactgtgggccgttctcctctccattatagaggttgtgaagatcgggccggcggcttttcgggccgccgccggtggccccccagcacttcgacctccaaccggtcgttgtttcgcagggcgcgccgttgttattgacctgaaaggggttgcgccgccttggccaaccctgctttgccgctggcctctgccatcgggccatcatcggccccgctcaggtcgccttgtttcgcagggcgaaccgttcttccctggctgtaaagctttgtggcgatcttgccagagcccccccgcatccttcgaccatgcccgggccgcgctgcgcccgacttggatcgccttgtttcgcagggcgaactgttctcattgcagtgtaaggctttgtggattttctggtgctcagcccggggtgattgggcaatgtgtacgtatgtttagtattttttacggggcccgaacggtttgagtttgatggttgggcaagacttggctaagggttgggtgaaaagatttgttttgaattttccggttgtattaattttgatggtcagaaccattctgggcggagggactggattaactggcatcaggtgtacgaagaaaaagaaaaaaagtaaaaaagccgtccccggattagtggttacggctggatgctccgcagagcagtgcctgcaaattttttgtctttgttgcgtaaagactttcgagagcggatcggttacacttcaattatcctaacctaggttggtttctcttgtcaatcggattctttgaaaaatggcagattccataacggttcttggtcttgatatcggctctaattccattggctgggctttggttcgcgatggcgatccagaggtcattaagcctttgatgatgggcgttcgggtctttcctgaaggggtggaccgtgaccagacgggtggtgaaatttccaaaaacgaagctcgcagaattgcccggggcatgcgtcgtcaggtggtgcgccgggcgcgtcgcaaaaaacggctccgaatcgccctgattcatgccggcctcttccctgcggatccgggcgcgcagaagcaactccttgacaccacagatccttacgccctgcgggagcgcgccctgcatgagcccctcacgccccatgaagtcgggcgggtcctgatccatctcaatcaaagacgaggctttctctcgaaccggaagtcggatggcgggaagaaggagacttccgaaactctcgaaaaaatctctgcccttgccactcaactgggcgatcaaacccttggccagttccttgccggaattcatcaggagccacacgagcggcttcgtggacgccacacccggcgcgacatgttcctcttcgaattcgagcagatctggcagcaccagcgccaatatcacccggatttgctgacggataacctgaaattcggccaccatccagaccagaaatatccagttgagcccattggccactccaaagaaaccactctgcttgaagagtttggaattcatggcctgatcttctttcaaagacccatgtattggcccgcttctgtcgttggccggtgcgagctggagccccgcgaaaaacgcgccccacgcgccgaccgccgctttcagtattttcgtatcctcaatgaagtcaacaatatacagattgttgggccacgcggcgacaagcgagttttaaccgaaattcagcgatccaaactcattcagatgctcttgacgagcgaggagtgcaagtttgacaaaatccgcaaggaactctccatctctgaggacgaaatcatcaatctccagcgcggagaccgcaaaaaacttgacggccacaagaccgatcaccatctctccaaaaaaaatctcttccataaggattgggccaatctcgccgggccgctcaagaatgaaatcgtgcatagcctgatccacgacgaagaagaagccatcctccagcgagccacttcgcaatggggatgctcgcctgagcgggctcaggccctttccagaacctttctgcccgaaggctatgcctcgtttagcattatggccattgagcgactcatcccgtttctggagcagggcctccgcctcatggccaacgatgccaccgactccgcccttcatgccgccggctacatccggcctgatcaacgggtggtcaaccctcaatccaccttgcccgagatccctgaatccatcaccaacccgcttgtgcggcaagccttgcgggaagtgcgcaaagtggttcatggagtcattcgcgagcacggaatgcccggcgccattcatatcgaactcgcccgcgaagtgcatggaggcgaggagcaaagagccaaaaccaccaaaaccatgcgcgaaaatgaagaccgccgtgaagcggcacgcgaatccatcaaggctctcggctatcgaggcactcgcgacgacgtgatccgttatcagatctggagagaccaaaaagaactctgcttttatagcggaaagccgatcagcaccgttcagctcttcggcggagaggtcgacatagaccacatcctgccttatcccagaagcctcgacgatagccagtccaataaggttgtctgctttcgtgatgaaaatcagggtaaaggcgatcggactccctatgaatggcttgccgattccaacccgcaaaagtatgaatccatcctccagcgcaccaaatccctgccgcctcatgcccgaatggccaagctcgaccgcgttactcgcaagcagcttgaacttacggaatttatcaaccgccagcttactgacacagcctatattacccgccttgtgcatggttatattcagcagctcggcattgatgtggtctgtgtcaagggccagcacaccgccgaattgaggcacctctggggtattaatgacatgctccgcgatgatggcctgaacctcaagaatcgggaggatcaccgccaccatgccgtggatgcccttgtgattgccatgaccaatcggagaacccttcagggcctttcccattactggaaagcccgatccgaatttgccagagacaatcagcgcagaaccattcttgcaccgccctcagaaaactttcgggaagctgttgaagcccttgtgaatcaaatcgtggtctcacacaagccacgccgccggattgcaggcgctctgcatgaagaaacgctctatgggcccaccgataaacctgaaaagggcatgcccggcccacgtggacacgccaaaaactggaaggaattgcccggcactttcgttctccgaaaggaactcatcagactcacactggctgaggtcctgaaaattcgcgacgatcaggtgcgccggcttgtgatcgagcggcttgccagacacggaattgatccggaaagcaaagccaaaatcttgccgaaagcgtgggccaatatctgggccgagccgctgcatatggtgggcaggcgggggctggaggggtcgccacatgccccggtgatcaaatctgtgcggattttgaaaaacgaccagaccattcgacccattcgtggtgggtcggcctgggtcaagccgggcaatacccatcatatttgcctgtttgaaattcctggccaaaatggcaaggagccaacccgcgatatggtcgctgtgcccatgatcgacgccattgcccgcgcccaggccggtgaatctgtcatcagccggacacaccccaccaaccccgatgcccgattcttgttttcgctcacaaaaggtgaaatggttcagggagtacttttcggtgtagaatcgatttttacatttagctcagctcactcacaaacaaaagttatgatattttatcaacatttagatgcaagaagagattctcatcctgatctggaaaggaaaaaacgtcaattccggccaagtccgaatactcttaatgtcgagaagatccttgttgacccgatcggccgaattcgtcgtgcttccgattaaccacacaaatgttgcgtttaatcatcagggggagtaaattccggattcgttctggagttttgcgtagaattggtaaaataggtggcggcatccctcctttttacatgggccaccttgatgattaaacgcaccattgaaatttcgtccgagccggcccatgtcgcgctccgcaatgaccagatccagctcagccggggcaaagacattgtgggcaccatcccgtgtgaggatctgggaattctggtggtcgatcacccccagaccaccttctctgcctgcgccctggcccgtattgccgaactgggcggggtggtggtgctgtgcgaccgcgctcacttgcccaccgccacgctactgcccaacactcgccacacagagctcgtctggcggctggccgatcaggtagacgcctcgttgcctcataaaaaacggctctggcaacaaatcgtatcggccaagattcatgcccaggcggccttgattgatgaaaaatcaaaggcctttcgcaagttgaaatcgctggccacagtggtcaagtcgggcgattccggcgcggctgaaagtcaggccgcccgaatctattgggccaactggctgaccagccacctcccacctgagtcgcctcaggcagaattgccgggcaccgagcccgactatgacaagccttatcttgctcccagaattccgatcgacaccagccgcaccaccacctacgacgatgagcccgagcattttctgcccgatattggcgagaccatcggcacggcgggccagagcctcacgcaaggcgagctgtgggccacggccagggcctttcggcgcgaccccgacagctcggagctcaatgcatttttgaattatggatatgccattgttcgtgccatcacggcgcgcgccctggtaggggcgggtttgaatccggcctttgggattcagcattccaaccgggggaatccgttttgcctggccgacgatttgatggagcccctgcggcctttggtggatcggcgggtgaggcaactttggtgtgaagaggggcggcgcacgctcgacccgcgcacgaaagccgtgcttttgggcacactcacggaaacggtgcgctacgacggcgaaaatggcccattgatggtggtgatgagccgttatgtgaattcgtttttgaggtgcctgagtggcaaggaccagaagattctggttccccggatggtggactgaccgatgaaaaatttcgtcaggatgtcattaacccgagcagaaactttctatggaactgacaagttaccgcaccatgtggatcatcatcatgttcgacttgccggttcaaggtccggcagaccgtcaaaactatgcggaattccgcaggatgctgaagcgggatggattttcgatgcttcagtattcagtctatgggcgacattgcccgagcgacgagaatgcgcaggtacacatagggcgggtggagtcgtatttaccgccggaggggcatgtgcggatattgagtgtgacggagaagcaattcgagcgaatgcgctgttattggggaaaaatgcggacaccgccagaggaagcgacccggcaactgacatttttttagagcctgtcaggtcgcaacacctgacaggttctgaatttcggagaggtctagtgtaaccgatccgagcccgaaagcaatccgcaacagaactggaacaggcaattaaacagaaacgagtgtaaccgatccgagcccgaaagcaatccgcaacaatcaattcttaatacaatgggcagcaggagtgtaaccgatccgagcccgaaagcaatccgcaactaacaacgcttgccgtcgcggtacttgattagtgtaaccgatccgagcccgaaagcaatccgcaacatcgggacgtcttggaactgacaccgctccagtgtaaccgatccgagcccgaaagcaatccgcaaccttgagcatcatatcatatgcccagtcaatagtgtaaccgatccgagcccgaaagcaatccgcaactgctcccgccccatgtctaccttcggtatagtgtaaccgatccgagcccgaaagcaatccgcaacagatcggctggtcaagggcgatgtcatcgagtgtaaccgatccgagcccgaaagcaatccgcaacactggacgctcgccagcaccagctcgctacagtgtaaccgatccgagcccgaaagcaatccgcaacgaacctcgttctgaccttcgcaatggtcttagtgtaaccgatccgagcccgaaagcaatccgcaactccagttctcaatccgttgagattctcgcagtgtaaccgatccgagcccgaaagcaatccgcaaccgatgccgcccaggcacgcatgttggatgagtgtaaccgatccgagcccgaaagcaatccgcaacggaattcggcgggaaaccgacgatctggtcagtgtaaccgatccgagcccgaaagcaatccgcaaccaagaccactacaaaggcaatctggacgacagtgtaaccgatccgagcccgaaagcaatccgcaacaatggacgcgtccgggacagttgggggttcagtgtaaccgatccgagcccgaaagcaatccgcaaccagaggtgacacgtgcctgattacatcatcagtgtaaccgatccgagcccgaaagcaatccgcaaccaccatccaacgggaacggaccactggtaagtgtaaccgatccgagcccgaaagcaatccgcaaccgaatggacaagcgagcggcattcaccgaggaatccggattttatgtaggccgggtgccctcacccggcgttttttttctaaagagaggtaacgccatattcaatttgattttatgcaggattttccgtttaatccaagcaccgccgggtgagggcccccggcctacacgaaacaaaaaagcaacgggggcgagttttgtttgaaatgcatgcactcactcacgcaagcatgcactatcaggaatgatgacggggcattgagtgtgtggtggtggtggggatatttcgacctgaattccttgttttttctggacaggctcttgtccaatgggttagaaacaggtgcgggcaggattgcggatggggccaatcgggttttggttgaagaggtgtagcagatggttcgcgtgtcaaggaatgtctgggtattgatggcatccacggctttggtggtggtggtgcttgggctggtgcctgatggctggcttgccaggccggctgattggttgatcaaccggtgggccagttggtatccggatcgttcgcacgagaaatttctggaggtgccgctgagcgattgcccggagctcaaggggattgtggagccggtgacggtgctgatgggcttgcgatatccgaatgatggagggatcggcctgaagctgcgggataatcggggagcgactctggaattttgcgtggttggtggtgaggggaagcgggccgagggcgagaacgtggcccgcggtggcggggagctggtattggggaatgccataccgcatgaaaacaagggccggcggattgagaaaggtggtgcccaggagcgggcgatggcgggtctgcttcagcggtggtataggcgattgccggcctcgcgaattgcggagcgacaggcgaatgatgtgtgcatgagagagatcatgaaaattcttgagcagaggaatgaatagacggggcggggaattgcgatttgaaaaaaaaagggatggaaccgattgccggtggcgacgccttggtctaagatgggcgatgggcattttccgtattgaagtgtctgtgcgggtagattgttttggaatggtcacaaatggaaagattttgacgatgcccgattacgagatttttgagcttggcaatgccgtgcttcaatcaggcgcgacaattcgcaatgcgaagcttgcctacaagacatttgggacactttcggcgggcaaggacaatgtgattgtttatccgacatggtattcgtcgcagcatcaggacaaccaatggctgatcggcgaaggcatggctctggatccgggccgatatttcatcattgtgccgaacatgcttggtaatggtttatcgagttcgccgagcaatactcctgagccgtataacaggtcgcgttttccgcgggtcacgatttatgatcaggtgaggcttcagcacaagcttgtgagcgagcgatttggcatagagaagataaagctggtgacgggttggtcgatgggggcagcgcaggcgtttcaatggggagcgtcgtatccggagatggtggagcggatacttccatttcagggggctgcgcgttgctcgcggcacaactttgtatttttggagggagtcaaggcggccctgacggcggattcggcttatgaggaaggatggtatgagcgagcgccacagaggggtttgagagcgatggcgcgggtttatgcaggctggggattttcgcagacattttatcggaagaatttgcatatatcgatgggttattcgtctcttgaagattttttggtggcattttgggaaggattctttttgccgaaggacgcgaataatttgcttgcgctgctttggacgtggcaaaacgccgatatttcaggcgacccgaaatatgggggtgattttgatgcggcattggggtcgattagtgcgaaggcgattgtgatgccagcatcgagcgatctttattttcctccggaggatagccaatacgaggtggagcggatgcccagcgccgagttgcgggtgtgcccgacggattggggccactttgcgggcggcccggggacgagtccggaagacatcaaatttttgaatgctgcgctagaggaattgctggcaagataagcatggccagcgaacccgggctggggggggacgattcgcagaatggatcagacgacaagcctggcggcgcagaatttaaattcggggattttgccgaacgggtcaagtgcggagttggtcaggaggtttgcggcggcctctgcaaagcagaatgggatgaacaagaggccgggcggaacgtcgcgatcggcccgggttttgagcttgatggatccgcgacgggtctcgaccgtgacgaactggccagctagagcgccgatgcgtcggagttctttggggtttatgaagacggttggctcaggctcaaggtcgtccagaacgccggcgcggcgggtcatggcgccggtgtgccagtgttcgaggactcggccggtggtcaggacaagggggtattctgcgtcgggcacttcgtcaggcggcaggactttggtgggcaccagcttgccgcggaagtcgggggttgggaagtggtcgccgaagatcacttcgtggccggcttcaagctcgctgtcgcagggataggtcactgccccttcgcgctccaggcgattccaggtgatgcccttatagcctgccaggccttggcgcatttcattgaaaacatcgcaggggccgtcgtaatgccagtcgagaccgagtcggttggccagttgttcaatgatccaaagatcctgacgggcctcgccgggcggcatgacggctggcctggccagttgcacgcggcggtctgtgttggtgaaggtgcccgatttttcagggaaggctgaggccggcaggatgacatctgcatggcaggcggtctcggtcaggaagatttcctgaaccacgagatgatcaagcatggccaaagccgtgcgggcatgatgcaggtcggggtcggacatggccggattttcgcccatgatgtacatgcccctgatcgacccggaatgaatggccctcatgatttccaccacggtcaggccgggcttggggtcgagcgtggcgccccagagcttctcataaaaagcgcgggccacagggtcgcccacagggcggtagtcgggaaagaccatggggatcaggccggcgtccgatgcaccctgcacattgttctgtccacgcaacgggtgaaggccagccccggccttgcccacctgacctgtgagaagggccatggcgatgaggcagcgggcgttgtccgtgccatgcacgtgctgggagatgcccatgccccagaagatcagagaggccttggaagtggcgtaatcgcgggcaaaggcgcggattgtctcggcatcaatgccacacatcggtgccatggcctcgggcgactggctggccatctcgtgcttcagggcttcaaaaccgttggcatgggcggcgatataggctggatcgtgaagattttcgaaaataatggtgtggatcatggccgagagcagggcgacatccgttccggggcgaaactggagatgccctgtggcaagccggctgagctgttgccggcgagggtcggcaatatagagcctggcacctttctggacggcatttttaatgaaagtagccgccaccggatgatttacgcaggggttggcaccaataatgaaaatgacttcggcattggccgcctctgaaaatggggctgtgaccgctcctgagccgatgcattccatcagggccgcaacgcttgatgcatggcacagacgcgtgcagtggtcaacattattagtaccaaagcctgttcgaacaagcttttggaagagataggcctcttcattggagcccttggccgagccgaacccggccagggcgttcgggccataaacgtcgcgcacagcacgaaggccaaaggcggcccgatcgagcgcctcagcccatgacgcgggccgaaagtgggtccaggggttggcgggatccacctggcagtcccaggccttgggggcgtcgtcacggcgaatcatcggctgggtcaggcggtgcgggtggctgatgtagtcatagccaaaccgccccttgacacacaggcgactgtgattggcaggcccattgcggccatccaccgccacgattttattttccagggtgtgataggtcgtctggcaaccaacgccgcagtatgggcaaaggctatcgacggaatcgctgggctcgatgattttcaggccggctgagctcaccagcgactttggcatcaaggctccggtcgggcaggcctgcacgcactcgccgcagcccacacaggtggaaagccccatgggcgactgaatgtcaaagacgacccgggcctggtggccgcgatgggcgatgccaatcacatcattgacctgcacctcgcggcaggcccgctcgcacaggccgcagtggatgcaggcatcaagcccgacagaaatcgcaggatggctttgatccagctttggtgcatgctgccggccgggaaaccggctctgcgtgacacccatgcgatccgcccattgccaaagactgctcttggggtcgtgcgcggtggccttgggcggttgatcggcaacaatcagctccatgacaagcgatcgggcctgctgagcgcggtccgactgcgtctgtaccttcatgccgggcgtcggcttgcgattacaagaaggggccaggacgcgctcgccgctgatctcaaccacacagacccggcaattgccgtcgggcctgtagccgtgctcgtgccgataacaaagatgcggcagggtgctgccaagcctttgcgagacttgccagatggtttcatcagggctggcctgaacaggctggccatcaagctcaaattcaatattattaagggtttgcggcttgtcagtgattgtgctcatcgcaaatcctctggaaaatgcttcaaaacgctgagcaatgggttggttgccgcctggccaaggccgcagattgaggcatcgcgcatgactttggccaggtcggccagcagaggttcgtcccacacgggctggttgagcaaggccacagccttctctgtgcccactcggcagggcgtgcattggccacaactttcgtcctcaaaaaatcgcatcagattctgcaccaccatgcgcatgttgtcctgatcagaaagcaccaccaccgctgccgagccgataaagcagccgtgcggctcaagcgtgccgaaatcaagaggtacgtcggtcatgctggccggcaggatgccgcctgaagccccgcccggtaaatagcccttcagcacatgcccttcggccattcctccacaaaattcgtcgatcagctcgcgaacggaaatgccggctggggcaagtttaacgcctggttgcctgaccctgcccgaaaccgaaaagctgcgcaggcccttgcgcccgttgcggccctgggctggcagccactccggcggattatcgagaatcagagggatccaataaagcgtctcaatgttgtgaatcagcgtcggtcggccaaaaaggccaacctgtgtcgggaacggcggcttctggcgtgggtagccgcgcttgccttcaatgctctccagcatggccgtctcttcaccgcaaatataggcaccggcaccgcggcgcatctccaggaagcccttggcgatcaagcccgccgtttcaagggccttgatctcttgattcagaacgtcgtgcaggtgtggatattcgtcacgcaagtagatataaacgcgatcggcctctacagcatgggcaccaatcaatgtgccttccagaaatcggtgcggctcggtttccagatagtggcggtccttgaatgtcccgggctcgccctcgtcaccattgacggccatcagcctcggccccggctggcttcgcacgaacttccatttcatggcacttgggaagcccgccccgcccagcccccgcaggcctgaagcttcaagccgggtgatgatctcgtcggccgaaatcacgccattgcggaaatcctgaaggtgtctgtagccgcccctctgctggtaatctgccaaatttggataatcgggcagctccgcctgaaactggttggcagcaatggcggcctgtacggattgcagtgtggcatgttccagagcattgcggcccgccagtgcagcgggtgcggcggcacatcggccaatgcagggggctcgcacgattcggacattttcaggggctgagtgggagaggtcgctcaggagttgatcagcgccaaagagacagcaggtcaggctgtcgcagacccgcaccgtcagggcgggcggcgccggttcgccctccatcacgatatcaaaatgggcataaaagctggcaacttcaaaaacttcaaccatggagagcttcaagcgatgtgccagagccgccaggtgtcgcgcggccaggtggccaaaattgtcctgcaccgtgtgcagatactcaatcagcatatctcgcgggtgcggcccctggcccatcagcatatcgatctcggccagcgaggcatcgtccagctcgcgccccttggagtggggcagggcctggcgacggccgaagccggggttgatcatgcgcttgggttcagaatgtttcatgatggtgcggccggggggtcgaggcctgatcatccctgttctgcaacggcggacggttcggaaaggggaacagtggatgaggcaggattcgctctatcgtaccaatataccgcaaggatagacaccggaaagcggttattttcgtttcagggcggtttcatgggtgattcggcgcaaggttaggcttaaaaaagcgtcagaattttgcaattgagcagatgaggggtgttttttttgcagtcgtcgggagtgcggatcaaatttaagtggtggatagtttgggctggcgaatgtggccaggcgaaatgactattagcgtagtattggcaggttttatttgttgtgcgcgcccgatgagtgcatcgggccgacatttcggtgttttcgttgaatgtgccaatgtaggccacgtcccctgacgtggcacgcgcgatcaggtggccaggcgttttttaaatgaattcggattgtcggattttatttgtagtgcgcgcctgatgatggcatcgggccgacatttccggtgatttcgtttgaatatgccaatgtaggccacgtcccctgacgtggcacgcgcgatcagg

SEQ ID NO: 3460 - DNA, 24233 bp, synthetic construct
  source 1..24233: mol_type = other DNA
  variation 15815..18143: note = note, n is a, c, g, or t
  misc_feature 1..24233: note = Synthetic
atcagttgaaagaaccggtaaaagggattttaaacggttgaatggttacatggttatatggctaatagcaaccataaaaccatacaacaataaaacaataattaacaaatgcaacccagaactcgcaaagcaattaaaaacatggcccgcgccttcctgtggatgatggtgctgaccggctttgcgatactggtggcatccgcgtcaaaggtgaaggatactgtgcgctgcagcggcatcgtggtaaagatcaaaggcagcgacgagcatttcttcatcgaggaaaaggatatcaaagcgctggtagcaaagaacaaggacctgaacccggtaggcaagccggtgcgcagcatcaacattgcccacctggagaagatagtggcccgcgatccctgggtaaagcaggcggacctgttcattgacaaccagcagcgcctgaacataaaggttacgcagcgggaaccggtagcacgggtattcaccgtgaccggcaacagcttttacctggatgcccaccatgagcgcgtaccggtgtccgagcgctataccgcccgggtgcctgtatttaccggcttccctacggatgcgctgcgcctgcaaaaagcagacagcctgctcaccgccggtatcgtggacatcagcagctatgtgctcaacgatcctttctggatggcgcaggtagagcaggtgaacatcagcggcggccgccagttcgagatcattcccaagctgggcgatcatattatcgactttggcgatggcacacaggtagaaaagaaattccgcaagctgctggcattctaccaggaaggcctcagccgcgtaggctggaataactattcgcgtatcaatgtggcgtttgaaaatgaagtagtatgcacccgaaaggacggtacgccgccgcccaggcccaccccgccgaaaatagacagcgcggacgtggataggacgctggctaccggcgcaccggccctggcagccgccggaacggaaaggcccacgcccaaaaaagcagcagccagcaaggtccggaccacaccgcaaagacagccgaaagcggtctataaaaaaccggctggcaaaaaaggaaacacaacacaaaaacatagaacgccatgaatcaggaagctcccatcattgtaggacttgatatagggactacgaagattgctgccattgcaggacggaagaatgaatacgggaaactggaaatcctgggattcggtaaagccccatcttttggtgtgcagcacggtatggtgctgaacatcgaccaaactatcaaggccatacggcaagcgttggaaaactgctacacttccaatcccaacctggagatcaatgaagtgtacgtaggcattgccggtcatcatataaaaagcctgcagacgcgcggcgacattgtgcgcagcgatacggatgcggaagtgtcccagaaggacattgaccagttgatcaatgaccagtacaaaacggtgatccccgccagtgaccagatcattgacgtgatcccgcagcagtacatcgtagacagcctgcagaacatcacctatcccatcgggatgtccggcgtaaaagtgggagctaacttccacattattaccggcgacaagaacgcgatccgtaacattaaccgcagcgtggaaaagtccgggctgaagatacacgacctggtgctgcagcccctggcctccgctgcggcggtgatgtgcgacctggattttgaggcgggcgtagccatcgtggacattggcggcggtactaccgacctggccgtgttctatgaaggcatcctgaagcatacggcggtgatcccctacggcggcgagaacattaccaacgatatcaagaacgggctgggcgtgctgaaaacgcaggcggagcagatgaaagtgcagtttggctacgcgctggcggatgaggcccgcaacaatgcctatatcactattcccggcctgcgcgggcagaacccgaaggagatatccgtaaagaacctggcccatatcatccaggcgcgcatgagcgagatcctggattttgtagtgtaccacctgaagcagatcggtatggacagcaagatgctgaacggcggtatcatattaaccggcggcggctcccaactgaagcacctgatacaattaaccgaatacaccactggcgtaagtgcccgtatcggctacccgaacgagcaccttgccagcggtcacatcgacgagctgaccaagcccatgtacgctacctgcgtgggcctgatcctgaaaggctacaacgattacgagaacgatcgtaaggcgctggaggaaaattacattacgatcaataccagctacaaggccaaagagcaggcttccggtaaaaccgggcacgaagactgggtgcacgaagaagaggaagccactttaagcgctgcggagatacaggaaagaaaggcaagggaaagaaatgcatccttaaagaatttcctggacaggatgaaaacaaagatcatagatatgttcacagaagaagaggatgcaaagctataagtggcgtaattgttgcagccacgaatgaactgataactaacccataaaagagatagagtcatgatacattttgatcttccaaaggagaaatcctccatcatcaaggtaataggcattggtggtggtggaagcaatgcggtgaaccacatgtacaaccaacgcattgatggggtgaattttattatctgcaatacagacgcgcaggccatcgccaacagccctgtacccaacaaggtacagttaggcccgcatcttacgcagggactgggcgccggcgccaaccctgaaatagggaagcaggccacggaggagtcctttgaagagctgaaaaagatactggaggtcaataccaagatggcctttattaccgccggtatgggtggcggcaccggtacgggcggcgcgcctattattgcgcgcatctgtaaggagctgggcatcctgacggtaggcattgtaaccacccccttctcctacgaaggcaagaagcgcatgcagcaggccgatgaaggcgtaaaccgcttaaaagaatatgtagatacgctgctgatcatttccaatgacaagctgcggcagaaattcggcgacctgaaattcaaggccgcttttgaaaaagcggacaacgtgctggccaccgccgccaaatgcatcacggatgtgatcaactccaccgggcagatcaacgtggactttgcggatgtgtgcacggtaatgcgcaacggcggcgtagccatactgggcgcagccaccgcggaaggcgacggccgcgcgcaaagggccattgaagatgcgcttacctccccgctgctgaacgacaatgatatcagcggcgccaaatggatactgatcaacatttcatctgccgaaggcgattacgagcatacgctggatgaaatggacatcatacaggcatatgtgcaaagccaggccggcgaggattgcgacgtgatcctgggcgtgggctatgaccagacgctggagcgcaagctgggcgttaccatcattgccaccggctttgagcagaaacccatccagcgcgtaaccatgaaccaggagccggccaaaccggaggagccaaagatcgtgatggagctgggccgcgatggtgatgaaaaaaaactgaataaccagggcagcctgttccaggagccggtggaccaaatggcgccccggctggtagagccggtggtaacacatcccacgcctaccccgccgcctgcaccggcgccggaaaggtacgtgctgaacatagagccggacccggattatacgccgccgcccgctccccctgccagcggtggaggcattaacgtgatccgcccgcagcagcacagccatcctacgcacattcacatagaaccgctgggcacgccgccacctacaccgccggccgacgaccagcctgaaatgaagatggtgtaccgcgaggagcaggagccggcagcgcctaccccacccccgcccgcacagtctcccctggacgagcaactggaggagcagaagcgcaaacaggcggagcgcgtggccaagctgcggagcatcagctttaacgtgaaaacgatggataacaacgcggagatagagaacgtgcccgcttacctgcgccgtaacattaacctggacaatggcgccggttctgcagaaaatttctattctaattataccgtgagcgattccggccagcaccaggccgagatcaacacgatcaatacctttttagatgggaagaaacccgattgatggcaggcaactgtgattcacaagcaaagtttgattgttttttagttgtgttaaaaaagccctccggttctccagggggcttttgctttttatcatttacattccattcaagatacaagacgaatatttttcagcttatcgggattgcgtacaaaatagaaactgtctattgcgccatccacttcctcaaagcagatgcagagcaggggcgtttgcgtatccccgtcaaacagcgccagggcaggctgcccgttcacctgcaggaaacggaactgcggtgccggcgcaatcggcttccggaagatgcccagtaacaccttcatcaccacctcgcgcccaaacagggggtgtatggcggcagatgccttgccgccgccgtcgccgtagaagctgatatcctctttcagcagggtgatcagcgcctcctggtcctgccgggagcaggcgtccaggaaagcttccagcaattgccggtggcgggcggtatccgtgctgaaacgttttttgtcctgctgcagcttttccctggcgcggtgcaggtactggcggcagttggcctccgggatgtccagtatctcctccagctccttgtagggcacatcaaagctttcacgcagcaggaataccgccctttccaggggattcagcttctccagcaggaacagcagtccgatggacagttccttatcgcccgtcataaggggcgcgggatcttccatcagcggctccggcagccagggaccggtataggatacccgctgctgctgcagtgttttcaagcggttgatgcttcggttggtgaccgcgcgcatcaggtaatgcctcggttgctgcacggcggcaatgtccatttccagccagcgggcatatacatcctgtacaatatcctctgcctcctgtttttgccccagcatccggtacgccagggagacgagcaggggacggtattgaaaaacgctatcgggtgatacggtagtcatatgctatcagttttttccgccgcgctccacgcttttgatgtcctcttcccggttctttttaaaatcaaaatgttcgtagtccgcagtaggcggtacatatatggtgtagctgcgcagcgtgtctatttcaatccgtatgtcctccgcctgcaggtcaatgatatggccgccggcgtcttttgcggcggagaggtaatgaaaatgatacccggatatgttggtattatccatgaacaccggcaggcggtaacctaccaggtcgccccggcagtcgttgaatgtaaagaactgctgcagcggcagcatgttggccagcggcgtgtgctcccctttctttaccggcgggaaagcccgcgttttaaggaagcggaaggcgccgctgatgtggatggcgtacataccgtttacgttggtaagcacactatccaggtagcggaacagttccgctttgctcatggccctgcccggccgcagcgtgatgtccggctgaaagaaattgaccatggcaaaggaggtgcgcgcttcatcgtccacctcgaaagttttgccggtgtgttgggtctggtacgctttcccttcaaataccagcagttccccgtccagttggtccggtgcacccagcccgaaatcgccgtgctgtttgagcgcctggtaggaataaaacccgtcgtacaggccgccgataagggccgcacctatacccgcagtaaagagatgatgatacggggtgtccggcggggcggccgtgccggcgcgtccggtaaaaccgctgcatagcaggcagcaggtgaggatggtatgcaggaatgcgaggcgcatgatgtttgttgatctttttgttttcaatgtataaagataggggtttagggaagtgctggcaatatggatttgtgtgatggcggtggctatttgcccgggggcttgaaaggtaatgatggaatgagtagattgcgattacttcaaaaaaaccgcttttgttatgcagccatcctctgaacagcaacgatccaataaacgcattacagaccaccttgccaacgagcgcactttcctggcctggatcaggaccgcaatagccgttatggcattcggatttgtggtggtaaaattcagcctgtttgtgaagcagttgtctattattgtggacgataaaaaccctatccggcaaaagggcttctctcctaccatgggcatcctgctgatcgcttcgggcattgtgacggtattgtttgcctacatccgctacctgcaggtagcaaagaatattaacagcgaggcttaccagcacacaggaaaactgccggcagtgtttacggcatttgtgatggcctgcgggctgttcctagtggtgtacctgctgatgacgagctgagcagggccgatcggggtggctactttattcatagcagcggctttccatacaacaggtaagttagcgtaacagcgggcgcctgctaatgacaatgagaaggaaaagaagtgattgtaatcaggggaaatggcgctttaagaaagagctggccgctttaagctccggccggtcagcaccactggccatgcttgccaactgctggtagtagcgccgcgctttccccggatcatggcgccgttctgcagccaggccggcgccataaagcccattaaaccggttaggtctttgctgcaggcttgcctcatatgcatgcagcgcctcggtgggtttgttcatctgcaaaagcatatctcccaatagttcccttgcgggcagcacttcccccggcgtaacagggtgcttcggggtatgatcttccatgtcggcagcagcgctcatcaacgccaatgcttcgctatcacgtccttctttgaacagtatccaggcttcagcggttttcacctgtatctgcacctggccggccttatacggatcattttgctttaccagcgtatcatgaagccggaccagggttttcaactcggctttagctgcgttgatattaccagtattgaccaggccaagcagccgggtaaaatgtataatgctcctttgccagggatatgcctgccatggaaaatgcggcgggtatactttcagcgccgcagcctctttccatagcctgttctcaagtaaatagcgggcggggatggcggcaaacgcatacgcaaccttaaaattctccgggtacacttcggaaatggtttccaggtacctgcattgcgctttcgcctgcctgttctcccctttctgtaaacaggcatataccaggtagtccattccatggagctcctcatcccaatgtcctttgatacccgcactttcagcatagcattttgccgccgcagtggctgccaggttggattgaatggcttcatcccaaagccccagcctgataaaaatgtgagaaggcatatgctgcgcgtgcgcagatgatggtgcaacggaagcatacgccctggcggcgggaagggccaaagccgccagctccgggtagtcgtaactatggataatataatgtacgatgcccgggtgataaggctcattggggtataaagctgtcagtatacggccggctttccgctgcctggtaaatgcggtgtctaccggatccgcagcgccattgagcgccagcgcatagaaaattgccgcttccttatcaccgggatatgcagtgtagatcttttccattgccttttcaaagcggcggctgcgggtagcatgatctgtacggtcccaggcattatagaatgatgcgattgctgctatataggcggactctctttgggattttttttcaagtgacatggcaatggcagcggcctttgcgcctttctccagttccgccggggtagaggggttccagagcgggtgataattgcacatcgctacgccccaatatgccatggcgcactccggcgcttcatcaatcacttttgcaaaaactttttctgcttcatcgtattcaaatgagtgcagcagcgctatggcaaggttaaagtcttcctgcgccttgccggaacaggatgttttaaaccctacagtgcctagttgtttgtcgggcggaccgcagaggatcatccggcctcttttaagatcaatggcgctaacggtttccgggcgcttaccccggccgttgcatgccatgagcgctgacaacagaagtaccccaaaaaaaggggaaaattccctgtatagctttttcatgtggttgcattatttttggggcctataaaagttgctgaagatacctgcctggcagttgtccctaaagtaccgtcctgttcattgtcaccgtttataatcggggtgatattatcgtacagctaaggtagataaaattgcccggttgcaaataaaatcggctatttatcggttttagccggtattggctgcgggaaatatttttggcggatacggcaattttgttaaatttattaccggtttttcaagagaatgtgcttgttcgcaagtgccccaacccaatatcttacattattgatctgccctgaaaattgataagctttttcaattaaccttaaaattatccctatggatttcaaagatcaattgaagcaactcggtgagcgcgttgccaagctcaaagaccagatcctcacggaagaagccaccaaaaatgcctttgtaatgccctttattcaatgtctcggctatgatgtgtttaaccccctggaagtcgtgccggagtttattgcggatatcggcatcaagaaaggcgaaaaagtagactacgccatcatgaaggacagcaagcctgctatcctggttgaatgcaagcactggtccgccaatttagatccccatgacagccagctattccggtattttcattgcactgctgcaaggttcagcatccttaccaatggcatatcctaccggctgtataccgacctggcagagccgaacaaaatggatgaaaagcctttctttgaattcaggatagacgacctcaaagacatgcaggtggagaaactgaaagagttccacaaaagttattttgacctggaaaagatcattaccactgcgagcgaattaaagtatacgaatgagatcaggaatatcatcctgaaagaactgaatgaacctacggatgattttacccgcttttttgccaagcaggtataccctaccatggtcaccgctaaagtgctggaacaattcaaagggctggttaaacgctccttcagccagtttatcaatgatgctatcaatgaaagattgaaatccgcattacaggtacagcagcagcaggagaatcagtcagaggaggccgagccggaagcaagtgaagaagcaagaatagttaccacggaagaggagctggaagccttttatattgtcagggccatcctccggcaaagtatcgatgtaaaaagggtggtgcaccgggacacacagtcctacatgggcattttgatggatgataacaatcggaaacccatctgcaggctgcattttaacggcaagaagaaaacccttacgctgtttgacaacgaaggaggcgagaaagtggatatccagttgctggatgacatttacaagtacagcgaacggctgctgaatgcagcgaagcggtatgatgaggtaggggaagctgttaaggagaatggggttatgtaaaacaacaatcccgccttgtgagcgggactactgtataagttttcactacggaataatccttattgtgatttgcttctaattaatagtctaaaataaccaaaattattaacctgcaaaaaaaaggtttataccgcaaaataattatgaaaagaatactcgggcttgacattggttccaactcaataggctgggcagttgttaaccttgattttgacaatgaacaaggggaaatactgggagccggctcccggatagtccccatggatgccgatttattgaccaattttgaacaaggtaatagtgtttccaaaacagcggcacgaaggcaggcccggggggccaggcggctccgccacaggtacaaactcaggaggcagcggctcattgaactgctgaagctactcgggtggttgccggcgacttttgaaccagggcataagcttccaattacggaagactccataaaacaaatgtatgaattattcgccaccagtaaaattccggaagactggatagtatactttctccggcataaggcgctgacccggaaaatagcgctttccgagttagcccgggtactttatcatatcaatcagcgaaggggcttcaagagcaatagaaaagccaacaatgaagcaattgaaaataccggggaggattccgaagacagtcttccaaagcgggaatccaaagttatgattgtgaaggtaacaggcataagggataccggggaaattacccgaaagaaaaaagccatagaaattgaagtagaccagcctgtttcaaaaggtatcaccaaaggtatcatatacagagacaccttacctgattggctcaaccaggagatagaactggaggtgagagttatccgctccaaaaaagatacacgggtagagttcgctattcccgataaaaccgactggcagaaattaagggaggcgctggcaaaggacttcgacaacaagaaccttcaccccggctcctacttcttgcatgagatcctgaaagacagaaattaccggataagggaacggatcatcgacagagcgcgttatgaagcagagtttaaagcaatatgggaaaagcagtctgaatatcatcccgagctgaaggccatggataaactgcccgagattgcccaaaagttttatgccaataacaaggagaagcagaaggaactgctgtctaacgacctgttctatattattgtaaaagacattatttattatcaaaggcctttaaagtctcaaaaatcttccattggagaatgcaggtatgaaaagaaaaatgttgtattggacaaacaaatcaatggaaaaaccatcccttacacgcctggctataaagtagcgcccattagcagccccgctttccaggagttcaggatatggaaaaccctgcttaacctgaaaatatttgcgcttaaaaagatgatcaatgagagatgggaaacagacatagatgaaaccgaaatatatatccggcccaaactggagccgctattcaatttatttgatagcaaagcaaaggtcagctcccaggaaatcttcaaattgataggagtttccaacaatactcacaggttaaactatccgccggaaactgaatttccggggaatgaaaccaaacaggagtttaggaagttgttcaaaaaacataactacgcaagtgaggggaatgagttacttgaaaatgaaaaaaaattacagcagctatggcatcttatatattcggtagatgatgaaaatgccattaaacgctccctagagaaacgatttgaattcccagatacactggcggccgctttttccaaactccctcctttcaggccacaatatgcctcctattccgccaaagccatacacaagctgctgtccttaatgcgcgcaggaaaatactggtcagaaagtaatatcccgctggcggtaagggaacgaatcagcaaactggataatggagagctggatacaactttagacgaatctgtgcgtgaacgggttgaaaaattccgggctaaacacgggctttcatccatcacagactaccaggcgctgccggaatggctggcctgttatatagtttacggaaaacacagcgagaataattatggagaaccatgttctacacccgaggaggtaaaaggattggaggctaaaacgctgcgtaacccaattgttgaacaggtagtaaatgaaaccttacagcttgttaaagatatctggaggcaatatggcaggcctgagcaaatacgggttgagctggcccgcaacctaaaaaaaacggctgcggaacgaaaagccatttacgacgccaaccgccagaacagggaagacaaagaaagaataaaagccatcctccgggaactaaaaattggcaacccggattcattagctgatatagaaaaagtgagaatactggaagagaatggcaatttcaaataccaaaacagcagggaaaggtttttcaggaaagccactgaacctacgcaggcggaagtagagaaataccggttatgggtagaacaaaaatgtatatcgccctacactggcaaccccattatgctttcggagctgtttacctttaaatacgaagttgatcatgttatcccccgctcaagacattacgatgacagtctggctaacaaggtaattgtagagtcatgggctaacaaggagaaagacaaccttactgccatgcaatatattcagcagggtagtatacagaacaggttattgccggttgaaaagtacctgctacatattgaagaaaatttcaggggaaggaaacgccgcaacctgttaagtgccgaagtgccgaaagggtttattgagcgccagctaaatgatacccgtcatatcagccggagggttaatgaactgctacaccaggttacaggacaagtatgggcatcttccggtcaaataacggatgaattgaagcacaaatggggattaggtaacaaaatgaaagaaatacttgaggaacggtttttaagacttgaatcgataactggtgaaacaatggtgtcctacacagttgatgaaaatggacagcgaaacatacatctacagggatacgaaaagcgtatcgatcaccgtcaccatgcaatggatgctattgtagtggcctgcacaacccagtcccatatacagtatattaatacgctggaagcacaaaacacggacaaggataaagggactagcttccgaaaaaaattgctgcagtccaacaaggcgagagatttcaggaagccctggaagacttttgttgaagatgcgaaaacggctctggaaagcaccattatatcatataaaaaccggcatagaatattaaacaagggtattaaccggtatacaaaatatgttcgggatgaaaaaggagaatggataaaagcgctggttgaacagaccaaaggagaactattctccgccagaaaaccgctacataaggaaaccattggcggcaccgtaaacttcagggagtacagaaaagctaacttagaggaggcgttaaaggatattgacaaagtggcagataaatccgtcaaacggcagctaaaggcattaaagcaggagtatggaaatgatataaaaaaaatcaaatctgctatcaaagcaaatccattaaccgacacgagcggaaacatcaccgataaagttctggtttggcattggcaggtctatgcgctcaaccgggtagcattagatgccagttttaaaaaggataaaatcgataagattgccgaatatgataataaaaagcaaaaagggttaaaatatcagcttcataaacatttatcgcagtatgaagacgatcctaaagcagcatttacaggggaaggactggaagctttggcaaaaacagttgggaaacctgtaaccaaggtatccatttacgagcctgtaggcggtaaatttgagatacggccaggccagttggtggaagccgcgaaaggcaccaacctgttttttgttatttacgaaaacatattaaccggtgagaggtcctatactacacttggattaagggaggtcttaaccgccaaaatgaataagctaccggttgttccacccaaagaagggcacaaacactatgtactgtcgcctaacgatctggtttatgttcctgataccgaagaaaatattaaggccattgattggagcaataaaaaagccataagcagtaaaatatacaaaatggtcagttcgtcgggcaatcaatgtttctttgttcctcatcatatatcaaaacctattatagaaacactggagcttggagccaacaacaaatcagaaagatcatgggatgggaaaatgataaaacaatgttgtatcaaactaagacatgaccgcttaggaaatattgctcctgcttagatcatttaatcatgattaaaaggaccctatattttggcaaccccgcttatcttaaaaccagcaatgagcaactggtgatagagatgcaggatagcggagaggttagaacagctcctattgaagatataggattgctcattcttgatcatcaacagatcaccattacacaggctttaatggcaaaactgcttgccaacaatgtggcttttataacatgtgatgctactcaccatcctgcaggaatgtttctaaacctggatggccatacactgcaatcacagaaattccaggcgcagatagaagcatccgtaccgttaaaaaagcagctctggcagcaaacggtaacagccaaaatacttaaccaggctgcattgttaaaactccagcgggaagaaaacaagttcctgacagaactggcaaaagatgtgaaaagtggtgatagcgagaataccgaggcacaagctgctgtatattactggaaaaaagtatttcctgatttcctggaatttaaaagggagcgacatggaaatccgcccaacaaccttcttaattacggatatgccattttacgcgcagtagtagcacgcagcctggtaggaagcggtttgctgccaaccctgggaattttccaccgcaaccagtataatgcctactgcctggcagatgatattatggagccttatcgtccttttgtagataaagcggtatgcgaaattatccggatgaatggaaaatttcttgagcttggccctactatgaaaaaacaattgttgggcgtcccggcaatggatgtattgctgggaggtcagaaaagtcctctcatgaatgctgtacaacgaacgacggccagtttggccaagtgttttgaagggaaaagccgtaaaatcctgtacccggaatttacatgaaaagcaaattttatgtttaatcgcctaaatgcttaccgggttatgtggattttagtattgtttgatctacctacagaaactaaaaaagatagaaaaaactatacagacttccgaaaaaaaattctggctgatggatttcagatgttccaattcagtatgtatatccgtcattgcagtagtaaggaaaatgctgaagtacaccagaaaagggtaaaatccatcctgccctcaaaaggacatgttggtattcttaccattacagataagcagtttggcatgatggaaatattccgtggtactattccggttgatccccccgatacggcccagcaactcgaattattctaggagatccggatcagtccctcctagaatcaaaaaaacgcgtaatcttccatttttttgattgtaaaaagagggcaaaatcaacaaccggactgcatttcatcgaatccggttgttgttgacctaaggtacagattaatttgaaagcaaatcacaacatagtatttaaagttaaaaccttttatttagttgttgttgacctaaggtacagattaatttgaaagcaaatcacaacagaggatggagagaatgatgtaactttatagttgttgttgacctaaggtacagattaatttgaaagcaaatcacaacgacgaattcgttattcnnnnnnnnnnnnnnnnnnnnnnnnnnnnnnnnnnnnnnnnnnnnnnnnnnnnnnnnnnnnnnnnnnnnnnnnnnnnnnnnnnnnnnnnnnnnnnnnnnnnnnnnnnnnnnnnnnnnnnnnnnnnnnnnnnnnnnnnnnnnnnnnnnnnnnnnnnnnnnnnnnnnnnnnnnnnnnnnnnnnnnnnnnnnnnnnnnnnnnnnnnnnnnnnnnnnnnnnnnnnnnnnnnnnnnnnnnnnnnnnnnnnnnnnnnnnnnnnnnnnnnnnnnnnnnnnnnnnnnnnnnnnnnnnnnnnnnnnnnnnnnnnnnnnnnnnnnnnnnnnnnnnnnnnnnnnnnnnnnnnnnnnnnnnnnnnnnnnnnnnnnnnnnnnnnnnnnnnnnnnnnnnnnnnnnnnnnnnnnnnnnnnnnnnnnnnnnnnnnnnnnnnnnnnnnnnnnnnnnnnnnnnnnnnnnnnnnnnnnnnnnnnnnnnnnnnnnnnnnnnnnnnnnnnnnnnnnnnnnnnnnnnnnnnnnnnnnnnnnnnnnnnnnnnnnnnnnnnnnnnnnnnnnnnnnnnnnnnnnnnnnnnnnnnnnnnnnnnnnnnnnnnnnnnnnnnnnnnnnnnnnnnnnnnnnnnnnnnnnnnnnnnnnnnnnnnnnnnnnnnnnnnnnnnnnnnnnnnnnnnnnnnnnnnnnnnnnnnnnnnnnnnnnnnnnnnnnnnnnnnnnnnnnnnnnnnnnnnnnnnnnnnnnnnnnnnnnnnnnnnnnnnnnnnnnnnnnnnnnnnnnnnnnnnnnnnnnnnnnnnnnnnnnnnnnnnnnnnnnnnnnnnnnnnnnnnnnnnnnnnnnnnnnnnnnnnnnnnnnnnnnnnnnnnnnnnnnnnnnnnnnnnnnnnnnnnnnnnnnnnnnnnnnnnnnnnnnnnnnnnnnnnnnnnnnnnnnnnnnnnnnnnnnnnnnnnnnnnnnnnnnnnnnnnnnnnnnnnnnnnnnnnnnnnnnnnnnnnnnnnnnnnnnnnnnnnnnnnnnnnnnnnnnnnnnnnnnnnnnnnnnnnnnnnnnnnnnnnnnnnnnnnnnnnnnnnnnnnnnnnnnnnnnnnnnnnnnnnnnnnnnnnnnnnnnnnnnnnnnnnnnnnnnnnnnnnnnnnnnnnnnnnnnnnnnnnnnnnnnnnnnnnnnnnnnnnnnnnnnnnnnnnnnnnnnnnnnnnnnnnnnnnnnnnnnnnnnnnnnnnnnnnnnnnnnnnnnnnnnnnnnnnnnnnnnnnnnnnnnnnnnnnnnnnnnnnnnnnnnnnnnnnnnnnnnnnnnnnnnnnnnnnnnnnnnnnnnnnnnnnnnnnnnnnnnnnnnnnnnnnnnnnnnnnnnnnnnnnnnnnnnnnnnnnnnnnnnnnnnnnnnnnnnnnnnnnnnnnnnnnnnnnnnnnnnnnnnnnnnnnnnnnnnnnnnnnnnnnnnnnnnnnnnnnnnnnnnnnnnnnnnnnnnnnnnnnnnnnnnnnnnnnnnnnnnnnnnnnnnnnnnnnnnnnnnnnnnnnnnnnnnnnnnnnnnnnnnnnnnnnnnnnnnnnnnnnnnnnnnnnnnnnnnnnnnnnnnnnnnnnnnnnnnnnnnnnnnnnnnnnnnnnnnnnnnnnnnnnnnnnnnnnnnnnnnnnnnnnnnnnnnnnnnnnnnnnnnnnnnnnnnnnnnnnnnnnnnnnnnnnnnnnnnnnnnnnnnnnnnnnnnnnnnnnnnnnnnnnnnnnnnnnnnnnnnnnnnnnnnnnnnnnnnnnnnnnnnnnnnnnnnnnnnnnnnnnnnnnnnnnnnnnnnnnnnnnnnnnnnnnnnnnnnnnnnnnnnnnnnnnnnnnnnnnnnnnnnnnnnnnnnnnnnnnnnnnnnnnnnnnnnnnnnnnnnnnnnnnnnnnnnnnnnnnnnnnnnnnnnnnnnnnnnnnnnnnnnnnnnnnnnnnnnnnnnnnnnnnnnnnnnnnnnnnnnnnnnnnnnnnnnnnnnnnnnnnnnnnnnnnnnnnnnnnnnnnnnnnnnnnnnnnnnnnnnnnnnnnnnnnnnnnnnnnnnnnnnnnnnnnnnnnnnnnnnnnnnnnnnnnnnnnnnnnnnnnnnnnnnnnnnnnnnnnnnnnnnnnnnnnnnnnnnnnnnnnnnnnnnnnnnnnnnnnnnnnnnnnnnnnnnnnnnnnnnnnnnnnnnnnnnnnnnnnnnnnnnnnnnnnnnnnnnnnnnnnnnnnnnnnnnnnnnnnnnnnnnnnnnnnnnnnnnnnnnnnnnnnnnnnnnnnnnnnnnnnnnnnnnnnnnnnnnnnnnnnnnnnnnnnnnnnnnnnnnnnnnnnnnnnnnnnnnnnnnnnnnnnnnnnnnnnnnnnnnnnnnnnnnnnnnnnnnnnngttgttgttgacctaaggtacagattaatttgaaagcaaatcacaaccaaaagctgttggtattgcgcgttggtgaagttgttgttgacctaaggtacagattaatttgaaagcaaatcacaacggtgcagaacgttgggggtacatggtacttgttgttgttgacctaaggtacagattaatttgaaagcaaatcacaacccaacaacattcggctctggtgttgttacgttgttgttgacctaaggtacagattaatttgaaagcaaatcacaacataaagatatgccctacgccgagataccaagttatcgttgacttaatgtcctaccccctactccaccttcaaactctccgccgggttcgccatccctgcctttatcgcctggaagctgatcgtcaccagtgctatcactaccgcgcccagtccgccggctacaaacgtccaccagccgatgttaatatggtatacaaaatgctgcagccattggtgcatgaaataccaggtcagcggacaggcaattacaaaggcgatcgctatcagcagcataaaatctttggagaacaggtataccacgtgggccgtggtagcgcccagcaccttgcggatgcctacctctttaatacgttgtaccgccataaaggaggccagcccgtacaagcccaggcagctcagaaaaatggcaatcgctgaaaacaccttgtacaaccgggagagctgtctttcctcccggtaaaaattaccgatccgctcgtccaggaactcgtattcaaaaacataattgggataggtttccttccagatgcgctcaatctgccgtaacgcagcaggtatattcgtggtgctgagctgaatgcccgccgtactgtatagccgcttcatatttaccataaacaggggcacaatatcttccttcagggagttggaatgaaagtttttcagcacccctactatcgggcctttcgctgcgccgccccagaggtccacttccttgttcagcacatcattaggatcagaaaagcccagcttttttaccaccgcttcgttcactaaaaattcgttgacagagtcggtagcggtaatattccggccggcggccagcggcaactggtaagtaggtacgtactggtgatccacaaacttgctgagcatggcaaactccgtttctttggcagcatggtcaaacctgaattccgtccaccagttatcatcatccgccggcgtgttggagttaaagctcacctgctgtacttcctttatagccatcagcttgtcccgcaggtaattcagccggctgcggctggcgctgtcgctgggaaaaggcacatccacgatcgcgtctttcttaaatcccatcggcgtctgctcaaagtagttgatctgccggatcagcagcaaggtgcctatgatcagcgcctgcgcgataatgaactggaacaccaccagcgccctgcgtagcgataagccccgggtactcttcgcagtgatcctgctcttcagcgcggctatggggttaaagccggataataccagcgcaggataaaaacccgccagtatagtgaccacaatagtagtgatcagtaaaaagataaatacgcccgtattgttcagcaaatgcagggacaaggtaatgcccaggatatcgtttaccgggggaatgatcagcgcgactatcagcagggcaagcattaccccggccagcacctgcaggcatgtttccagcaggaactgcaggttgatctgccagcgcccgctgcccagcactttccgcacgcctatttcccgggcccggttcaccgcctgcgcggtagacagattgatgaagtttacacaggcaatgcaaaggatgaacagcgcaatcaaccacaggatccgtatgcgctccgggccaacggtcctgcccaggtaattgtcggtagaagtatccgtatgtacctggcccagcggctgcaatacctgtatggccttgttgtccgctgcccggtacttcccggagaatgcaaccagttgccgctccgcggcggctgccgttacctgcggcggcaacagcacaaaacatttatgatcgctactaatggacacccagtccttactctgcgaatatttagcgaggtggtaaggtattacgatgcttagctgaaaatccgtattggaaggcgcatcctgcagaatgccggtaatggtgagcaggtcgtcattactgaccttaatggtctttcccatcgcgttcttccagtcgccaaagtatctttccgctgttgaccgggtcaatacggcgctgttagggtcctgcagcgcagtagatggttcgccggccagccagggaaaattaaagatgcggaaaaaagccgcctccaccaggaaagcgcctgttcgctccttgaacagtttcggcgctgcgttcttttccatcaccgccacctgcaggttgcggagcatagccatacccgtgctttgccaggaaggaaaatcattcttcatagcggcaggcaaaggaaagggtacgcaggaagcaacgccgcccttttcacctttcgtcatcacccggtagatgcggtcatgatgccggtgaaaattatcaaagctgctttcataccttatcacgataaagatcaccaggcatacggctatgccaatggtgaggccggcaatattaataaacgtatagcttttattgcggcgcaggcttctgaaagctgtcttcaaatagttcccgatcatgataggttttttagtggagtgtccgtttcgggacgactaaagcaatgccagtttttacccctgctgattaccagtgcgttacagctacacgcgtcctttcaaatgtccgcttttgatacatcccggtgtccgcttttgcaaatcaaaaaacgtatcttacctgaaaaaaccctgcatgccgccacccgcccgtaccctgtggacagattatctccgctccttcattactgttttagtagtggcccaccacgcttccctggcctacaccacctttgccagctttaacgcgcaggcctatatcctttccacgcatcccatagtggacagccggcgctgggtaggactggatatcttcgagaacttcaacgatgtgttcttcatgtccctgatgttctttatcagcggtctcttcgtgctgccggccctgcataaaaagggcatggccgtttttatccgcgaccggttttaccgtttgttcgttccctttgtctttggcgttacggtgctgatgctgctggcctattatcctgcttattatgtagcgcatggccggcatgacgtcaaaggatatatcattgattacttcaccacggaagcctggccggtagggccgccctggttcatctgggagctgtttgcctttaacctgctatttgcgctgtgctatcccttcatgaaaactacctgcgccaggctaagcgcattgctggcgcagttgaaagataagccgctggcactggccggtatatggtggctgcttacctggctgctgtatgtgcccctggcattgaaggtaggcgccggtacgtggacaggcatcgggccctttgatttccagttgagccgcgtgctgcagtatttgggctattttatcctgggtgtgttggcgggtaatgtaaagcaggaggccggtatcttttccaccggcgcccgctggataaaaagctggccgctgtggatagcggcctgcctgctggcgtatgccctgcttactgttatcccgcctttcctcacccgcatggtaaaaaccggcgcactgccggagctgcccgcctggcttatttactataccatttacgtattgtcctgcacgggtagctgcctggcatttcttgccagcttccgggcgctggcccatacgccgcggagctggtggagctccctgtcggccaatgcttacagcatttacctggtgcattacattttcgtggtgtggtgccagtatgccctgctgtctgccggcataccggccttcctgaaatttctcatcacgttcgtagtagcgctgttaggcagttggctgcttagcgatgggctgcgcaggcatccgctggtaaaaaagtacttataacggttgcgctgccattacctgccaggtatgggcaatgccggcgctgggctttatcatgcccgggtgaaagggtagggtgctttcgccccgctgtatacgtgccggccagtcagggttggcaatggccgccttgcccaatgccagcaggtcggcatggccaccggtcagcacctcccgggccagcgccggctggtgcagcccgccgttggcaattaccggtacctgcacgatctcctttgccaggctggtaaaggacgtaccatcgtcatacaggcattcccgccgccagttccccagttccgcagcaatatgcacgtaatccggctgcgcttgggctacctccgccagcagcgccctagccgtggcggctccccctggccagcggtaatgcaggtggtttacttttccttctgacaggcgcaggccaatgataaacgtggccggcgccactgcccggatgccggcaatgatctctgcaataatgcggaagcggttggccatcgtgccgccgtatgcatcctgccgggtattggtgtagtccgtcaggaactgatccggcaggtagccgttggcggcatggatctctaccccgtcaaagccggcagccttcgcctgttgggcggcgctgataaagccctgccgcgccgtagcgatatcttccggcgtcatcgccctgggtaggggaaaaggcccgtcgcccccaccgtattcaggcattttatggcccagcggctgtatagcggaaggcgcctgggtatgctgcgtatgctgggagatggcgccggcatgcatcagttgtgcaatgaacaatgttccatgctgtttcactttttgcgtgatctgccaccagccctgcgtttgcgccggtgttaccagcccaggctgcagcgggtaagcctgtgccgctacggaatcggtatacacgccttcggtgatgatcatgctgaagccgcctttggcaaaggcttcgtaataggtttgcatcagggaggtaggcacgccctccggcgtggcgcttacccgcgacatcggcgttactaccagccgattctgcagccggtggccgcgcaactcaaaaggttcaaaaatgccgggaaaatgttgctcgttgctatgcataaagtgaaatgttttatgcatgcaaagttgcggcagcacaggctaagcgctgttaaagtaattgaatgaatgccgttaaaatagtttaatcatttccctgtcgggcccttatctggctcaggaacaccggcgtaatgcccaggtaggaggcaatgtatttctggggaacgttctgtaccagggcgggatagcgctgcagcaggtccaggtaacgcgcctccccgttcatgctgatgttgttcaggatgcgccggttctgcgccaggtaagcattttgatgcaggatacggaagaaacgctcaaaggccggtatctccgcgtacagccgctccagcgagggcttgtccagttgcaggacggttaccggcgtgagggcggcaatatgcacttccgccggtgtttcctgtaaaaagctctccaggtccgtgatccaccagtccgccgtcgcaaagtgcagggtatgctcctcccccttgtcatctacataaaaggaccgcagccagccttccagcacatagttgtcataccggcaaacatcgccggcctgcagcaggtactgccggcgcaggaggcgcttttcccgcagcagggaaaggaacagctcctgctccgccgcagtaagggaaatgtgccgggacacgtgtgtcaggatgcggtgatgaaaggaatccataccgcaataatactaatacccggctaattgctgtgtgcccagtagctttttccctttctcatcatacaggtgcaggatgtacatgccgccggtaacaacccgtactgtcagctccgcttttgtctggttcaccaggcgtttgcgcagcaccagccggccctgtatatcatacagggagataatgtatgttttcaccgcctgcaatccgctgatgctcaattgccc

SEQ ID NO: 3461 - DNA, 16077 bp, synthetic construct
  source 1..16077: mol_type = other DNA
  variation 14882..14883: note = note, n is a, c, g, or t
  misc_feature 1..16077: note = Synthetic
ttctgtcattcgcaaaggccattttaacgcagcccaccgtttgtacaatcctgagtggtccgatgtaaaaaacaaggaagtctttggaatttgagccaatcccaattaccatggacataactatgaaattgatgtcaagattaccggggaactggatccttcgactggaattttaatggatctaaaagtcttgaaagacttgattctggagcatgtggagtcccattttgatcataagaatctcaatttggattgccccgaatttgcagaaacaatacccacagcagaaaacatctgtatagaaatccatcgacgattgaggcctgtgataccccctgagttcgagattcaaataaggctttcagaaacccctcgaaactttgttgaatttccagcctaaccaatattgaataccggacgggcaaatgaatgcatcaaattaaacagtaaaatattctcctgggactcccccggggactactcttaaggctttacagccctcttttgcaaacgaagggttcttagtgtttgttcattagggccaatcaaacggatgaaatacaatccttcttccagttcactgatgtcataagaagcatttggcgtaggtctgaatgaacgcattttctttcccaaaagattcaccaaatcaattctggtcaacccggtattgtaatccactgtaaaagaattggatgcaggattcggatacaccttaacggcaatatttttgatatccctgttggatactactttattaaaagcatagtccactttgatctttttggtggtatcatctttctcgtaaacccacattaccacatgtgccgctcccatggtaccatcctcatatatatggacatccagattaaaggaatctcccggagtaatttgattgggataaatttccgggcatttggctacatggtcagcataacaattgtttgcatcacatacataagtgctccaacccattggcatcatcaatacctcccgattccataacatgaataacgtttcattggtatggttacgcacataactgccgatgtggtggtcagagttgtccggagaaaaataaagggtatttggattgggacttacgctgaatcgggcgttctgcgccaaagccaaatcacaaactaaaagactgataatcaggtaaatatatttcataagcacttcttatgggcaaatccaactgtaaatgtataagttttcgtatgttttttcacaaaaagaactgttaaaaaatggaaagatttcttcaactgtccgacatcaggtaaaacgattaatttgcctgacaggctgcttatctttatcgcaaagttcaatttaggtcatcattacccgaacgcactgtcacaatgcctcataccgtcatcattggaaatggaatagctggcagtacctgtgccagatggttgagaaactacacacgagaggcaatcaccttggtatctgaagaaaatccctggttttttgcaaggaccgggatgatgtacgtgttcatggggcaaatgcgttgggaagatttggaagtttatgaaaaatcatattggcaacaaaaccactttcaactgttgcatagccgtgcagttaatttcgattttcaacgaaaaaggatcagattggaatcggaaacttctttggaatacgatcgtttggtcctcgctttgggatcgcatcctaaacgtttgaatattccaggagtcgatttgcaaggagtttctggcttttatcataaacaagatttggaacacatacaacaactgagtgagggacttcaacgggcagtcatagctggaggaggattgattggagtggaattggctgaaatgtttcattccagaaacatccccgtaagctttctcgttcgtgagaaagaattttggcaatcgaatctcccactggaagaatctcaaatggtcgccaggcatatccgaaacaaaggaatagatctcagactccaaacggaaattaaagaaataaccggtgtgcatggaaaagtacgttcggtcatcacccaatcgcttgaacagattccttgtggtatggtggggatcagtgtgggtgtagaacccaatgtgggtagtcttagaaactcaaacttacaaatagaccgtggcattttggtcaatgagtacttgcaaaccaatctggaaaatgtatatgcaatcggtgattgcgcccaattgcggacagtggaaacaaaccgaaaaccaactgaagcggtttggtatacgggtaaaaaaatgggtgaagtcctggccaaaaccctttcaggaaatcctacaatgtaccgtcagggcctttggttcaactcggccaagtttttcgacatcgagtatcaggtatatggttacgttcccccacttccggaaccaaccctggattcactgtactgggaacacccatcgggtaataaatccatgcgcctggtctaccttaaggaaagtaaacacatcattggattcaacctcatgggtatacgcttccgtcaggaggtttgcgaaaaatggattcggaccggtacggttttggaatccgttcttcaggatatacgacttgctttttttgacccggaattttttcccgaccattcgaaaggacttctcgaagcctatcgcttaaaatttgataaaacaattgaattgaaatcttccggaaagctaaatgccgttctgcggttcttaaaatcttaagccctgttctttatgctacacaaatattcatttgaaaaaccagcttttatgtctgtcgttgaaaaaatttgcctttttacaggtctgatgaccttgatcgcgatggtgttttgtcatctgttaaattaccaggttcctggcttttggattttcacattgattttactgagcttttcaatagcaggattttcctggtctaaatacaggaacgctacctccggaatgctgaatcacggaatacgttttagttcattgaccaacaggggatggatgtcaatactcacaactgttagtattacggtattttatatcttgttgtattggaggccggaataccttggttatcatcctgaaggtaattatggattcgtctcgtggtttgatccgttaagtatgttcttaaaaaatcaaaccgcaagccagtggtttgtatatggagtattttacaccgcagccatcttgttgtttggcattcgattcattttaaaataccagcatgcacccaaccaggtgatcagaacaatttctgtaatgtttttccagttgtttttcgcctttttgattccggaatttatgttacgtatgaatttaccgtattccgatttgaaaaacatgtggccattgaattattctttttttgatcactggaatttagcgtctcttcaatccaatggatggataggaacctgtattctttggattggtctatcgatgattttcattatatctcctctattgacttacttctttggaaagcgttggtactgctcgtgggtctgcggttgtggcgggctcgccgagactgcaggtgatcctttccgacacttgtctgataaatcagagaaagcatggaagctcgaacaattgctcatttcttcgatcctcctgtttgtgatcttaatgacagctggagtgctctatacattcagaacaggtcaacctgaattgtttggagtatcaacagcagctctccgtaaaagctatgggtttttcataggcgccgcattttcaggagtaataggcgttggtttttatccgcttttgggtagccgcgtatggtgccggtttggctgtccgatggctgctttattgggcattcagcaaaagttattttcccggtttagaataacgaccaacgggggccagtgtatatcctgtggaaattgttcgacgtattgtgaaatgggtattgatgtaagatcatatgcacaaaaaggacaaaatatcgtacgggcgagttgtgtgggttgcgggatatgtgcgacggtttgtcctagaggtgtcctcaaattggaaaatggttcattggatatctttcaccgtctaccttcaggaaatcccaatagaaccaactgatggaggggctttaaaggcggtcatggatacgaatgtagtcaatggttgatggatccaatgatgctctggaaaaaattgtcatgtgcatttttggattaattttagatacaaaaacatcattttcattcacatccatagacattaaaacgttttattataaatcaatatccatgaaattcatactaaatgcattactgcttgtgtgcagtacttcaatgttgtccattgcacaaggtcaatcctattcattaagagtgtccgatgtgcgtaactcaacgtatagtacgcagggcaccattgaagaatgcttattgtccgtacgtccgaagggattgttcatggaatttggcttatacctgagcttttcatcccgagggtcaaattttaaacccagcgattccctggaagtggtattgaatttttccttaccggataaagcagtgatcaccgattcctggttgtggatagggaatgagatttgtcaggccagtctgctggatgtcttttctgcttctcaaatatatgaaaacatcgtaaagagaagaagagacccctccttgctcactaaaaactcaaacaatagtttcaccctgcgggtatttcccatgggtgggaatgaacaacgccatgtgaaaattacttatttggtcccggtaagctggacctcatccaatgttcaggtgccggtaccggttgaaattattaataccagcagatatatacctttggattttccgatcattttctggaatgatgaaaatttcttatttgaaaatgcgtccaacacttatgcttctccactcacagaaagaattgatccgattttaggaccatacaaaaccatgacgtttgcccctaatggtatttttaagtccaatacccttagctattctctaaaaaatgcctcggctgtttatataggagcgaataaaaactccgatgtttcgtattatcaatttgcagtgcgtccaaaccaattgattgaagatactcaaaccattaaagtggtttttctggtcgactatcaggacaataccagcatctcaaaagatgatgtgttgagtgagttaaagaattttatgaagcaaaatttgacctccaaagattcatttaatatcgttttctcaagctttaatgttcaaccttcagccactcaatgggtagctgcatacgactacaatatagactcagtggtggatgtgaccggtataagattggctacctacagcaatcttcccaccgtcatcgcaaagggaattgattttatcaatcaacatggacaaacgggaaatctcatcttgttgaacaactctgaccaattcaactattttgtttctgccaatgaactgttgaaagaaatcgccatactaaacaaaaatgaatataacatatcaacggttgattttggcagcaatagcaaatggagttactttaataaccggtattactatgccaatgaatatttgctttcgaacctggcaacgctgtatggtggaatttatgtaaatacgaggagtggaaaaacatttagacaagccttagagcagacagaggaaggctttcagaatttcattgaaaatattgacatacattttaaacccagccagggaattgcctatgcaaaatatttaatagatcctattgggtcgtttgtttctacccgtgatgtgattcgccaggttggtgtatttaaaggtgaatttccattgatattagaaatttcgggtgaatacaataataagattttttccaaaacatttttgtatgacgaatccaagatagttcagctggatagtatgggcaagaagcaatggcaggcgttgtcactgcttaacctggaaaatcagaatagtggtataaataccgtggaaatcattcgaaaaagtcaggaagccagaatattgacacgttacacagcatttctgtgcattgaagatacactcttgtattgtccaacttgtatagatgaaaaaaatgtaccggttgacaacgacgatcaaaaattagacagcctttgggaaatgaaagtatatcccaatccatttatggatgtgttgaacattgaagttcatttccaaaatgaaattgcgactactggtgaagtggcaggtcgcattctggatctatcaggaaaatctgttcaccgcttcactgccttagtaaattcatccaacatactccaataccaatgggatggttccgacttgaatggactgcaatctgctcccggagtttatgtggtcatgttggaaaccaaacaaggtatggtgagacaaaaagtcatcaaaggaaactgatcaaggtttggaccggatgaacacaagatggttcagccggtccattctattccatatacctttcggatgattcttaagataatccatagaaaagtgttcattggcatagaatggtttattcctgcacccgttgaccccttaccacttgcgcgtttcgttcagacacgttggatttttgcaggtcgaccatcaaacaactgatcgcagattctgtggtcgtgtaccaattgacaccattataagtaatggttcctgaattccggtcccattcttttccaagcaacatataacgatttccatatttaggattaggtccaaacattaaatattttggaggatcagaagattcaaaacttattgcaaagcgattggattttggcgagaaaaggtaaatgcatggcgttccttttctaaaaataatttcttcaattttttcaccttgtatggttttaatgattccatcctgaatgtttgattcaccttcgttgaattttcttctcaacacgatgttttcagataaataaaattggattctttttaaatctttgtcatcccaggaatattcttcatatattttctgggtaaatggagtcagcaccggactacatccaaccatagtataaagaacagcaaccatcagcgtgaattgaaaggatttcatattgtatttatttttttcgaaggtatgtgaataataccttagactgaaaaactttaatacaatttaaccactaccagaattttttttagtttccttaacgtttttcgaaatttgtgcaacgaaggtctttcctcatatgtccaaatgtttaatgccatattaaacaaccgcatcattgaacagtattgtttatgtggagattcaatttccaggcttggatataccaaatggaagtaaattgtagcgttaaaacgacttcttcttcatcgattgaatttcccgccggatggcaaaaaaatcttttagcaggcgacttgattcttcttccattaacccatattccactttagtcttcggatgtaacataccgctgccatatcgcatataacccatttttaaatcttcggctgcatataccagtcttcccaactgagcccaccgcaaagctccggcacacatgggacaaggttcaagcgttacatacagcgtacattctttcaaatacttgctttgcaagaactgggaagctgcggtcacgcagaggatttctgcatgggcggtaatatcttgcaacaattccgtttgattgtgcgcccttgccaggagttggtggttggataccaatactcccccaattgggatctcaccggcttgcattgctttcatgccttcatccagagcgagcttcataaaataccgatcgtcataaacctgaatcatgaggatttgcaatttttcagggtaaagttatatctttgcacatggaacgacatttcttttcgccacaatttcctttccacgaagccctgacttttgatgatgtattgctcgtgccttcctattcggaagtattaccgcgtgatacagatatttctacacgtctcaccacagacattcatctcaaggtacccatcgtatcggcagcaatggacacagtcactgaacgcgatttggccatttcgatggctagagagggtggacttgggttcatccataaaaacatggacatcgaaaaacaggccgagcaggtgcggagtgtaaaacggtctgagagcggaatgatcatcgatccggtgacactgcgtgcggattccagggtaaaagatgccttacaattgatgtcgcaacatcgcattggcggtattccggtagtggattccaataataaattagtaggcattctcaccaatcgcgatttacgatttgaagtcaatcctgaaaaaccagtcaccgacatcatgacccgggaaaatttgattacagcaccctctgggaccaccttagaaaaagctaaaaccatcttacagaaatataaaattgaaaaactacccgtagtcaaaaaggatggcaccctcatgggattgattacttacaaagacatcatgaagctccacaattatcctaattcctgcaaggatgccctggggcgcttggtggtaggtgctgctgtgggtattgcttccgatacgatggaaagaatagaagccctggtgcatgtggatgtcgatgtcgtctgtatcgatacggcgcatgggcattcaaagggtgtattggacatggttaaaaaagtgagaaaacgtttcaagcatttacaaatcatagccggcaatgtagcgactggggaaggcgcattggctttggcaaatgcaggggctaatgccgttaaggttggagttgggcccggtagtatctgtaccacccgaatagttgcaggagtgggtgttcctcaattgacggccattgcattggccaacaggtcgttgtctaaaaaaggtattcccatcattggtgacggtgggatccgatataccggagatattccaaaggctctggcggcaggggctagtgcaatcatggccggttcgctgtttgctggcacggaagaggcgcctggcgagaccatcatattcgaaggcagaaaatttaaagtttaccggggcatgggttcgctgggatccatgcaactgggcagtaaagaccggtattttcaagatgtggaagaggatatcaagaaattggtacctgaaggcattgaaggcagggtcccctacaaaggacaggtttcggaagttatggtgcagtatattggaggtttaagagccagcatgggttatgtgggtgcgaaaaagattgcagacttacaaaaagcgaagatggtacgcatcacacatagcgggatcaatgaatctcatccacacaacattacgatcaccaaagaatcgccgaattatactcgacgataaagcaagtttttattcctgataaagtccgcaatgcgctcctgcgggatcctgaatgatcgcataacgagcctctcccatggctttaggacccaggatcactttacccccatttgccaacacttcggtgatgcttttatccaaatcgttgacataaaagtaaagcatccaaaccggaggaatctgctgattcaccccttttgcaaaacagatacccacttttgtttgaccatcgtcaggagaattcatacaaaaatcagcatagtcgcccatattgatttccgaaaagctatacccaatagccgctgaataaaagtccctgactttatcagcgttttcaaccgtgagatcagcccatccaaaggatcctgcaggatttttcataggtaaattagattttatattaaatgtaaagaaaagcggactgaacgacgatccaaaatgaaatcagcaaaataaatttgatatgtactattttgaattcacccaatttataaggaggctcaaattgactcttcgatcaaatacattatcattaaataatactttaatatttatgatattgattttccagtatataataccatagtttagtatttcaaaaaaaaaaggcgattccaattgctcagaacccccttaaaagttttcactacggaataatccttattgtgatttgcttcgaaacaaaattaataatttattcttaattttccaaatcattcaccaaaaaatcaacctatgaaaaacattcttggtcttgacatcggcacgaattcaattggatggtctttcgttcaacttgatccagatgataataaaggaaagattaggggaatgggatccagaatcattcccatggataccgatttactcaataatttggaacaagggaattcaatttcaaaaactgcctccagaagaaaattccggggaagtaggaggcttcggcatagatataaaattagaagaaaccggctaatacagtgcttaaaaattctcaattggttacccgaaaacttcaagccaggaaatcgtttgccctattttgaaaaatcattgtcagaattgcgaagttatttaaactcaaacgatgtaactgaagactggaccatttattatttaagaaagaaagcattatacgagagaatcgaagttgaagaactcgcaagaattttgctccatatgaaccaaagacgtggattcaaaagcaataggaagactgaccaaaataaaccggaattagaaattatagatgatgttaaccattccaaatggattgagatcgcaaaggtcaactcggttattgagacaggtgaaaagtttaaaaataagaaccaatatgaaattcaattctgcgatggaaggaagggttacatgtaccgtgattctcttccagattggaaagataaggaaatggaatttgagttcagacttcgtttatcaaaaaaaggagaaacgctaacattaagcattcccaataaaactgattgggtacagctcaaagatgcactatcgaaagacatcgaagaaaaaaatcttcatgtaggtgaatattatttagaagagatacggaaaaacagaaattacagaatacgggagcgaattgttgagcgaacaagacttatgaaagagcttgaatgcatttggaatcatcaagctcaatattatccggaactcaattccagtcaatttcttccaataatttccaaaacactttacttacacaatgaacaaaaacaaaaagaaattgaaggcaatagtctgcttcacgtgttaatgcgaaatattatcttttatcaaagacctcttaaatcacaaaaaaacagcataggtgaatgcacatgtgaaaaaaagtgctatgttaattccttgacgaataaaattgaattcaacggtataaaagtttgcccgatatccaaacccatatttcaggaattcagaatttggaaaacaataaataacttaaaaatcattcgccatgaattgaatggtgaaataattaatgatatagatgaaacatcaatattctttccagagaaattagataccatatttgaactgtttgatagcaaagaaaaaatcacgggcaaagagatattaaaagaattaggtcttacccctaaaacacatcgcttaaattttccagatgaaaccgattttgttggaaatgtgacaaagaatgccatccgtaaagtgctaaaaaaatataattatgagaatagcaatttattggataatgcacaagcccttgaatatatttggcattgcatttattcgatagaagatgaaagagcaatttataaatctttaaagtctaaacttaaactaccagatgaaatttgcactgccctttccaaattgccaccttttgaaaataggtatggtgcctattcctcaaaggcaattgcaaaaatgctaccttttatgcgatcaggcaaattctggagcaaagatcaaattgatgtagctacccaaacaaaaatttccaaaatcatagatgctgaatttgatccgaacatcagtgaaaaaaccagggaacagctgcaacatttaaaagaaatcgatcatttcggtggattaaccgaatatttggcgaaattcattgtatacggaatgcaaaacgtaaccaatgattatgggcaagttgacacaccagacttaattaagaacccaattaaacctaacagccttaataaccccattgttgaacaagttattcatgagactctacagctggtaaaagatgtttggaaacaatttgatcgccctgacgaaataagaattgaattggctagagattatagaaaaactgctccagaacgcaaaaaaattcataaacaaaatttaaaaaataaggaagataatgaacgcatttctgcaattctccgggaacttggaataggcaacccgaattcattgggtgacatcgaaaaacttaaaatagccgaggagaatgctaaatttagtggatttgatcatcaacaacaggcttttttctctaaacaatcaaatccatcaaaaactgaaatagaaaggtatcgactttggatggatcaaaattgtatatcaccttattctggtcagataatacaattaagtaaacttttcaccagtgaatatgaaattgaacatattattccaaaaagtaaatatttcgatgattcattggcaaaaaaggtaatcgttgaagcctgggccaataaggaaaaagataaccatactgcccttcaatacatcaatataggaacccagttgaatggaaagcaacttttatctccagaacaattccttcatcatgtaaataaaacattctctggtaagaaacggaaacatcttttagaagagagtatacctgaaggattcattgaaagacatttaaacgatacccggtatatttcaaaaaaagttaaggaagtactccatcagatatgcccaaatgtgtatagcaccattggatctgtaacccatgaacttaaaaataaatggggattatcctctttgttgaaaaaaataaatgtagagcgcttcaaaagactggaacaactcacccaagagacattggtcttcaatactgtaggagaaaatggagaacggcatctacagcttaaaggatttgaaaaaagaatagatcacaggcatcatgccctggatgcgtttgtgattgcttgtactcggcaaaaccatattcaatacctaaatacccttgaatcaaacccaagtaataaaaccactcatttccagtttcaaaaaatactaaagagtagtaaaataagagattttaaagaaccctggaatggatttcacgcagatgttgaaaatgcaatggacaccatgatcatttcatacaaaaagagagcccgagttaccaataagccaagaaataaatacttaaaatatatacagaatgaagaaggcaagtgggtcaaatccatgatgattcaaactgaaagttcaactgataatccatggataagcataaggcaagcattacacaaagaaacattcagtggaacggtaaaattaagggagtataaggatattccactaaagcaagcgttggatcaaatagattttatttgcgacaaaaccataaagaaaaagctaaaacaaattgcgaatgaatttaatggcaattcaaaggaaatattaaaatacatttcaaaaaatccgttacaagaatccagtggaaaacttattgacaaggtcacaatttggtattcgaagacctattcaaaaagcagagtatccctggataaatcatttgaccccaaaaaaataaataaaattgccgaatatccgacaagcaaacctggcaaaggattaaaaaatatattaattgaacaccttgctcaatttgaaaataaacctgataaagcatttgaaggagaaggtcttgaagcattggcaaaacattttggcaaacgcataaccaaagtgaccatcaaagaagaaattggaaataaatttgaaatccgccctggcaatttagtcgaggccgctaaaggtacaaatctctattttctgatatacgagcatattgagtcaaaggaaagagaatatgattctatcagatttctcgatgttgttgaacgtaaaaaaaacaaattgccattagcggacccaaaggatgggtacaaattttttactctttctcccaatgaactggtttatgtgcctgaacccgaggaggatatttctttgatcgactgggatcaagacaaaaaaagactcagcaaaagaatttataaaatggtcagttgcactggaaaacaatgtttttttacgccccatgttatttcgaaacccgtgatcgacaccaaagaactgggagctaacaataaatcagaaaattcatgggataatctcatgataaaaaaaacctgcgtaaaacttaaagtagaccgtttaggaaatatacgccccattttataaattaggtgagatcataaaacgcattgagaaagatggatggtccctgattcgacaaaaaggtagtcatcatcaatacaaacatctagtgaaataggactcgtaacaattcctgttcaccggttatctaataatttacccattggattataaaaaagtattttaaaacaagctcaaattataaatgactaatgttattaccatgataaagtatgcgataatcatcaaaaaagcaacagatggcgaatacggagtttatgctcctgatttttgccgggctgtattgggatgggagcgagtaaaaatgaggctattgaaaacatgatcgaggcaatttactttcacctggaagggttaaaagaagagggcctgcctatccctattcccaatgctgaagcacaaaacctggccttgagaatttagctaattcatttatcgacttggcaaataatttgctgtgattcattaccccggcattggtctgaataaattattcatgttcaaatcaagggtaatgatcaagaaaacgctttattttgggaacccatcttaccttcatttgaaggatagtcagttgatggttaaagatccagaatccgattcacctgaccaatccataaaagctaaaatacccattgaagacattggtttagtggtattggatcatcagagaatcagcattacccaaacnnccgtttcacttacccttccaatcgcatacaatgatactttcagcgaaaaagtaagaattcaactacaagccagcgaacccttaaaaaaacaactgtggcgccaaacgatcatggctaaaattaacaatcaagccggggtacttaaagcattaggacttgaatctacaaccattggcaagctggcatcacgggtaaaaagtggtgacccggataacttggagggtcaggctgccagcatatattgggaaacactgctcgataaatacaatgtgacacgcggtcggtttgatggaccacccaatcaatttttcaattatggttatgcaattctgcgtgcgattattgccagaaatctggtaggtagcggatgccttactgtattaggcattcatcataaaaataaatacaacccctattgcctggcagacgatattatggaaccctaccggccactggtcgatttgatgattttcaaatacctcagccgaagtgcatcgttagaagaaacattaagcaaagaagataaagcccatttattgcagataccggtcatggatgttaaaattgatggcaagtcaagcccattaatggtaggttctcaacggaccagtgcaagtttaatccgttgttttgaggggaccgaacgcaagatcttatatccaacattatgatacataacaggctaaatcaatataaaatcatgtgggtttttgttcatttcgatcttcctactgaaacaaaggcagataaaaaaaactatacgcgttttagaaaatttttactcaatgatggttttaatatgatccagttcagtatatatgccaggcattgcagttccagagaaaattcagaagttcataagaaccgggtaaaaaaacatttacccccacatggcaatattgtgatgtttgaaataacagatgcacagttcggtcgcatggaattcttccatggaattaaaccgaaagctgctccggcagcttatatacagcttgaaatgttttagggaatctccaggattaaaaaatcaatgccaattgggaaatgtaatcttgaactacggtcgtttttgaaaggcaaattaagatgtaataaattgatctttaacaacttagatcagagtatgtagtcacaaatctaagttgatcaaagaacgaaagcaaatcacaacaaaactaaatcatagctgatttt

SEQ ID NO: 3462 - DNA, 15903 bp, synthetic construct
  source 1..15903: mol_type = other DNA
  misc_feature 1..15903: note = Synthetic
cagggttactattcatgaatatgcttccgcatcggcaccgccatttagccggttaaaagaccgcatcaaaaaactaatcaatgcaaagcccgactaccgcattttcaataatgagtatgtgttgaaccgatttcaaccccatgataacatcccttatggtatccgcaattacgcaatacaatcaggcgtgatccctgttatacctatagcacaaaagaaatatgattttgtatatgtaggtacggtagataaaagcagaaaaccggaattactgttgaattgctttgcatccggttccatgaaagatcattccttactggtactttcacgccactatgatgcgctggccaccgattatgcagcggcaatcaatatcacttttaaaggccctgttccttacggcgacatatatacacatatgcagcaggcaagatttggcattaattatatgcccgatgttacgccctacaaccagcagacctcagccaaattgcttgattatgccgcctgcaatatgcctgtaattaccagtgattatgcctgggtacgcagctttcaaaaagaatatggcggccactacttttacctgcagccagccctggagaattttacctgggaaaagataaacagttttacctacacaccacccaacctcagcagctggacctgggaaaaacaaatactacaatcgggggtgttggcgttcctggagtctaagtttcctattctgcccaaccggcattcagtgtagtcatatactcatcgatcacatgtttgatatcgaattttttgatcacgagggcgcggccattgcggccaaggcgggtccgttcttcccatgacaggttgatcatccgttccattttatcagccagatcaaaaggatcgtgtggatgacacagaaagccggtggtattgttcatcactacttccttacaaccgcggttattgctggtgatcaccggtaattccatactggcagcttccatcaggcaacgcggaacgccttcattataaaaagaggggaatacaaaacaatcggcccgttgtaaaaacggacgcacatctttggcgaacccgccatattggatcagtccttctttctgccagcggtcgaggtcttcctgtgaaatggaatccgggtgatgctgttcaaaaaaaccgatcagctcaaaccgtacggcatagttctttttccttaatatccgggccgcatcggcatacaggctaatgcccttgcttttaagcaggcgcgtgctcattaaaaaagtaaaaggtccagtgtcttttttagcgatgcgctgtggaaaagagaaatgcgtggtatccaccccttcacccggcaataccttcattttctcgatatttacgatgtgttcgttgatgaagattttcgcatcctcattattcaggaaccatacttccccggttttacgtaaggctcttttataaagcagttttaccacgtggtacaaccagttgcgtttcgcaaaaggatagcccaaaccggtaataactgccaccgaaggaataccaatggccgcagcagccagggaaccataaatattaggtttggctacataatgaaagataaaatcggggcgatgctggcggtacagttcttttaactgacggtaaaaggccagatcggcaacggggctttcggttttattattaaaattgaggggaatgaagcggcagccactcttctgcaggtaaccggagtattcatcatccggagctaataccattacctgaaacccaaggtcgatgaggtggcggatcacatccaacctgaagttgtagactgaccacgcgctgttagaaacaaaggcaatcaacttatgggtaccgaccattcaataaaattggtctcaaatgtatagatttgtcgcatataaatcaatatgcaataagggcaataggcagcagcaaaaagcgttgcattgttgccggttgtcaatttgagtataacatgcacatattacttcttcttttatatagcatccttttcatttacctcctataccgccttacccgcagaagcgtacccttgactattacagaaacggccctcgcctttttatttaaagtggccctgggttgtttatacggttatatctatctgcattattataatggcgacgatacctgggattttcaccagcattcgctgcgcgaactgcaaaagctaaaacacgagccgctccggtactttaccgacctgttacccacccgttcctttgccgacgccggcggtgccttttggaaagggctttacatatatatacattcacttgaatttgacagcattaccaaacttctgagcattgccaatatcttcagtggcagtaattattatatcaatgtggtgttcttcaatttcatcctgttctggggacattactggctgtttagtttactggttaaagaattcccccaaaaaagaaaaccgctgttgttgctgatctttttctttccgcccctggttttctggttaagtgggatccgcggcgatgggctcgtattgtttttcctggccctgttgctggtacactttcgccggtggttgtatgaacaaaaaaaatggtcggtgttgtattgtatcatcggtatggcaggtattgtcgtatacagaaaccaggtgctgtttatattgatcccagccttactggcttggtttgtaaccataaaatataaccggaaaccggtggcaactttttgctgcacctatgtcattggtggtttattgttctttgcaagcgcctgggtatctcctgccaaaaacctgcccggggtgatcgtttcagcccagcaatccttctttcagttacatggtaccagttttgccctcgatagcctgcagccaaccgtcaacagctttgtgcgggtactaccgcaggccctgagccatacttttgttcgccccaccgttctggaagcaaaaggcgctttacagatcatgacggcagtggagatcatggctttctgcctgctggttttactagctataataaaaagagatatacatagtaaacagacccttcaaaaaccgctcatcctgttttgcctggcttttggcgttacattatatatatttatagggtatgtagtcccattcccgggcgccattgtacggtacaaagccattccggagcttttattgctttgtgtaatggtgacctctacaaattggagccttccggggaagattagtaaaaaactatatatttaaaaaaatcgcatttttacccctttttttagaccaaaaggtacttttggccaaggtttttctgtgttttatcaaaaaaaccatgatacaaattcaattttttttttagacaggctatttgtccttaatttgcacaaaagcaaaaattttagtgatggaatcattacgttttaaagcaatcaacgacctgacaagccagaacggactggatgtggaaggtcctaccaaaattaccggcatattcggtgagaatgtatttactttaaaaactgcacgtgagtttttaagtgatgaggcttacaaaagtttgaatgcctctatcaaaggagcaaagaaaattgaccgcgcaatggccaaccagatcgcggccggacttcgccaatgggcagaaacaaaaggtgttactcactatacacactggtttcaacctttaactggtacaactgcagaaaaacacgattctttcttcacactgaaaggtgatggcactgcactcgagatcttcgacggtgatgcactgatccaacaagagccagatgcttcttctttcccaagcggtggtatccgtgcaacttttgaagcccgcggttatactgcatgggatccttcttctcctgctttcattatggagatcggccagggtaaaacattgtgtatccctaccatcttcgtttcttataccggtgaaaccctcgactataaagcgcctttattaaagtcgctcgaagctttgaacaaagctgcagttgaagtgtgccactatttcgacaaaaatgtaaccaaagtaaacgctaccctgggttgggaacaggagtacttcgtaattgacgaagcgttcttcaatgcccgtcctgacctggtgctgggtggacgtaccgtattcggtcactcgcctgccaaaggccaacagctggaagaccactactttggtgctatccctgaccggatctacgctttcatgcgcgatttcgaacaggaatcatacaaactgggtatacctttaagaacccgtcacaatgaggtggcacctgcacagttcgagtgcgcccctatcttcgaagaagtaagcgtggccgttgaccataacaccctgttgatggatattatggaccgcgttgcccgtcgtcataaattacgtgcgttgttgcatgagaaaccattcgccggtattaacggtagtggtaaacacaacaactggtctatggctaccgataccggcatcaacctgctggcccctggtaaaacaccaaagaccaacctgatgttcctcacattctttgtgaacaccatcaaggcggtatatgattattctgacttaatgcgtgcttctatcgcttcagccggaaacgatttccgtctgggtgccaacgaagctcctccagcgatcatctctgtattcattggccagtacctgtacaaagtactgaacgatgttaaagaaagagtaggtggcaaattcgatgagcaggatgaagccatcctgaagttagacctgcacagaagcattccagagctgttactcgataacactgaccgtaaccgtacttcaccgttcgcgttcactggtaacaaattcgagttccgcgctgtaggttctactgcaaactgcgctaaccccatgaccaccctgaactcgatcatggctgaaacgctgaagaaattcaaaaaggatgtagataccttaatcgaaaaaggcgagaagaaagagatcgctatcatgcatgttattcgcgagtacatcgtagccagcgaaaaagtattgttcgaaggcgacggttatagcgaagaatggcaccaggaagctgaaaaacgcggcttaccaaacgtacgcactacgccaaaagcactggatgctatggttaccgaaaaagccaagcacctgttcgaaagcaacagcgtattgacgcacgtagagctggaagcccgtcacgagattgaactggaaaaatacatcaagaaagtacaaattgaagcccgtgtaatgggtgagctggctaccagccacattttaccggctgctatcaaatatcagaacgaactgatcgcaaacatcaaaggtttgaaagaagttggtttgaaagaagacagctatgctaaccagaaacagatcctgaccaaagtttctgagcatgtaaacaaaatggctgaactggttgaaaagatgatcgaagctcgtaaaaaagccaacgttatcgctaatacccgcgagaaagctatcgcttactgcgataccatcaaagaagcgtattttgatcagatccgttaccacgccgacaaactggaattgatggttggcgatgagtactggctgttaccaaaataccgtgaaatgctgttcttgcgctagcctcccccatcctcctaacaagtcgggaggagtaaaacagaaattccatcaagaaggtatactgacatgacaggcaaggaccccgtccgccaactggcggatggggttcttccattttagccttaccttaatgggatgaaacaaagcgccggtatattgccttacaaactggtaaaaggaaagccattcttctttattggccatcccggcggcccctattaccggaataaggacgttggcttctggagtattgtaaaaggcgaaatggatgaaggagaagaagccctgcgcgctgctatccgcgagtttaaagaagagactaccatcgacgtcacaggcccgctcatggccctgacgcccgtaaaacaaaaaagcgggaaattagtacacgtatgggccgttaaacaggactttgcaactgacaatataaaaagcaatactttcacactggaatggccacccaggtcgggcaaaatggcggaatttcctgaaatggatcaatttgagtggttagatgaagcaaccaccctacttaaattaattccaggacagattccgtttgtacatgaattgttagtccacctgcaggccgccactaaaaaataataatatggaattaaaacccacctacggaattggagattttaaatttggaatgaaggcagcagatgtaattgccaaactcggtaaacccgataaaatgtacgaagatgaagaggatgagaacgagttgatttaccagtacaacaaaagcaaattaaagtttaccttctaccaggatcatgatggcaagctgggttatatcacctgctctaacccaacgctcacctaccagggcaaatctgttatacaagctccagttgaggtagtgatcaatgaggtgtttggaaatattcaggactggcaggaagaagattacaactccttcactacctacatcagcgaaaaacaatggctggttataaatgccgaatacgatgaagtaacagatattgagctgggtgtgccggtgaagaatgatgaagagtatgattggaggtaaaagctaactaccacacttaaagtatattttacatgaacgctccgggaacggggcgttcatgcgttatagatacatatataaacaacaatcccgccgatggcgggactactgtaaaagttttcactgcggaatggttcttaacgttaccgacctctttggttaaaacaaagaaaaaccttataattaatttctataataaacgttagacacctattcactaaccaataacccctacaatgaaacgctttgcaatccttatgacggttttgttgccagtagtcaccatcgcccaaacccaatcgccaaaaatttcaggcattggacgatttaaaataggtttcaccactactaccataattgatgaattgtcgaaggaattctcctcttcaataacagaaacaaatgatattatggcgacaatgactaattattacgatgaaaaccctactaaaatcctttatatctccaaagagaaaaatgaaaatgcagagtttccgcacacttattatttaaaacatcccaaagtgaaggtatatttcttaaataactttcttatccctgaggttgttgtcttgcacaatatctacctgaaattttataatgatactttatactcattaaactgcgaaggttctgagttgttggatactgcacttaccttgaaatatgggaatcccaaatttactgcaaaaactaaaaatatagcttgctctaatgcatacaggacatttacctacgaggaggcgacatatacaaaagaatgggtaaacccatcaaaaaagatcactgctgaccttgtctattcccgttattacaacagtaaatgcgagaagcaaattttaaactactttctcttattcaataatgtgatcacaaaaaaaatagactcagacattgcgcaaagtgagcaattacaaaacaaacagaatttaagcgaaaagaaaaaatcattgtccaatttctaataaatgcactttcaagcatcaatgaggttcccggcattatttaaaactttaacccctcattaatgaaacgtcctttccagttattattcttattgatctctgttaattcatttgctcaaacaaagcccgttaccaggccttattttaaaattgaacctgccctggtatttgtaaaagacttggatcctgcgccttatatctcggccggttttggtggccatattggccgctttgtagctttgggtataactggcggatatctaaagtttgagggtgctagtgaggctgtaattcctttagggctggatttggcctttactgattacaaaacaaaaaaggtacagccggtggtgaaaattcatgcatgctaccccatctacggagaatcatcaaatgcagccaccagggttgggagcacatcagtaaatgcatcatctgaaaccaaaggccagtttatgttcaatataggtggtggcctggctatgccgattacagcaaaaaagaagttctttttagcggcgagctatggccaactgatgatgaaaagttcagtaaaaactatgaccatagtcgctggcaggggaacaaatgcttcctcatctaaaagttcacagactgaaatgctaacagtttccctgacatttatgctttaattgattatcaatgttttaccccggtaacaaaaccggtaacagcaccttaaaaaactgaccaaaacggccatattcaaaaaattaaatgcctgacaagcaaggtgttaaaaaatgaaaacccgcaactgctgactacggatcaaaaggtttctgatttgaatccacggggtcacaaaaaaggctttccaaatcaaacccgctatcagagcgggttttttagtgccgtaatttcatttattgtaaattttctaaaaggaattgggttattttcaatgatattgtggttttaatccaatctggttgccggatcagacatttcaaaccaattcatcccatatttaaccgtcagatttattaatatatgaaacaatcattcgctgatctttcctgaaatttcgaatccatgttttgattaaatggctacacctaccttggagtctgttctcaacaattgctcaaataattttattacatcgtatgggttaaaaacaggcaatagcttgttttacatatatttgtattgtctggctatattagacaaataggaattatggacttttagcattaaatttgaattagatgccaacattgttgcttttaaatggcatacgttttttcttttatagcaatgaaaacgatgagcccattcatgtacatgttacaaaagggaatgccaatggaaaaatctggcttgagccatcaatagaagtagaatatctatatgattttagcaattctgaacaaaaagatattttagagattgttcaagcaaattctgaaaattttaaaaagaaatggaatgagtacttcggcaaataaacaattcgatgctatcgacaacattatatttaaagaagggttacgtataaaggcagtggatattcatcctgaattagatttaattactatttatctaaatacaaaggctgttttaagccaaaatatatcatcatacgcgctattaagaggagtagaaaagcctcagttattgcaatacgaattaattggaggtggtataggtattcattggcctttattagatgaagatttaagtttaaaaggctttttacaagatgaattgcgtagagtagtaaaaagtgataaagctcctattgctgcatagttgcgatttgcgtgagcaatattaaaagtgattctaagagaagatatgaattttggaggtgcctaataaggttagtcccacctcaataactgatctgcggaatgatagtaactcgatcctcaataacactaggaaggttattctttttttagagaaaatcttttcccggaaactttttgccagggcattcaacaaatacctcgattttattattgacattggtcaatttttgaaagagaaatttacaggattcaaatattcattacctttaacttgaagtaaatcatactaaggattattccgcagtgaaaacttttacagtagtcccgccatcggcgggattgttgttttatatagacttacatgcttgaccattctttcgctactagcaaatatcatgtaacatacacgcactttaatttgatcctgaaacaatttcctgttgaaaaaatattctttatcattttgtagtaatattcgcatcaataattgttttaattatatgaagcaagattgttcatgagaacccttaccatgttcaatcatgttattggtactattcaatacaagctcgaaagcgtgtatcaaatattactaggtatgatttactttatttatttaaaccctaacgattgcttatgcaaaaaaccacccttggtttagatatcggaaccaacagtattggttgggcactggttgatttcgagtatggaaataatgatagcaaaatcctcggcatgggatgccgcattattcccatggacggcgaaatgcttggaaattatgaagccggtgtttccgtttcacaaacggctagtcgcagacaagcccgaggcagcagacgtttgaaggaccggtataagcttcgaagaaagagacttattactaccttaaagatcctagggtggcttccagacaatttcgaggcagggcatattttaccggttttacccgaacaactagctgaaatgcactcactattcggcaccagccaaatcacccaggactggttggtgtattatctgcgtaaaaaagccttaatagagaaggtagagttatccgaactggccaggattcttctacacatgaaccaacgccggggatttaaaagcaaccggaaagccaacaacgaaagtagtattactaccgataatgatgtggacgaacagttaccaacccgggaaaataaaatagaggtggtttctgtaattgccgttaaagataccggtgatacaactcgtgggaaaaaggtgtttgaaattacgttgggaaatggcattaagggaactattgccagagaaaccttacccgactgggaaggaaaggaaatggaactggagatcagaactattcgaagtaaaaaagatcccgcgccacgatatgagtttgccatgccgaacaaaagcgactggcaaaaactgaaagaagcgctgcaaaaggacattgctacttcgggattacacataggcgaatatctgttcaatgaaatattaaagaaccgtaattacaggatcagggaaagggtcatcgaccgatctctttttattgcagaactgactgcaatctgggaaacacaaaaacaattccatgctgaactttcaagtcctgaaaaaaataatgaaatcgccgatacgctttacctgcacaatcaggaaaagaaaaaagagatcaaagtcaatgacctattgcatgttttgcttcatgatatcatttactatcaacgcccgctgaaatcaaaaacaagcaccattggagactgccgttttgaaaagaagtcaatttggttgaaagatgcaaagggcaacgccgtacaaccagctttaaaagttatccccgccagcgctcccttattccaggaattcagaatttggaaaacccttcacgctttaaaagtaattataaaagaaaagaaagttaatggggaattcaaaaccgatgtagatgagactttgttacatattacccctgccataaaggaatcattattcgatttctttgataaccgggaggaaatagagataaaagacatcttaaagtttctgaaactttcccccgaaacgcattacctcaattatccagaaaacacacggttcaaaggcaatgtaacaaaatgccagtttcgaaaagtattcaaccggctgaaatttgaagcgggtaacaccctgttccaggatccggaaaaaatgaatagcctatggcaccttgtctattctatagacgacagtacagacattgaaactgctttaaaaggtaaaaaatggcaattccctgcaaaccttgctaaggctatttcaaatttgcctgcctatgcatcgcaatacggtgcatacagtaccaaagcacttaacaaactgttgccgctcatgcggtgtggaagccgctggtcggcatcggccattcattcagacaccttgataagaattgaaaaaataataaccggcgaatatgatgaaaatatagatgaaagaaccagggacctggtaacacatcttaccgcgactgatcaatttcaggggctaccagaacacctggccacctatgttgtatatggtaaacacagcgagaaaacaggtgaaccggtggatagccccgacatggttaaaggctgggaagaaaaaggaccggccaaccccatcgttaaacaaattgtaaacgaaacgatacaggtggtaaaagagatttggcgacagtatggccggccggatgaaatacgcattgagatggcaagagatctaaagaagacaaacgacgaaagaaaagagctctcagctataaattacaaaaaccaggaagataaacgacgaattaaagcgatcctaagagaacttaagatcggtgatccggaatcgctgtcagacgtagacagaatgcgcatactggaagagaatggcaactattcagctcaggccaatattctaaagttctttaaaaaagcaactgagcctacactcgctgaagctgaaaaatatcagttatgggtagaacagaactgtatttcgccttatactggaaagccgattcaactttcacgattatttattacaagggattatgatatagatcacataatcccccgggcaaggtattatgatgactccatgggcaacaaagtaatagttgaaacctgggccaatagagaaaaagatgaccgtacagcaatggaatatatccgtcgaggaagttcaataagtgacttgcttaaccctgaggcttattcagcgcatgtcaatcgcatattccgtcacaaaaaacgccgtcaccttttaagcgatgaaatacctaaagggttcattgaacggcaattaaacgacacccgttatatcactaaaaaagtggctgagttattatcacaggtggttgaaagtaaaaaagtaaaaactaccaccggaaagatcaccgatgaactaaagcataagtggggcatgggcgatatgatgaaacgactgttgatcgaacgttttgaaagactagaaaagctcaccggagaaaagaaagtggaatatttaaccgacgaagatggcagacgtcgattgcacctgcaaggctttgaaaaaagaatagatcaccgccaccatgccatagatgcattgatagttgcctgtactcttgatgaacacataacctatattaacacactggaggcccaaacaaaagatgaaactgaaaaatacaagtacaagaagctgttaaaaagtaataagacaagagatttcaaagaaccctggcattactttattcccgcagcagaaaaagcactgcagcagattatcgtttctttcaaaaaccgccaccgcatattgaataaaggcgtgaataaacaccttaaatacgtagaaaaagatggacaatgggttaaagacttagtaacacaaacaaaaggagatttatggtctgtacggcaaccgcttcataaagaaacagtatcgggcaaattgcaattccggagatataaaacgggtaatatcagcgatgccatcaaacaaccagaaaagattgcagacaaaaaagttaaagcgcatttacgttacctgatacagcaattgggaccggatgaaaagaagatcaaaaaacacctaaaggacaacccagcctttgacagcaatggcaatgcaattgagaaggtaacaatgtggtatatgaaagaatattatggcaatagggttttcctggatgattcatttactgctgagaaaataaaagagaagattgcggaatacaatacagaaagtgggaaagggttaaaaggtgttttattaacccatctttctaaatggaataatgatcctaaagccgcattcacaggagaaggcatggaagatcttgctaaaacagcaggcagaccaatcacaaaagtcaccacttatgaagattcaaaaggcaagtttgagatcagaaaagggcagtttgttgaagcagccaaaggcaccaacctgttctttgtgatatatgagaatatgcaaacaggtgatagagaatatgaaacactacgactggatgaagtgatcgtagcgaaagccaatggctggccggtggtaaaagctaaagaagggtacaggcactttacactttcccctaacgacctggtatatgtaccggaagaaggagaaaatataaaaatgatcgattggcaaatggagaaagaaaaaacatcaagacgggtttataaagtagtaagtttcactgggtcgcaatgcttctttgttccgcataatttttccaaaacaataatagaaaaggtagaattgggatcactgaacaaacaagaaaaatcgctggatgaattaatgataaaaaaatgctgcatcaaattaagagtagataagctgggaaatgtttcgatcatctgatataagataagaataaaaaaagggtcatttaaaatgaccctttacattcttaacctgcaagcttaattaacctaaagttaaacagcggcatcgcagggatacatcacgaagttacataatcacagtcataaatcaaactaatatcgacaattatataaatgcctaacagccaatttcatacagccatatctgaaccaaggttctcaagatattattccgcgtgtggaaacaatacacagaaggcttcccgactctacagagccaatcttttattatcgcaaaaaatgtacgcagtgactggactctttgaggtaattctaagaaattcaatagacaggcatttaataactaaaaaagggaataactggttggcagatgctgttcagccaggaggatatcttgatatagctcctggttgtgaagatgcttatcataatatacaagagggcattcatagactatccttaaattttacccacgacagattaatttccaaactaacatttggattctggacctatcattttgctgcaaaagaatttgcagcggcaggcagtacattgctggagatattccccaatcgaccatttggtacaagacaaaaaactatctttcaaaacctgataaaggttaatgatttaagaaacagaattgctcatcatgaaccaatatgctttgataaaaccagtggtacaatctccaccaactatgcagaaaaacgatacaacataattgtagaactattatactggcttggctgtaacccccaaaagatcctttatggaattgatggggtcccaaaagccatcgctaatatattagaaatacgaccatcaaacttgtctaaaatcaataattagtgtcaataataatatgttgaaataatctctatattcaactcgtttacaattcaaccaattttcaatatccatgataaagcgaacgctttatttcgggaatccggcttatttaaaaactgtcaatgagcaacttgttatagaaatgcatgatggtggcgaaaccaaaaccgccccaattgaagatattggtttattgattttggaccaccagcaaataaccatcacgcaagccctcattgccaaattactcgcgaataacacagcattgatcacctgcgatcatacccaccatcctaccggtatgctgctgaatcttgatggcaatagtctgcagagcatgaaataccaggcacaggtagaagcttcgttaccgttgaaaaagcaactctggcaacaaacagtatcaatcaaaatacagaatcaggcttctttgcttgccatacaaagggaagaaaacaaatacctgttaaacctggtttcggctgtcaaaagtggggatccggataattgtgtaaaatccggcgatgttgaccaccaatccggtgatgctgaccaccccttagaagtaagccgattggggcagtttctgtaataatttaaagagctggtttacaaaaataggattctatttctttcttaaggattctccttttaattctaaccgatgggcggcatgtaccattctatccagtatggcgtcagccacggtgctatcacctattacttcataccatttagctactggtaattgtgaactgatgatggtagcctttcggccatgcctgtcttcaataatctccaataagatcattctggcggtgttgtctagtggtt

SEQ ID NO: 3463 - DNA, 22988 bp, synthetic construct
  misc_feature 1..22988: note = Synthetic
  source 1..22988: mol_type = other DNA
gcttaaacgagaaatccctctcgaggcatacgttggggtaagcagcgccattcctcttcccaacgagaacgtcgatgcagtggtagcatccgaattgctggagcatttaaaagacaatgagctgcaaagcaccctttgcgagatacggagggttttaaagccgcaaggttcttttttagggaccgtgccgcacaatgagaaattggaagcaaacatggtgttgtgcccgcattgcggcgcccgttttcatcgctgggggcatgaacgtgcttttaccatccagtcaattggggaattactgggaggtttttttgagatacagcaaatttcccggcgtaagtttgtcccctggcggagaagatcctcgctctataagttatccggtctcttaaaggtggcccttgttttcttggggctaccggttgagaacacaaacattttttttctggcccggaaacgcaccgcctgaggaaatttttcctctgccgctccgtcgtgaggaaatacccatataagaccgagggttaacactcgcttgtcttttgccgttggcttataggccgccgtcagcgttttttatggggtaaaagatctgtgatcgtcccttccgccatctcggctgcaaaatacaaggtttccgacaacgtggggtgcgcatggatcgtcagcccaacatcctcagtgttagcccccatctcgattgccagcacggcttcggccaatagttctcccgcagcgggaccaacaatacccacaccgatgatgcgacgggtgtccctatccagaatgagtttagtcaaaccgtcgctacgacccatggagagcgcccgcccgctcgccgcccatgggaagcttgctttctcgatctcaataccacgggccttagcttcgctttccgttatgccagcccaagccacttcaggatccgtgtaggcgaccgacggaatagcaagggcctggaattcgacctcgcagccggcgataacttcggctgccgttttcccctgatggaccgccttgtgcgctagcattggctggccgacaatatcgccgacggcaaaaatgtgcggcacgttggtgcgcatttgcttatccaccgggatgaaaccttgttcgtcgacgaacacccccgccgcttcgcaaccaatactcttgccattggggcggcggccgatggcaaccagcacacgatcatagacctgcgcttcaattgcctgctcaccttcgaatgaaacatgaacgccgtccggccttggttctaactttgcaaccctggtgttgaccataatatcagcaaagcgcttttccaggcgcttttgaagcggccgtactagatcacgatcacatcctggaatcaggccttcgcttaattcaacaatgctgacctgactgccgaaggcatcgtaaaatgtccccatttcgaggccgatgattcccccgccgataacaagcaaacgccgggggatttcttccaactccagagcagcactggagtccatgatacgcgggtctcgctgatgctcgggaggcagaccgggcatttgaacagccttagagccggcggcaataatggcatgatcgaaggaaacaacggttggtttgccatgcgcttgcgtaacagcaagttggtggggactcataaatcggccctctcctcgcacaactgtgacctgacgctgtttagcaagcacctcaaggccggcggtcagttgccccactacccggcgtgttttccaggcacgcagtctttcaaggtcaagctccggcttcccaaaggagagcccgtgctcagccatatcttccacgtcgatgataactttagcagcgtgcagcaatgccttgctcggaatgcaccccacgttgagacaaacaccccccaaggtcggataacgctcgactagcacaaccttctttcccaaatcggcggcgcggaacgcagcggtatagccacccggccccgcccccagcaccagcacctgagcatggatatcagccgcatcggctcttgaaggcgccagtgatatggcggtggtttctccccccccgagcgaggaaaggttgctttgcaaatcacatggaatctccctttttccctcctcctctttgccctcttggccggtaacttccaacaacaaaatttttgagcctttagaaaccttatcacctactttgacggttacagctttgacaatcccgctatagggcgagggaatatccagtgaagccttatcggactcaagtgtaattagcggctcctccacccggatgacatcacccggcttaacatggacctcaattacgctaacgtcctcaaattttccgatatctggaacagcaacttcgatatttttcatgtaaaccgagcctcttatgccggcaaaaacaggggaagtcctacgcaaaagccgttattagagttcctctattcgccccatgtaaacatcacaaaagcaagcggcgcacgtcagacagcatcacacgcaaatgaccggtgaagcgagcgccatcagcgccatctataacacgatgatcataggaaagcgccagtggcagcatcaagcgcggctcgaaagtcttgctcttcgggtcccagaccggccgataacttgcccgggaaacaccaagaatagcgacctccgggcagttgatgatgggagtaaacgcagtgccgccaatcccacctagcgatgaaatggtaaaacaacccccttgcatttcctcaagcttaagttttctttcacgcgcttgcgccgacagctctcctaactcacgcgctatgtccagcacgtcctttttgttgacattgcggataaccggcacaaccaatccgtccggcgtatcgcaagcaaaaccaatatggaagtactttttcaggatcagttcgttgccgtcagcagacaaggaggcattgaaattggggtaggcgcgtaaagcatttaccaccgctttcattagaaaagcaagcaatgtgagcttaacgccgcgctttgcagcttcctcctgcatggatttacgaaactcctccaagtcagtgatatcggcctcatcgaactgcgtgacgtgcggcacagagacccaattgcgatgcagattaagggcggagattttcttaatgcgggaaagcgcttgcggttctgtttcaccgaactcgcgaaaatcgatgttgggcatagccggcacagataagaatgtgcttccactcaccacttcagtccggcgcttactcatctcagctttcacccaggcctggacgtcttccttggtaatccgtcctcggggcccgcttcccttgatgcgcctaatatcggcgcccagctcacgggctaccttgcgtaccgaggggctggcataaggtaccttgccgcgcataaattctatgtgttcggccataggattgggtgtgccttgaggcataactggtttaggtgcctgctctacaggcttggagggaggccgaagttcggcagccgccaccgccgtgacgacgggcgaggtcccggctggagccgattggcgtatcgcagccccagcagcttcttcaatcaaagcaatcagcgtgccttgagaaaccttgtcacccgccttaacttttacttcctttacagtacctgccaagggagaagggatgtccatggacgctttgtcggattccaacgtgatgagtgcatcatcctgatgaacagtgtcacccggcttgatatgaagttcgatgacatcaaccgaatcaaaatggccgatgtctggtactttgacctcgatgatttgactcataaaaaaactcttagaccactattcacaccctccagccaagcccagcatgacctttatcacccagcgccttatacttgatgatgagtgctgtcagcaacatacagagtttggtttgttgacgtcgatattgtacctctcgatggcttccttggccttggcggtagccagcttaccttcatcggccaatgccttgagggcagccaacacaacatagtgacgatccacctcgaagtggcggcgtagcgcctctcgagaatccgaacgtccgaagccgtcggttcccagcacgacatagcgcctcggcacaaaggcgcggatttgatcagcatatgtcttaatatagtcagtggaggcaattaccggcccttcactttgctttaaacactgctcaacataactttcccttggcggctggtcgggatgtaacatattccagcgctggacatccaacccttcgcgacgcagctcattgaagctggtcacactccatacatcggcagaaacctcccaatccttctgcaaaaggtcggctgcagcaacaacttcgcgcaaaatggtaccactgcccatcaattgcactttaggccccggggaggttgattggctgagccggtacatgcccttaataattcccttctcgacgccgggcggcattgccgggtggatgtagttttcgttcatcaatgtcacataataaaatacatcttcctggctttgcatcatacggcgcaaaccatcatgaatgatgaccgccaattcgtaagcaaaagtggggtcatagcaaaggcagttagggattaccgagaaaagaacatgactatgcccatcctggtgttgcaaaccttcgccgtttaaggtggtacgccccgcggttgcaccaagcaagaaaccacgcgcacgattatctccggcagcccaagctaaatcgccgatacgttgaaaaccaaacatggagtaaaagatatagaacggaatcatctgtatgccgtttgcactataggaggtggcagctgccagccaagaggaaaaggccccagcttcgttgacaccctcttccagaatctggccgtttttcgattccttgtaaaacatcacctggtcagcatccaccggctcgtacaactggccgacggaggaataaatacccagctggcggaacataccctccatgccaaaagtacgggcctcatccggcacgattggtactacgtatttgccgatgcttttgtctttaaccaacctggataaaatgcgcacaaaggccatggtagtagaaaactcacgcccgccgctgtcggtgagcatattgtcaaaggccgataactcgggaacgaccagggtattgcctttgcggcgacgggaaggaatataaccgcctaacgccgcacgccgctcacgaaggtattgcatctccgcgctcccttcgtcagggcgataaaaaggaagcttttccaaatcggcatcggcgattgggatatcaaatcggtcacggaaagctctgagggagtcgatgtccagcgccttgctctggtgcgccggattctgcgcctcccccgccgctcccatcccgtagcccttgacagtctttgccaggattatggtcggctgaccagtgtgagtcacggccgcatgataggctgcataaactttgtgcgggtcatgaccgccacgattgaggcgccagatatcctgatctgacatcgctgcaaccatttctttaagctccgggtatttgccgaaaaagtgctggcgtgtataagcgccgcccttggctttgaaattttggtactcgccgtccacacattcttccatgcgcttgcggagtagaccgctagtgtccatagcaaggagcggatcccaataggagccccaaatcaccttaatcacattccagccggcgccgcggaagtcagcttctaactcttgtataatcttgccgttgcctcgtactggaccgtcaagacgctgcaggttgcagttgacgacgaaaatcagattatccagtcgctctctggaggccaaggaaatcgcgccccgcgattccggttcgtccatctcgccgtcgccgcaaaacacccaaactttacgctgtgaagtatccgcaatgccgcgattatggaggtatttaagaaagcgggcggcataaatgccctgcaacgggccaaggcccatggacacggtagggaactgccaaaattccggcatcagccaagggtgcgggtaagaggacagcccttggccgcctgtttccatgcgaaaattctccagctgttcctggctgatacggccttcaagaaaagcgcgcgcataaatgccgggcgcggaatgaccctgaaaaaacaccaagtcaccaccggagggatgatcagctgaacggaaaaaatggttaaagcccacatcatagagcgtggctgctgattgaaagctggcaatgtgaccgccgataccgggggatttgttattggcacgcattacggtgacgacggcattccagcgaatcaaagcccggatgcgccgttcgattttaaggtcacccgggtgtttggcctgttgctgcaaggggatagtattcaaataggctgtagtggcattgaacggtaggtaaacaccggagcgccgcactttgtctatcaaactttccagcagaaaatgcgcccgttccgctccctcctcttcaagaaccgcctgaatggcctccagccattcttgggtttcctgggggtcgctatcgagagcgggggttgccatgtgaagactttgcctagcatgctttgtcataaatcctgctgcttcatgatgagtaaagccgaccgtacaaaatgcaacagtctgcccatattcatctttggagatcaaggtaacgcagacttaattacagccacaaactatttaagtacccaatataagacaagaaagccataactaccaagtatccaaccctggggcggcattaataagtaaacactgttttttactaaaagcccttagctacatgctcagaatcggttaaacgcccactctctattcacccctctattcacctctatccccctctattcaatctcagagaccgtgcgggtcataggtaagggaaacgcctctgcgattatcctgttggagcagatcctaacaatcgctctgggtgccacgacgttgcaaatacaacaatatttttgcgcttcccgcgccatagaacaacaaatagggaaaaatcggcagcgccatgcgcgggataggaaataaaggcgagtgcactgccacaaagtaaagcaccatactcagggcaaaaaacctaggcacctggttgccgcttaaataaaccatgcccgctaagcccaaaatcaccaccatagcggtaagcgtgagctcaaagagggcggcggtactggctttccaacctgcattcttatgcaacgaaaaccagctcttatagggataaaagtgataagccttagagccgaaaagaaaacgaaacggcttcttaagattaagtaagatcgtctcatagggccgggccttaaaattatcccgggccgccgccatgaggcgccggtccccctcactgtcaaggtgcgtataaggggcggtaatcttaaatgtgtcaaagtccctgcccacataaaccggctcatcgccgtttgtgcgaagatcgttccccagataaagcacggctcccaagccgttagccaaaaccagacgttcgaaaatcacatagtttttaaccaaatacggcaccacagggagagagaaaccaattagaaggcacaggccgcccgccagaccgcgcgcggccgttatcactttcctaagtcttttagagcaaagccaaagaactcccaagaacagcaaagcaaaaagcggataaaactgaagggagggtcgtatcaaagcagcgagtcccaataacaatccgcacaagaaaaaacgccccttaggcgccgccaccatcagccataaactaaaaaccagcaaaaaacaaaaaggcggctcagacagtatagtgggaccccaagtgaaaaagggtaaatgcgcgttataaagcagaagcaccaggaaagcgcctaacaacccccagctacgccgtgctgcatcccaaagcaaaaaaccagccaccccgaggagaagcacgtttaaaactttaataagcggcacatcgattcgccaaagcgctatccacagcacgctaagcggcgcgttccagagggagcgcggggtaagaaaataactccagccttgcttaaggaatagctctgcacctgcggcatagtaattcttttcatcagggaatattaaggctgaaaaatcccctctgctgacgtgatagtgataagcgagcttggccgatacccccaaagcggaaatcaaaagagctataagacaagcggaggattttttgaggctgttatccaaatgggccatacactttcagccggtcgcatgctttgcaataggcagtactattagccgcacgcccacattatcaaggactatcttcgtgatgcagctataagctgaaaaatagccgaagctgaatttaaacactatgttatcccctaacattgcgctaatataatcctaacagagccctaacataatgcattaagtagctgtaagaactgaacgattcgttagtagtaaaatgcttacacattcttcagagagacctgccacgtctttgagagctcggtccttcgctcctagcgattcttcatacactgccaatcctgacgatagcggcatctacaggctggaagacttgacgctgcctcagcttaaaggagacagaacacgacaagtttttctcccccctgagcgttcaaattctctacccgccaaggcggtaaccgctaaaccacaaagcacatcactttggtcccgcctttttggttttagttggcgacgttgcctggtggggactttggcaggtatggggctgataccagcatacctcggcatccaccgagctacagctcaagcctccttaagagcggaagccaaggaacgtatctcgcgggcccaggcttctgacccctggccgacaaacgtttacgtttatgcctcctcacttcaagggcatgacagctatggcggattgtctggaggatacactaaacatctgctccaaagacttcgcgagtccggctcgctaagtgctgcgcacaaagcacttgaaagcgggcttaaaggcatctttcgttatgaggcgcaactacctgtttcttccgccggctccacctcgcccggctgggaggcagctgaaagaaaagatagattcattatagccataagcggagacagagcggagaagccatacggctggttagatcccagcggggaagatttctggcaggaagcaaagttttttgcccacgcattaaagacgctttttgcagttcccgacgagcacgtgcaacttttaaaaaaaccggatctagcggttatcgaggaggcgttaagccgggtaggtaatcaaataaaaaccaattcacaagcggctgaggtcttaatttatatcgcctcacatggctcccaattaactttctcctcgccgccagcaggttttacctgcgtaccacaagggttcgaagaaggctcgttttcatgcagtacaaaggtagagatctcggagtcaaacattaagcttctaattagaaaacaccttaaccacgctgcaagcgtttcaatagttctcgatatttgtcaggcaggcgcatggatagaatgagcttgatcgacttttattaagtggtgacttgcccgctatcgccgttcgcttaacgcggtcttttctatcttccacccgctacttaggctaatgactttttgcgctcaggatcaaagcagcaaagcacaggatttttggccccacataacaaggatttccaccagattctgcgccgcctagcgagaaggctatcaaaaatttgggagaactccgcttcgccgtagattggatttcagaggcggtgtccgttcatgacattgacaccaatcctaaggcctagcggccttcggaaactcttagtttttccttgaaatccgccgcaaaaagagtaggatgaaaaacagcccccaagcttttagctcggaggcttaataggtttacccaaaaaagggctatcctgcgaggcgaacctcttattgtcgcaagcaggcaggcatcgatcagctaatttctcaagttgactgtatacacctttagtcactattaagcaatgggcaatatcacatggaaaagaaccaagccagaattctggggcttgaccttggccccaactctatcggctgggctttgttgaacgtcgatccagctggagaatgccggtcgcttgaagccgccggggtccggatttttcaagaagccgttgatgccaaaacacgcacgcccaaaaacctggcgcggcgaacggcgcgcaacgccagacgctgtttggctcgctatcgtatgcgccgtgaccgactgcttaagcttcttacggccgcagggctcttaccttcacatactgaagaacgccagcggatattaacagacctgaaaaattatgatccatacgccttacgggctcatggtttggatagggagttgacgctctacgagttcggtcgagcactgtttcatctcaatcagaggcgcggcttcctaagtaaccgcaagcaaaaaagcgataacgaggagggaaagatcaaaacagctatttccgcgttgcgcaaggaaattgcggcaagcaactgccgaactttgggggagtacctttaccatcagacccgccgccgtaatcgcgctccctattttgatcgctataccgagcgatctatgtactgtgaggagttttcccaattatgggaaaagcagcgtcagttcaagccggagattttatcccaggtgctgcgagccaagatttatcgcaccattttcttccagagaccgttaagaatccaaaaatacctcgtgggacgttgttcctttgaaccgctcaggaggagaatcgccaaggggcggctcgaatttcaaagatataggtaccttcaggacgtcaaccatctccaggtgcgtgatcctatcgagcgtacctggcggcccttaagtgtatccgaacgtgcgattctgatcagcaacctagaggaaggcgatctgacgtttgacaaggttcgccacctgttgggacttcaccaaggcgaggaattaaatttggaagttgccaagagcaccggcaagctcaagggaaataggacagcggccacgctgaaaaaagcgcttggtaacacttggactgccatgagtattgaagatcaactgtctttagtaaccgacctcctgaccattcataatgaagaacatctgcataatagactttcaaacaagtggaaattttccgatcaacaaactcaagccgttttagctgtcgaactggaaccgggatatggaatgctgtcattaaaagctatccggcgtatacttccgcatttggaaaacgggtgcatatacagcgaagccgtttctaaagccggctacaaccacagccggcccaactgtccagtgctttccgctattctgccgctgcctccatctttgaggaacccagtagttcaaaaggctttatatgaagttaggaaagtagttaatgcaatcattcgaaaatacggtcggcccggcatcatacgagttgaaatggcccgggatttgaagatgggccgagccgcactagccgaatacactaaagagcaaaagaaacgagcgaaggaaaacgagagaataagacaattgttaaccactgactttgggcggccaacccccaccaacgcagacgtcgaaaagtatcgtctctggaaggaggcggagtgtttatgcccatatacgggtcaagtcatttctaactctatgttattttcaccagaggtggaggtcgaacatatcgttccctttagtcgatcacttgatgattcgttcatgaacaagactatagcaatggcttccgtaaacaggataaagggcaacaagactccttatgagatgttcgaaggccgtcgcgatgaatacctcaatgtcttaaaacgattgagttccatgccgcgcgctaagcgggcccgctttgaacaaaaggaagctgagattgatgattttataagccggcagttgaacgatacgcgctacatttgccgcgaggtcaaaaagtacttagagcagctgggaagcgagattcaagtgaccaagggtgcacttacggcggctctccgctctgcatggggcttgaaccgaatcctctctccggacggagccaattctaagaaccgggtggatcaccgccatcatgcgatcgatgcgctcgttgttgcgttgacatctccatctctgctccaaagcgtctcgcgccttacagctgaccacataaacagagctggtagaatcagactcacccttccccctccgtggaatagctttttcgacgatgcccaaatcatgattagccgcatcattgtctcccatgcggccagtcacaagttaagcggtgctttacacgaggagacggcgtatggctttatacccggcgaaggcgtttacgtcactcgcaaacctctggatggatcaatcagcgaggctcagattgaagccatccgtgaccctgtagttaaagccctcgtgcaaaaaaggtttgaagaatgcgggaaggattctaaaaaagcgtttggcgatccaatgcggccactaatacatggcgatggcaggaccgttatcaggcgcgttcgaatccaggagcgttttagcgcggaaggtgttctatctataaaggattcaagcggtgcgccatataaatattatccattaggtaataatcaccatattgagattttccgctatccagccagaggagagtacaaagcgcgggttgttacaactcttgaagccgcgcggcgcgcgcggcaatctaagacaagtatagtcaaccgcgagttagacgacggggcggaatttgtgatgtcgctctgtcctaatgacatagtggaatacaacgattcaaggttgggaaggaatcttttccgagtacaaaaactatccttaggccagcgttttcagattgcacttcgcttgatccacgtgtcaggcacggaaaagggctgggaaaatgggcaggttttgatacagagcaaaaagaatctcgcgggcttgaaaaaagtggccgtcggcgtactcggagaagttatgccaggcgatgattaaacgggttgttgagatttcaaatcccgcgagactgtgcgtgaagcaccatcaacttgtcatagagaccgacgcgggggctaaggatacagttcccatagaagatctgggcgttttgcttctaagcaatcccatcatttctatcacccaagctgtgcactttgaatgcgcggctaacaacaccgtgatcgtttcctgcgacgataagtatctgccttccgcaatactcttgccactgactggccacgtcacccaagccaaaataaccagagctcaagccaccgcctcccaaccctgccgaaagagattatggcaactaatagtccggcacaaaataaaagaacaagcactcgcattagagacggtgggggccggcggcaatgaattaaggcatttgattaataaagttaaaagcggtgatcctgccaatgttgagtctcatgctgcccgcttatactggcaaaaactattcggggagggtttcagacgcttgcctgacgcccccggaattaatgggcttttaaactatgggtacgctgtcattagggcagctactgcccgagcagtagttggctgcgggctttgtccagtttttggtcttaagcactgcaatcagtttaattattttagcttagttgacgatctggttgaaccattcaggccctgggttgatacagcggtctacgggctaatgtgcgaatatgaaacagaccagccgataactataggccgaagagaaaaggaagtccttttgggactgctaattatggactgtcgttttcgcaacaaaacctttccttttatggtagcactgcaccactacgccgcaaatgtcagagatattctttgtggtgaacagaccaaaatggagtttatttacaagtgagcttcggaggatatcgcagcatgtggctatttgccatgtttgacttgcccactgacactccagcggcacgcaaatgttaccgtgccttccgggactgtctcttagaggacggtttcatcatgctccaatactccgtctatgcccgtttttgccccagcgaagaaaacacctccgtacatgaaaaacgcatacgagcttccctcccacctgacggtgaggtaagaatagtgaagcttactgacaagcagtttgaacgaatggaagtcttttatggaaaaacacggaaagcgaccgaaaaagcgccgagccaacttactttcttttgagtcaaaccagcgctttttcggtcgctttccgctacttaccaggcatgtattttagctgatcgatgcctgcccgcaagccacaacaaggtcgaggtggatcatgcgtcgatggattttagctgatcgatgcctgcccgcaagccacaaccctcgtaaaacaagccatttaaggacctcgattttagctgatcgatgcctgcccgcaagccacaactgatttcatgtcctacgtgtcacactcgacattttagctgatcgatgcctgcccgcaagccacaacaggcgtacgcccactacgcaatgctcagagattttagctgatcgatgcctgcccgcaagccacaacctagacgcgcgacggaggggagttgctccgattttagctgatcgatgcctgcccgcaagccacaaccgatacggtggcgtcagcgacccgtcctacattttagctgatcgatgcctgcccgcaagccacaaccgaccactatatgctgacgtctgaatccctattttagctgatcgatgcctgcccgcaagccacaacagcagtcgccttattaggatatgtattataattttagctgatcgatgcctgcccgcaagccacaactgtacgcgtgctgcaagatcaaattaatttattttagctgatcgatgcctgcccgcaagccacaacctagcccatgcggccagacgcttaagttggattttagctgatcgatgcctgcccgcaagccacaacctgcacgatcgctacgtcatccggcacaaattttagctgatcgatgcctgcccgcaagccacaacgcctctgagatgacggccctaggctgataggactagaaggcacaacacctttatattagcagcagaacgcttgcccgacgatgggtattaagttcttaaggcccatttccgatagtgaagatgttagaagtcagagatacgccgccttgaagcaagatgcaaacataaggcggctctcaaccctggtcagcacccaattgttttaacgcagcgcctggccaaggagggttaaacttgaaggcttaaagccttcaaacgggaccgctaggttaacggcccctacgcaagcagacgcaaggggattaaaatcccccatgcgccgcaagaaaaaacaagcaaggctcaatcgccaaacatttacatccagcgcaggaggacatatgaaacggattaaacttagcactaagctactgggcggctttgcagcagtgtcgtttatcaccttgctgctaggttttttaggcttttattcagtcacgactcttaatgggaacctcagggagattaccgaggttagattgccctcggttacgagcctcctcgacatagcaaaacatcttgaatcactgaggacggcacagcgcactttgatcataccgggcctgcaacttgctgatcgagagcggcagttcaccaacattcaaaaagcccgcgagggttataagcacgcttgggaaatctatgaaccgctgccaaagaccgacgaagaagcaaagatatggcaggaatttaagccggccgttgaggcatggaaagcggaaaacatgaaattcgaggagcaaatgaataaactcaccaaattggatatactcgatccgactgattttgatcgacaagtcacgggcttcagcagagaccattataagctagaaaccgaactatatagccatgcagcctacgggcgcgagcttcatggcggagacgaccataccgcctgcgccttcggtaaatggcttgccagctttaccaccaacaacgaagagataaaaagcatactacaagctataagaccctatcatgaagcgtttcataattcagttaaaaaggttaaggagcttgtaaagaagggggatagcaccgctgcagtaaaggtcgttgaagaagaaaccgcctcatcggcgcaaaagactttcgaatactttaataagcttgctcaaatctcaggggcggcgcgcgagacatggcaagaagcctaccagcaattaatggggccggcgcgcttaaaagaaaacgccgtacttgatctacttagtaagcttgtacaaataaatcaggatgtcgctgcagctgaagcctcagaaggcaaaaagagctcctcccgcgccaagactcttactgttataggcatactaatagcggtgggcttggctcttaccctaggcgtactgttaagcaaaaatatatcgcgttctttgatttacactgcagatgccattgccaccggcgcagagcaagtaagttcagctgccaatcaagtagcttccgccgcacaacagctttcgcagagctcaaccgaacaagcggcggctctgcaagagacagctgcttcgctagaagagatctcttccatgtccaagcaaaacgccgaaaactcggaacaagcatccaccatcaccaagtcagtggataaacttgcagaaaacggcgctgagctcatggcacgcatggatgaggctgtaaacaacatcaagcgggcggctgacgaaaccggccagattgtaaagacgattgatgaaatcgccttccagaccaacttactggccctaaacgccgcagtggaagcggcgcgtgccggcgatgccggcaagggattcgccgtggtggcggaagaagttcgtaacttggcacagcgcagcgctgtcgcggctagggaaactgcagaaaagatccagcgtgcgcgcgacttggcggacggaggtgtaagtgtgaccgaagaggtaagacgctcactggcggagatcaaagacaacgcggtaaaggcggcggccttagtggctgaaatcgcagcagccagcaaggaacaatccagcggccttagtgaattgaacagcgccatgtcgcagattgaccaaagcacccaacaaaactccgccgtaagcgaggaatcagctgcggccagcgaggagctactcgggcaggccaagtccatgcaggaggcaatcgctgagcttgaagccctcacctacggtgaggcgcgcaccaggcaggacatgtctcaccacaccgctgcattttcgcctgcccgagaaggcgctggtaaaaaacctgcaccccaaaaaggacgcaagcccgctaagacggagagccctaataaggcggctgccaaagagcctgcaccaacaaaggtgaacggcgcggcacagcatgactcaagccggattatccccctagataacgaggactacgcaagtttctaggatagcggcaagcaggtaaagaaaagcagctccaaccaaacagttttaagcaccggccatgacagcgcgtgacaagcgaatatcatggccggaacatatttatagggaagatcaacctctctcctgcggcccagaatagtattagtatactgcaagcgggcaagcatcctccgcgcccgcccttgcctcaggccacaaacttatagcccaccccatgcacggtcagaatgtgcttaggcgactcaacatcgtcctcaatcttttgtctaagccgagcaatatgattgtccacagtacgcgtggaaggataagaattatagccccaaacttcatccaacagttcatcacgcgtcaccaccgagccgcgcttggccaccaagtaacggagcaatcggtactcacgcgccgataattccaagggcttttgattacgttccgctttataggctttaaaatcaatcaccacctggtcaaagtgaatttgatcaacctggttggtgattcttgagcgcctaaggagcgctttcacccgcgcaatcaattcgcgcatgccgaaaggcttgcctagatagtcgtcggcgcctaaatcaagccctaacacccggtcaacttctgtgctgcgcgcagtaagtaaaatcaagggagtggaaataccagcattacgaatctcacgacaagcctctaggccgtctttcttgggcatcatcacgtcaagaattatgagatcgggattcttgtctttcaccagctggacaccttcttccccatcacaggcacagatggctttaaagccttccgcctcgaggttcaagaccaggctgcggcgcacactttcatcatcctcaattatggctatcagctcaccgctccccttatctgacatggtaaaccccttctgctagtcatataaccagtaaaatgggcatcctggctcagcttttaatacggaataaacgctttctcgatcctaagacctcaacctcactaatataccaaattttagggcattatacatctctttcctgagacatcattctctaacccttatatttcatgaagctcgcttcgctcgctatgaaatatgcgcgtgaatcggccatcctcggccgattcacgcgggttcgacgttttgttggggaccccactcggcccctacaaaacgtcaaacctcaaattccccgccaagctcggaatttgcaagtacatccatgtacttgccagccgcaatattgcattttcatgcaatattgcggctaagtccgtcaggcccttgccttttcccttctttatcgctatcttactgccttcgctttgtgcattttcagcatttgcgtgtcaattttgccgtataatcccggcagggggtaaactttgaagcgaaccccacgcgcgtttgagttgtaactatgaaaaccttagctaaatcaaccgctttaaccggcagctatgccgtcatgcgctgcggcggtaagcaatacactgtctcaggcggacaaaggctggctattgaaaagatacccggccgggtgggagacgaagtcagcgtggaagatatcctgctcataagccaccagaaggaagaaaaccaaggagacccggcctcgcccagaactgttctgattggcaacccgcgcgttgaaggcgcaagcgtcaagttgaagatcctaagacaactaaagagcaaaaaggtccgcgtattcaaaaaaaagagacgaaccggctacaccaagcggcaaggacatagacaacagctgactgaagtgctggtacagggaataataaccccctgacggcttaagaggagatttactatggctcacaaaaaagcaggcgggagctcaagaaacggccgtgacagcagcggaaaacgcctgggggtcaaaaaattcgacggccagttcgtgcgcgccggtaatattatcgttagacagcgtggaacgtccgtacatcctgggcatcatgtttcagtgggaagagattttaccgtgttcgccctcacggatggaatcgtcagattctctaaaggccggcgcgtcacagtgagcgtcgagccggttaccccggcggctgccgagtagccgctcccgactcacgacgatcctgttagtactctatagcctagcctatatgaagttcgtcgatgaagccgtcattaaagtacaagcaggtaacggcggaccgggctgcaagcatttccaccgcgaaaaatttgttcctctaggcggcccggacgggggaaacggcggtaatggaggctcaatcatacttcttgccgatcgcaacaaaaacacactgcttgattttcattttcagcccaagttcaaggcgcaaaacggcaaaaaaggcgagccagcggggcgcgacggaaaaagcggagaggatttaatcatccgcgtcccggttggcacacaggtctttaaggaacccgctgaccgcccgccttctggcacgccactagccgacttatgccgcgacggcgaaacgtgtatcttggctaaaggcgggcggggtggtaaaggcaacgccttctttaagtccgccaccaaccgcactccagagcaacaccaaccgggcgaaaaaggagagagcggcacatttcggctttcgcttaaactagtagccgacgtgggcttaatcggccttccaaacgccggaaaatcgaccttaatatcgcgtatctcagcggcacgccccaagattgccgattatcccttcaccaccttgagccccaacctgggggtggcggtggccccaggcgggcgttcctttgtagtggcggatataccgggcttaatccctggagctcatctgggcaaaggactcggcatccgctttctcaaacacattgagcggacaaaggtgctggcacaccttattgatccaacgcaagtagatgaaaaaggaaagccgctccaggttgagcaggcttttgcacaaatcaacgaagaacttaaatcgttctccagtgagcttttaagccggccgcaaatcgtggtcttaaccaagttggatctgatccccacgggcgaaagcaatgaggaagtgttaagaaattttcgcagacagggctatacagctcttgcaatctcaagcgttacaggccaaggcttgccggaacttctgaatgcattggccgaggccataagcaggacctagcacttttttgcgacgatttaaaaacgcaggtacgccggacgaaacggccgaaattatacatacgccgttgccgccgaaaccaacttttggtaaaatataaatagaggtgtatgtcaggcgacttgcttaccctcttgcccggcgtaaagtgctcgggtgaagtggttcaggatcttaaaggagagcatattaagcgtttctttaatttcttcgctcggcgttgcagtcccctttccccgccagcagcctttcttgacagtcaaagcaacaagtttcattcaaacagctatgtgttttaacaactatttaactttaacggaggaaacataaccatatgagtgaaaaccttgcgctcaggttgcgtcaagatcaagacgccttggagttaagcacaaaaatcgtcaacgcctgcgcagaggccaaaggactaaacattacggttcttggaacttcagaattgtctgatcttttcaactatttcatcattgttagcggacgcagcgaccggcaggtgcaaggtattgccaacaaagtcctccaaactcttgaacagcacggctttaggccgctggccctagagggactggatgcagctcactgggtagtgctcgacttcggagatgtcgtcctgcatattttttacgaaccagtgagaaatcactacgacctagaaggattgtggtccaaagccaagccgctcagaatcgtaaagtcacggcgcggacacgctctggccctgcgggcgagctgacccgcccgcagtccttcttatataagcggctgttctcacttaatgatagactgacactgcaaggcataagcccgataggactaaaaagcgtgcgttaggggctcactttacaagcggatgctacagaatatataaacacagagaaagcaccccatcgttccgcaaggtgaggcggccagccataaaatataatgctcaagcgcttaaatttcctcattgccatcattatcgctgtagcggcggcgctttatgttgtcttgcttaaccgggaaagcgtaaccgtccgcttttctccctcaaattctttgacaagttccggcggtgttatctttctcctaatcttctttggcggcgtaatctttgccgccttggcggcggctgtttggggcataggagcctatttccgcgaaaaaagattacacaaccgtgaaagacaacaccaactgatgctacgctcctttatagaagctcgcaattactgggcggcgggcgaatggcttaaagcccacgaagcatggcggcagatagtccggcgcttcccggaaaacatcttagctcatatcgagctcgcgcgctccttgaaagacagcggcgagcttcaggaagcactcaaagtgctggatgccgcccgcttaaaagatccgcaaaatatagaactgctctttctagccgccgaactcaacaccgctttaggcaatagaaccgccgctattgataatctagccttaattctctcccaccacccagtaaaaaaagccgctttaatggcccgcgatttatgcgaagaattgggccgccttgatgacgcccttgaatatcaagcccggctggtagaactgggcgggctgacgccggaagctcaggaaaccttgacccgccttgagtttaagaaactgctgcgagacctcggccgcgaccaggaagcgctgcttacagagcttcgagctttcgttagaaagaacggctcttttgtgccggctttgcaagaactggcccaattagaaaaacaagccggagcgccggaaaacgccgtaaagcttctgctgcgcgcagccgccttgggcaacgacccaagcatcgagcgtcaggcaatacaaatgtggttagaggaccaaaagccggaacaggctttagcggcggcgcgctcggccattaaggatgtaaaaggcgataaacgcttgctggctgagcttgagctaattggtttatatttggaacttcgcatgctagaagaagcaaaaaccgcgctgaacaacatcccgcagcttgtaaaacgggaaggcctcgaactttcaaaggaggtaagacaaaggctccttgtcttaaagggacactgcctgacgcttcttggcgaatacaacgaactaaacgagatctggaagaagttacaggcgggctccacggaagacttaaacattgcaacgtccctctctccagagcggcctaatgctgcccctccaccctggctttcaacgccataaagcgccaaagcggccctaggccccagcgcgaaaactttgctgcttgaccgcccagcctgaccaagcacggcatacttcgaaactacgatcgacaacttttccctgcaaaaacacgattaggtgttatgttctcccggccaggccggggagcggatttgactgccaagcatgactatact

SEQ ID NO: 3464 - DNA, 10028 bp, synthetic construct
  source 1..10028: mol_type = other DNA
  misc_feature 1..10028: note = Synthetic
gtattttccagcttttttacaaccaacaacatctctcctgtggatacttccctcaccccgtccctctcccagagggagagggggcagtccgcgtttcatttttaagtcctgtttacacaaatacatcataaactggcagtattgttgatgtaaatataacaacagcttatctttattggacagtagtgcgtgcagacgggaatctctttcaactcaaacgaggtgctcgcaagcgtaaaaagagattcccgtctgcacgggaatgatgatggagagaaattttgggaaataaataattcctaatcaatagcttcacaatattaactgcactgtcgtgtagtgtgatatatcaataaaaaagcaggccgcagcctgctttttggtaaaacatttggtgtccataaggacttattaacggctaggcacgatctcccaatcatatattacgtgtaataattatattgcttttgccgttacaacaatacacttgcaagttgcaaactatcaggttttaataactcctgcaagttgttttttgaaaaaatcaggagtgaattatcatgacaaattatgctttaggactggatatgggaactagttcaattggctgggcaactattgcccttgcggatgatggggaaccattaggattattagattggagcgcacggatttttcctagtgggagagaggataaaaccaacgaaccattagccgcagcaaggcgtatggcacacgggataagtcgccggacagatagaattaaaatgcggcggcgcaatcttttgaagcaaatggtgaaatatgggttaatgccagccgatgttacacaacaaaaagctttagaaattattgaaccgcttaaactgcgcaatcaaggggttacccagtctttagatattcatagttttgggcgggctttgtttcatcttcagcagcggcgtggatttcaaagtaatcgtaaagacagtgacgaggagtctaaaggagcaattgccagtgccagcaatgatttgcaaggtgccttaactgcgcagaatattaccttggggcagtttttgtattttcgtcaacaacagggaaaaactactcgtgccaccaagaaattcgcaggtactaaagtggagtatgattattatcccactcgctcgatggtgcagaatgaatttgaaaaattatgggatacgcagaaaaaacatcatccaaatatactaactcaagaagcatacgatgctatttataaagctattttttatcaacgcccactaaaagctcaaccacgcggaaaatgtttgttttttaataatgaagaccgtctgcctgcggcaatgccttcggcacagcgttttcggattttgaaagaaatacaaaatattcgcatcaagggaactgcgcatcctgcaaatggcacgccgcttactccgcagcaaaagcaaaaattatttgatgctctttgtttacaaaaggaaatgaaggaagaaaaaataaaatcattactaaatatcgcctcacaagatagtattaatctttttgcaaaaggcgtgcgggaaaaactccaaggtgatgaaacagcagcggaaatgcgccgtgaagcaggcaaggaaaaagaaggcagcacaaaaaagccatccaaaggacgttatgggaaagactgggataatctttcattagcacagcaagatgctattgtaggattattaacggatacgattgagaaaattactgaaaaaggcacaaaacgcctgttaaatgatgaagaaatagtcagcatattgattgaagagcatggtctttcagccacacaggcagaagatgtgctaaatgccaaactaaataataatttgcttaaatatggtgccaccatggtgagtaaattactgcccttattagaatcgggcatgtcggaatatgaggcaattacctcattaggttataatcatagtatgaagtttacgggtgagttgttagatgaattaccctattacggagcaattgaagatttgcgggcgcatatagtgccaatgcctaatgcttccgatttgatggtaaaacaatatggaagagtaagtaatcctaccgtacatgtggcacttaaccaattgcgcaagctgattaatcagttagttgcacgttatggaactcacccaacttacatcaatttagaaatggtgcgggagcttaaaaaagggcaaaaagaaataaatgaaatcaataaaaatattaacatcaacaccagtgaaaggaaaaaaattacggaagaaatagaagcacatggacaagaggcaactccacattttattgcaaaaatgaaattatggagtgaattggatgcgcaaccacaaaatcgcacctgtgtttatactgggcggaacatttgcattgcggatgtactttcagagcgcacagaaattgagcatattctgcctcgctctcgtaccctcgatgatacggcagcgaataaaacgcttacctttagagaaattaatgccgcaaaaggtaacgccacgccttatgaatttttttctgccacaaaagaactttttggcaaaaccattagctatgatgatgtatgggagcgagctaatagtctgaaagctagtaaaaaatggcgtttttctaaagatgcaatggaggtgtttgaaagcaaagcgaagaaaattattctgggtggttcgctggatggaaacgtaaataccgagctggaaaatgttgcggcgcggcatctggtagatactagttatattgctaaatttgctaagaaatatgtggcttatagctgtaagaaaggtgaaaacggagtgatggcaactccgggaacattaacggggttattgcgtaaagcttgggggttgaatcatctgattgcacaaactaatgaaaaagatcgtagcgatcatcggcatcatgcagtggatgcattggtaattgcgctgacgactcgcagcatggtcaagcgcgtagcggatgcatcaaaacgctcagaagttaaaggggttagcctagtaaaagaaatcttgccaccatgggataattttgccctacctgctttaaaagcacgttgcgacgagattattatctcgcacaagcctgaccatggctcacccgcacaaggatttggcactacagggcaattacataaagatacagcttatgggcttaccaaaattgcgccacaaaaaaaaggctatggggtatttgtaacccgttggacggcggatagttttaaaaaggtcaaagacttagaagatattcgggatataagactaagagaaacgataaaatcctatatttcaaggtctttaggagattgtcccatagaaaatgtttcagataaagaggtggctcgtctggttgcgcaatatatgctggaaaaaggtattaaaggtattcgttgcttagaggaacgacctttagaagtgatgatacctatccaacaccagcaaacgaaagaagcatataaatattttgttggtggaagcaatcattgtgcagaaatttacatgaccagcacaggaaaattagcaggaaaatggcagattgaaattatttctacatttaacgctaatcaaaaaggctttgtgcctaaatggcgaaaagagtttcccgatgctcatctggttatgcggttgcatgggaatgatatggttgcttatgatgatgggaatgggaaaagtgttatttgtagagtacgtaaaattagtgcagatggtagagtttttatcgtgccacatgcaacaacatctcccactagaattgataaggaaactataggaagaagtccttccgtttatcagcagatgaatttacgcaaagtaagcgtccgcattgatggagtggtatttgatccacaaaacccaaccagcaaggaggtttaaaccatgttggggcgggtggtagaaattgcacaagaagggcggcatctctcggtttgtcgtgggtttatgttggtttcggataaggaagagggagaaattgcacgaatcgctttagacgatattgctattattttagctcatgcttatcaaatgacttacagcaacacattattgcaagaatgttgttctcggggcattgcctttgtatttacggggaaaaatcatcatcctgctggttttttgtggcctgcggagcagcatcatgaacaatcaggaattatgggcgatcaattatctgcctccgcccctttacgcaagcaactttggaaaatgataatacaggcaaaaatcaggctacaggcagaacagctcgctgtactccgtcagcctgaatccgcattggtagaaatggcacgccgagttcgctcgggcgatcccgataatctggaagcacaggcggcaaggcgctattggccattgatgatgggggagggcttcaccagaaatcgcagcactcccgatgcacttaatgctatgttgaattatggttacgcaattttacgagccactactgcacgtgctattatggcagcgggattgcatcctgcttttggcattcaccattgtagtcgccaaaataccatgcccttagcggatgatattatggaaccctttagaccagcagttgaccgaatagtacggcaattagctagcgaaaatgttatagaagaattaggaaaaccccaaaaagaaattttggcaggtttgcatttgcaagattgcaccgtagaagggcaaacttctcctttggggttagcaatattgcgggtggcaaccagcttagcgcgctcctatcgtgagcagaaacccttaattgtgttacccgacagcctttatccacctcggcaggggagtcttaccccatgcaatctttaagcgcgtatcgtattatgtggttgatttgtatgtttgatttgccagtaggcaccagaaaggagcgcaaaaaagccacaggtttcagaaatcttttattagatgaaggatttgagatggcacaattctccgtctatatgcgccatttaccaactcgcgaacgcgcagatttccttactaaaagagtaatggggcaggtgccgcctaatggtaaagtgacgattataactataacggacaaacaatttgcagaaatcgcttcatatcataatctgcgagcagagaaacccgtaaaaaaaatggaacaattggtactgttatgagggttttttggagagtttctcataaaataaaaggcgtaaaatgcttattttttagcactttacgccaatatctattatagacgattgggagatggtgtctagccgtaacatcaatggatagcaaccgcgatgttgatatattatagacgattgggagatggtgtctagccgtaacggtgtagaatttcatataaaaggcacaaaattatagacgattgggagatggtgtctagccgtaacttgcaacatataccgaaaaagatgaagaagattatagacgattgggagatggtgtctagccgtaacttactcacaaggtgacggcgcatgttttgaattatagacgattgggagatggtgtctagccgtaactgaatatttatgaacggcttgcgacaattccattatagacgattgggagatggtgtctagccgtaactaaagcaccagtttcagcatcacgataaaattatagacgattgggagatggtgtctagccgtaacctggttgctttcattgcaaaaccaaacgtgattatagacgattgggagatggtatccagcggtagcactattatttatatggatgtttaaaaaaaagattggctggggcaccaggattcgaacctggggatggcggtaccaaaaaccgctgccttaccgcttggctatgccccaatatttgcaatcttttatttcagaggtttgccctgaaaggagagttcttttacacaaaagatttgcatagttcaatcatattctttcagtgaagatatttttcttaaatctgccgcggcgagggtggtttcgcctttgctttggtaaagctggctgcgtaattccagggcttcttggtttttgctgtataaatccagtgctttgctgaaatcggcgatggctaattctggctcgttattttgtaaaaatatttttccgcgttggcaatgtgcttgcgaggcggtttggtgatattggttgtggtcttggtgggataattgaattgcttgataaaaatcaatttctgcctgcgcataatcttgtatggaaaaatataattttcctttggcgaagtagctgttgctgtgtgtggggtctagttctattgcttggtttagcagggtgagggcggtttggaagtctgcggttaagctggcatcgtgcagggcggagctggtggttggttctttgccgatagattggcagaactcggcatctgattctgggtgtttggtgtattgcaggggaagttgcaggtaattttctggatggttctttaaggcgagagcagcttggttgaaatggtcttggaaaatcgctttagtacaagcttcttctgcttctgtgagcttattttgggcaagataagtgacgctgaaccataaatattgggcggaggcttgataatgataataatggtggtataggtcacaatctaacataaaactaatctataatgagaaatgatatgacaacaagcgaaataatttctactgacgtaataataattggtgcaggtcctgtagggttatttgcggtgtttgaattagggctgttaggcttgtcttcgcatctgattgatatattggataaaccgggggggcaatgtgcagaattatatcccgaaaagccgatttatgatattcctgcctgggcagtgattacgggagatgatttgactaagcgtttattggagcagattgcgccatttaaaccgagttttcattttgggcagatggcggagtctttatttaagacggaaaatggggagtgggagatagtaactgatgcaggggtaaagttacgtgcgaaagtggtggtgattgctgcgggtggcggtagttttgtgcccaaaaagccgccaattgccgaaattgagcaatatgaaaataaatccgtgttttatgcggtgcggaaaatggcgaattttgcggataaaaaattggtaattgttggtggtggtgattccgctttggactgggcgattaatttacagcccgttgctaaggaattagtattagtacatcgccgcgatgatttccgcgctgcgcctgactcggtggaaaaaatgcggcatttggtggcagaaggtaaaatgcgcttggtgattgggcaggttgcggctttaaatggtgcggatggtgaattgtcatctattgtagtgcgagatgatgccaaacaggaaactagcatagattgcaatgtgttattgccattttttgggctgaccatgaagctggggccagtggcgaattttgggcttaatctgcatgagaatttaattaaagtagataccgaaaaatttgaaacgaacgagccagccgtgtttgcgattggggatataaattattatccggggaaattaaaacttatattatccggtttccacgaggcggcattaatggcacaagctgcctttgcttattgccgccccgatcagaaactacgttttcaatataccacttcctctagcgacctacagaagaagcttggggtatagcaggtgggttgggagtgaaataattactcactcggctggcgaggcttgccatttgttggttaattctttgcaccactgaacctaaatattcggtggtcatgacttttgtttttggcgtttcggttagtgaatcttcaattgatgctggtgcttgagattctacgttgaccatattggcaaattgtagatttccctgtgtgtcacgcccaactacttgcgcgtaggcaggaatattctcggttattttaccaattccgcgtgctattttagccccgtcgccaatttgtacttcgggcattatttcattattatcaccaacttgtacaccatctctaattattgctccatcatgaacttttagtgtgttacctgctaataatacattcgagccaatttttaccttgttgcctatctgtacatagccaagcactttggtgcccgtagaaataattacatcatcaccaataataggatggcgagttgccggattggcgtttccgtatgcacctaaggttacattgtgataaataagggcatttttgccaatttgtgctttttcgccaattatgcagccggttccatggtcgataaagaaattatcgccaatttgggtgccggggtgaatttcgatgcctgttaacgtatgcgccgcttcggataatatccgcgctttagggtcttttttgtcgtttaaatatatattatgagcctcttcatgcgcagctaatgcgcgtagcccgggataggtttctaattgggcttgcactgcatgtagctcgccagtatttagcgcctctaattttttgtcttcttttaatttagctacgctttcttcgctgattaattctcttaatgcggcatcgttaaggatggcatgtacaacccatctttcgtgctcactcaaatattttctggttaattcgcctatttcttgaacataagcataaggattaaatgtaggtaaatcagtagtatcagccatattatacatttctttttgtgtgaatatttgcaaaatatacaataaaaatgtggaatatgcaaatgataaaatcatagatttgttttttggttggctttatagatttggctcaataatctaattgaaggaaaaataatggaaagttgtaatctgcaagtaattgaccgcgaggggaaaacgcatgaattagagggcttagttggttggcgtgcgatggaagtgattcgtgattatggcctgccgattaaagccgagtgtggtggatgttgcgcttgtgctacttgccatgtttatgtggatgctgcatgggtggataaattagttcctgccagtgatgaagaaataaatcgtctggatgatgcgtttgatgtggagagtaattcgcgcctgtcttgccagattattttgactaaagaactggatggattgaaagttacgttggcgccagaaggttgattttccctaactgagcagtattataaactagtattaaccttcgcaaaagtgaaaaaatattttttatcagaacctagattttgcttatgttttcagttattatggtacaacgatttctttttaaaattactaataaatttataatcgttgtactgacttgcgactgcaagtccgccgaccgttcggcgtaaaaaataaaatactaaatactgaaaacagataaagaggtttatatgcagattaccgtatcaggaaaacaagttgatgttggcgattcattacgttcgcatatcgaagggcgtttgacggatggaatagcaaaatatttggagcgtgtagtttccgtacatgtagtggtttctaagcagggtcataatttccgagtggatataaatggtaatacaggcacgcatgcgggcattattataaaaagccatgctgagggggcagatgcttatgcagcgtttgaatctgcggcagataatatagaaaaacaattacgtcgttataaacgtcggattactaatcatcataaaactaatacgcatgcggttgcgcgtgaggagttacgtccttcgcaagctaaaaaatatgtgttacacgatttgggtgatagccatgaaacggaatatgcagatgatgcgccgatggtgattgctgaaaaagctatggatgttgaaaaactaactgttagcgaagcggtgatgaaaatggatttggcagatttgcctgctttgatgttcatcaactctgcacatgggcgagtaaatgtggtttatcgtcgtaaggatggtaatatttcttgggtggatccggtggaaaatttggcggcttaattgcttgtaatataattcatactactgaacattttttagtacaataaaatgtatccgcactctccgtcgtcatccccgcacaaggcgcactactgtccaaagaaaataagctgctgttatatttac

SEQ ID NO: 3465 - DNA, 23507 bp, synthetic construct
  misc_feature 1..23507: note = Synthetic
  source 1..23507: mol_type = other DNA
cgccaacgccaccagcctgcaaatcgccgaccgggcgaatatcctgctgcgggtgctggcggcgctgcatgcctgcggcgtgcgcgacgtgctgatgatgccggagaatggcggcatccgcgcccatgtcgagcgcggcctgatgcgggccaggggaaatggcggaacgcgcggcgcggatctgtaccccgcccttcatccggttgccatgccgatcaccggcaccgtcgccgacacccaccgcgccacggcggagatgcggcgggccggcgtgtcggcgctggtggtgctgggcggcgacggcacccaccgggcggtggcggcggaatgcgggacggtgccgatcgccggcatctccaccggcaccaacaacgccttccccgaacaccgggagccgacgatcaccgggctcgccaccgggctggctgtcaccggccgggtgccgccgcacatcgccttcgccgccaacaagcgcatcgacgtgtcgctcaatgacggtgccgtcaccgagatggcgctggtcgatgtcgcgctggtgacggagcgctacatcggcgcccgcgccctgtggcggaccgagaatttccgcgaactctacgtcaccttcgccgacccggaggtgatcggcatgtcggccatcgccggcctgctggaacccgtcggccgcgaggagagcggcggcctgatggtgcgcctgtcccctgacggcgaccgccgcaagagcgcgaccacgctccatgcccccatcgcgccggggatgatggcggaggtcgggatcaccgactggcgccgcatgccggccggcgtggccttcgagccggaggtcaccgccggctcgatcgcgctggatggcgagcgcgagctgtccttcagcgaacgcgaccgcctgtccctgacgctccgggacgacgccttccgcacggtcaacgtcgccgccgtcatgcggcacgccggccagaacaggctgctgaccggcaccccggtgcccgtcgccgccttctgacgaccacaacccaaatcacccccaaagacctgaaccagggagaaaacacctcatggcccagaatcccttccccctcggcaaggacgagctgctgacggcctaccgcaccatgcggacgatccgcgagttcgaggagcggctgcacgtcgatttcgccaagggcgacattcccggcttcgtccatctctatgccggcgaagaggcctgcgccaccggcatcatgatgcacctgaacgacaatgaccgcatcgcctccacccaccgcggccacggtcactgcatcgccaagggcgtcgatgtccatgcgatgatggcggaaatctatggccgctcgaccggcgcctgccggggcaagggcggatcgatgcacatcgccgacctgtccaagggcatgatgggcgccaacggcatcctcggcgccggggcaccgctgatctgcggcgcggcgctggcggccaaggtgcgcggcgaccgcggcgtcggcatcaccttcgtcggcgacggcgcgtcgaaccagggcaccttcctggaaagcctgaacctcgccgcggtgtggaacctgccggtggtcttcgtggtggagaacaacggctatgccgaatccaccgcgatggaatgggcggtatcctgcgacagctatgtcgaccgcgccaccggcttcggcatgccgggcgtcaccgtcgacggcaccgatttcttcgcggtgtacgaggcggccggcgagatcatccgccgcgcccgcgacggcggcggcccggccctgctggaatgcaacatggtccgcttctacggccatttcgaaggcgacgcccagacctaccgcgccaagggcgagctggaggcgatccgcgcgtcgcgcgactgcctgaccatcctgtcggaacgggtgatcgaagcgggcgtgatcggccgggacgagttgcaggccatcgaccgcgaggtgaacgcgctgatcgaggacgccacgcgcgccgccaaggccgccccgctgccggtggccgaagacctgctgcgcgacgtctacgtcgcctactgagcccattcaagaaacgccaaacgcgcggaggaaacacatgtcccgcaagatcagcatgaagcaggcgatcaacgaggccctggatctggagatgcgccgcgaccccaccgtcatcgtcatgggcgaggacatcgtcggcggcaccggcgcgaagggcgaggacgacgcctggggtggcgtgctgggcgtcaccaaggggctgtacgccaagcatggcgaccggctgatggacacgccgctgtcggaatccgcctatatcggcgccgccatcggcgccgccgcctgcggtctgcgcccggtggcggagctgatgttcctggacttcatgggcgtctgtttcgaccagatcttcaaccaggccgccaagttccgctacatgttcggcggcaaggcggagacgccggtggtgatccgcggcatggtcggcgccggcttccgcgccgccgcgcagcattcgcagatgctcaccccgctgttcacccatattccggggctgaaggtggtctgccccagcaacgcctatgacgccaagggcctgctgatccagtcgatccgcgacaatgatcccgtcatcttctgcgagcacaagaacctctacggcctggaatgcgaggttccggccgagagctacgccattcccttcggcgaggcgaacgtgctgcgcgacggcgacgacgtgaccatcgtcagctacggcctgaccgtgcaccgggcgatggaggcggccaccgccctggccaaggacggcaccgaggccgaggtgatcgacctgcgcaccctgtcgccgatcgattgggacaccatcatcgagagcgtcgagcgcaccggccggctggtggtggtggacgaggcgcatccgcgctgcaacctcgccaccgacatcgccgccttcgtcggccagaacgccttcggcgcgctgaaggccggcatccagatggtgacggcgccgcacaccccggtgcccttcgcgccgtcgctggaggatctgtatgtccccagcgccgacagcatcgccggcgccgtgcgccgcaccctgtcgcccaagggggcgtcgccgcggatcgcggcgtgagctaagcgccggcctgaatgccccaatcaaaaaaagcacttccaggagcctgcaccacatgttgaacgagcgcatcaagcccatcgtcatgccgaaatggggcctgtccatgtcggagggcaaggtcaccggctggctgaagcggccggggtccaccatctccatcggcgacgagctgctggaggtcgagaccgacaagatcaccaacgtggtcgaggccggcgagaccggcgtgctgcgccgcgtgctgggcgaacccggcaccatctatccggtcaaggcgctgatcgccgtgctggccgaacccgatgtgccggacgacgacatcgacgccttcatcagcgcctatgccgtcccggccggcgaagaggatagcgaggccgaggcgggcccgcgataccacaccgccgagaccccggccggcaccatccgctacgccaagcgaggggaaagcgggccgaccgtcctgctggtccacggcttcggcggcgatctcgacaattggctgttcaccatcgacgcgctggcggaaaaggccaccgtctacgcgctcgacctgcccggccatggccagtcgaccaagcggctcgccgatcccagcctgtccggcctgtcgaaggcggtgctgggcttcctcgacgcggtcggggtggagcgcgcccatttcgtcggccattcgatgggcggggcggtgtcgatgcgcacggcgctcgacgcgccgggccgggtggcgtcgctgtcgctgatcgcgtcggccggactgggcgagcggatcgacggcggctacatccagggtttcgtcggtgcgacatcgcgccgcgacctgaagccggtcctggagacgctgttcgccgaccccagccttgtcagccgccagatggtcgacgacctgttgaagtacaagcggctggacggcgtcgacgaggcgctgcgggcgctgtcggcctcgctgttcgccgatggccggcaggccggcatcctcgccgccggggtcgcggatacgaagacgcccacccttgtcgtgtggggcgaggaggaccgcgtcatccccgccgaccacgcccaggcgctggcgaacacggcccatgtggccgtcatccccggcgccggccacatggtgcagatggaggcggccggcaaagtgaacgcgctgctcaaggaccacatcgccaaggcggaatgaggcggcccgaccagccccctcccccgatccagcttcccgaaccacccgcaaccggcgcgcgggccatccgccggcgcgccggcaggagttccgtcatgcccgatctcaaggacaagtgcatcatcgtcaccggcgccggccgcggcatcggcgccaccatcgccaaggcgctggccgccgacggcgccaatctcaccatcgccgaccgtaccggggccgacgcccaacaggtggccgaatccatccgtgccaccggcggcagcgccatcgccgtcaccgtcgatgtccgcgaccgcgccgccgtccgccgcatgatcgacgagacggtcaaggcccatggccggctcgacgtgatcttcaacaatgccggcgtcgcccagaccaagcccttcctcgacatcaccgaggaggactggcacacgatcaacgacgtcaacgcgctgggcgtgctgatcggcatgcaggaggcgatcaagacgttccgtcgccaaggcggcggcggcaagatcgtcaacaccgcctcgatcgccggcaagcagggctacgagccgctggcccactactccgccagcaaattcgccgtggtggccttgacccaggccgccgcccgcggcttcggcaaggacggcatcaccgccaacgccatctgccccggcgtggtggcgaccgagatgtggaagatcatcgaccagggcttccgcgacaccggcatcaccaagtcggaaaacgaggccttcgacatgttcgccgccggcgcggtgctgggccggccgtcgcggcccgacgatctggtcggcgtcgcccgcttcctcgcctcgtccgacagcgacttcatgaccggccagtccctgctggtcgatggcgggatggtcttcgcctgaccgcctttcagcgctcgcccataacgataaaaccggaggacaacaccatgagtgccacgtcgatgaaggccgccgtctggcatggccgcaaggatatccgggtcgaggatgtgccgctgccgggcgccccgcccgccggctgggtccagatcaaggtgcattggtgcggcatctgcgggtccgacctgcatgaatatgtcgccggcccggtcttcatcccggtcgacaccccccacccgctgaccggcctgaaggggcaatgcatcctcggccacgagttcagcggcgagatcgcgacgctgggcgagggcgtcaccggcttcaaggtcggcgaccgagtggcggccgacgcctgccagcattgcggcgagtgctattactgcaagcacggcatgtacaacatctgcgagaagctggccttcaccggcctgatgaacaacggcgccttcgccagtctggtcaatgtcccggccgaactgctctacaagctgcccgacggcttcccgaccgaggccggcgccctgatcgaaccgctggcggtcggcatgcatgcggtgaagaaggccgcaagcatcgtcggcgagacggtggtggtggtcggcgccggcaccatcgggctgtgcaccatcatgtgcgccaaggcggccggcgccggccggatcatcgtcctggagatgtcggcggcccgcaaggccaaggcgctggaggtcggcgccacgctggtgctcgatcccaaggagtgcgacgcggtggcggaggtcaaggcgctgaccggcggttacggcgccgacgtgtcgttcgagtgcatcggccaccgcgacaccgccaagctcgccatcgacgtcatccgcaaggccggcaagaccgtgctggtcggcatcttcgaggagccgagcgccttcaacttcttcgagatcgtcgccaccgagaagcaggtcatcggctcgctggcctacaatggcgagttcgccgacgtcatccgcttcatcgccgacggccgcatcgacgtgcggccgctgatcaccggccggatcacgctcgacgacatcgtcagcggcggcttcgaggagctggtcgcccacaaggaccgcaatgtgaagatcatcgtgcagccgcgggcggcggccgaacagccggagcttgtccactgatggccctgcccgcgatgcgcagcccacgcccggagcatcgggcggagaagccgtcctggctccgcgcccgcgcaccggccggggcggcgttcgaggatacccgatccctcgtccgccgccatggcctgaacacggtctgcgaggaggcggcctgtcccaacatcggcgagtgctggagcaagcggcacgccacggtgatgatcctgggcagcgtgtgcacgcgggcttgcgccttctgcaatgtcgccaccggctggccggacacgctcgatccccacgagccggaccggctggccgaggcggtgggcgagcttggcctcgcccatgtcgtcatcacctcggtcgaccgcgacgatctgcccgacggcggggcgggccatttcgcccgctgcgtcgcccgcatccgcgaccgctccccggcgacgacggtggaggtgctgacgccggacttccgcaacaagccgggggcggtggagaccgtggccgacgcccggccggatgtctacaaccacaatctggagaccgtgccgcgcctttacgccgaggtccggccgggggcgcgctactacggctcgctccgcctgctggagcgggtgaaggagcgcgatccgtcgatcttcaccaaatccggcatcatggtgggcctgggcgaggaaccggcggaggtacttcaggtgatggacgatttgcgggcggcgggggcggatttcctgaccatcggccagtatctccgccccacccccacccatcacccggtcgcccgccatgtcacgcccgaggagttcgagcgctatgcgacggtggcgcgggccagggggttcctgacggtgtcggcgacgccgctgacccgctcctcccaccatgccggccgtgatttcgcggagctgcggcggcgggcggcggagaagggctgaacctcacagcgcggttttgggaccgacctcggccccgtccggctgaggcggcgtcatcagcttgcaattgctgacgcaataagtctgctgttcgatccggccaccgcaggatttgaagcagctgtcgtaatcggaggagcaatagaggctggtggagcagctgattccccactcgaagtctcttaaggtcttcatcttcttcttgttatagtccttgggcagctctttcagataggcctgatattcggcatgggcgcgggtgagcccttcggcccggcaggtctggagggcgagctcattcgcggagtcgcagacggatcgcgcctgcttgcactgggcgacgcaccggttccccgcctcgccgaccggcaaataccggaatgtccgcgtctcgaaatagggggttggggtgcaaccggaggtcacggccgccagcaggcagccgaacagaatggaacgccatgtcatgatgggtggctccgccgtggaataccgtcacttggcatcaacagcccacggacacggaatcatccatcggcggcgtggatttcgcgagagcggaccacggcgccgatggacggcaaccccaggaagaacagcccccggcgtaatgacccttcgcccccccgcggcccatcaccccgcgcggacggtggcgatgaagctggagacctcggtcttcaaccggtcggcctcggtcgccagaccgttggcgacgctcagcacctgaccggccgccgtcccggtttcgctcgccgccctggtcacgccgacgatgttggtcgacacctgttcgctgccgcgcgccgcctgggcgacattgctggagatctcggcggtcgccgcgttctgctcctcaatggcggcggcgatggccgacgagatttcgctcatccggccgatgatgccggcgatgccggcgacggcctcctgggcgccgccggtggcgctttggatctccttcaccttcgcctggatctcctcggtcgccttggccgtctggctggccagcgccttcacttcgctcgccaccacggcgaagcccttgccggcctccccggcacgggcggcctcgatggtggcgttcagcgccagcaggttggtctggccggcgatcgagttgatgagatcgaccaccgcgccgatctggttggcggtctcgaccagcagcagcatgctggcgttggtgcggtcggcctcctgcaccgcggtggccgagatggcgctctggttcgccacctgccggccgatctccaggatcgaggcggccagctcctcggtggccgaggcgacggtctgcacgttcgcgctggattgttccgacgccaccgcgacggcggtggcctgggccgacgactgggtcgcactcgacgacagggtgccggccgccccctgcatctgggaggccgaggaggcgacattctcgacgatggcgctgacgctgccctcgaagcggtcggcgagctggagcatctccgccttgcgcagcacctccgcctgcgtcttctcccgctcctgctcggcggtcaggcggcgcacctccagcgcgttgcccttgaagacatcgagcgtgcgggccagcagaccgacctcgtcgcggcgcgcggtgccgtcgatcgggaaatcgagctcgccctgcgacacgcgggtcatcgccccggtgatgcggccgagcggcctgacgatcatgaggatgacgatggccagcgacagcgacaagccgaccaccacgcccgccaccgcgagagcgaggatgatgctcctggtctcctcggcgacctcgcgggtctcggcgatggacttttccatccccttgcgattgacctcgacacgctcgtcgatcagcgccatcgccgcctggcgggtcttcgccccgtcaccgccgctgagcgcgaaggactcttcgtccctgccctgaagggtcaggtcgatcaccttcgaggcggtctgacggtaggcgtcgaccaccgccttgatcttcacgccggtctcgcgccgcaccgcgctgtcggcggtcagcgcgagttcgctgatcaacctgtccacctgggccatcgactggttgaactggccggcgaagcgttgcatgccctcctggcttttctcgatgatcgcgttcttctcggcgacggtcgccgcgttcagatgacggccgatgtcgagaatgaccgtgcgccgggtcgcctcgatggtcagcgcatattccgcggtccgctggagcaaagccagccgcagcacggactccaccgagatcgccgtcatgatgagcagaagcaggacgataggcgtgaggatcttcacgatcattttctgattgccgaaccatgcgaacatcagccacccccacagatggaacagttacgctggaaataattcatagggtaattttatacattcagtccatgattgtctgactagggaaaaccccgagatcatcttaccgaatgtaacggagatttattttctttaacaatggatgtttccgtttgattcataccgcatgatctggacgatcgtctgtatacgatacatggaaatttctggatttccatccatgcgaatttctcaccacgaaccggatggtcctttccgcgccatgggcgggataggattgggcagtcggcaccgggtgatcggggagcgggaaatcgggaatcggggaactgatcttgccccaccgaaacggggcaagatcaaacaggcacgcatctgttcggcgcgccctcttgccgggctctctcgaatgaaaaggggcggaccgtggcccgccccgcatttcgtgctccccgaagggaacatgttaacggctggacccccgatccccatcgaatttccaagccgttcttcatcctagtctcctggcatcttctgtcaagggttgttatagactcgtcatcaggttgttttccgggaacttcccgagaccatacggacaaatttgcagagtgggagtgcgccgtgcagccataccggttgtccttcgatctcggcacgaactcgatcggctggggcctgctcaacctggaccgccagggcaagccgcgggagattcgcgcgctcggctcgcgaatcttttccgacgggcgcgatccgcaggacaaggcctccctcgcggtggcccggcggctggcgcggcagatgcggcggcggcgcgaccgctacctgacgcgccggacccgcctgatgggggcgctggtccgcttcgggctgatgccggcggacccggcggcgcgcaagcggctggaggtggccgtcgatccctacctcgcccgcgaacgcgccacccgcgagcggctggagcccttcgagattggacgcgccctgttccacctcaaccagcgccgcggctacaagccggtgcgcaccgccaccaagccggacgaggaggccggcaaggtcaaggaggcggtcgaacggctggaggcggcgatcgcggcggcgggcgcgccgacgctgggggcatggttcgcatggcgcaagacgcggggcgagacgctgcgcgcccggctggccggcaaggggaaggaggccgcctatcccttctaccccgcccgccgcatgctggaggcggagttcgacaccctgtgggccgaacaggcccggcatcaccccgatctgctgacggcggaggcgcgcgaaatcctgcgccaccgcatcttccaccagcgcccgctgaagccgccgccggtcggccgctgcaccctgtatccggacgacgggcgcgcgccgcgcgccctgccgtcggcgcagcggctgcgcctgtttcaggagctggccagcctgcgcgtgatccatctggacctgtcggaacggccgctgaccccggcggagcgcgaccggatcgtcgccttcgtccagggccgcccaccgaaggccggccgcaagccgggcaaggtgcagaagtcggtgcccttcgaaaagctgcgcggccttctggagctgccgccggggaccggcttctcgctggaatcggacaagcgcccggaactgctgggggatgagaccggcgcccgaatcgccccggccttcggacccggctggaccgcgctgccgctggaggagcaggacgcgctggtcgaattgctgctgaccgaggcggagccggaacgggcgatcgcggcgctgaccgcccgctgggccctggacgaggcaacggcggcgaagctggccggcgccaccctgcccgacttccacgggcgctacggccgccgcgccgtggcggaactgctgccggtgctggagcgggagacccgcggcgatccggatggccgggtccgcccgatccgcctggacgaagcggtcaagctgctgcgcggcggcaaggaccattccgacttctcccgcgagggggcgttgctggacgcgctgccctattatggcgcggtcctggaacgccatgtcgcgttcggcaccggcaacccggcggatcccgaggagaagcgggtcggccgcgtcgccaaccccacggtccacatcgcgctcaaccagctccgccacctcgtcaacgccatcctggcgcggcacgggcgacccgaggagatcgtcatcgagctggcgcgcgacctgaagcgctccgccgaggaccgccgccgcgaggacaagcgacaggccgacaaccagaaacgcaacgaggagcgcaagcgcctgatcctgtcgctgggcgaacggccgacgccgcgcaacctgctgaagctgcgcctgtgggaggaacaggggccggtggagaaccgccgctgcccctatagcggcgaaaccatcagcatgcgcatgctgctgtcggaacaggtcgacatcgaccatatcctgcccttctcggtcagcctggacgacagcgccgccaacaaggtggtgtgcctgcgcgaggccaaccggatcaagcgcaaccgttccccctgggaggccttcggccatgattccgagcgctgggccggcatcctggcgcgggcggaggcgctgcccaagaacaagcgctggcgcttcgcccccgacgccctggagaagctggagggcgagggcggcttacgggcccgccacctgaacgacacgcgccatctgtcgcgccttgccgtcgagtatctgcgctgcgtctgcccgaaagtgcgggtgtcgccgggccggctgaccgccctgctgcgccgccgctgggggatcgacgccatcctggcggaagccgatgggccgccgccggaggtgccggccgaaacgctcgacccctccccggcggaaaagaaccgcgccgaccatcgccaccatgcgctggacgccgtggtgatcggctgcatcgaccggagcatggtgcagcgggtccagcttgcagccgccagcgccgagcgggaggcggcggcgcgcgaggacaacatccgccgcgtcctggaaggcttcaaggaggagccgtgggatgggttccgggcggagctggaacggcgcgcgcggaccatcgtcgtctcccaccgtccggagcacggcatcggcggcgcgctgcacaaggaaaccgcctatggcccggtcgatccgccggaagagggcttcaacctcgtcgtccgcaaaccgatcgacgggttgagcaaggatgagatcaacagcgtccgcgacccccggctgcgcagggccctgatcgaccggctggcgatccgcaggcgggacgccaacgacccggccaccgcgctggccaaggcggcggaggatctggccgcccagccggcctcccgcgggatccgccgcgtccgggtgctgaagaaggagtccaacccgatccgcgtcgagcatggcgggaacccgtccggcccccggtccggtggacccttccacaagctgttgctggccggcgaggtgcaccatgtcgacgtcgcgctgcgcgccgacgggcgccgctgggtcgggcattgggtcaccctgttcgaggcgcatggcggccgcggcgcggacggcgccgcggccccgccccggctcggcgacggcgagcgcttcctgatgcgcctgcacaagggcgactgcctgaagctggagcacaaggggcgggtgcgcgtcatgcaggtggtcaagctggaaccctcgtccaacagcgtggtggtggtcgagccgcatcaggtgaagaccgaccggtcgaagcacgtgaagatctcctgcgaccagctccgcgcccgcggcgcgcggcgggtgacggtggatccgctcggccgggtccgggtgcacgcgccgggcgcccgtgtggggatcgggggcgatgccggccggacggcgatggagccggcggaggacatctcatgaccggccgtatcgtcgagatcgccgaggacggccggcacctgtcgctctcccgcgggttcctggtggtgaccgcggaggggcgtgaacttggccgcgtgccgctggacgacatcgcggtggtgatggccaacgcccatggcctcacctattccaacgccctgctgatggcgctgatggagcgcggcgccgtggtggtgatgtgcggccccaaccatctgccggccgccttcgtctggccggtggacgcccatcacgtccagtcccgccgcatgcgggcccaggtggacgccccggccccgctcgccaagcggctctggcaggcgctcgtgcgggccaagatccgccagcaggccgcggccctggaggcgcgcggcctgcccgccggcggcctggtggagatggcgcgccgcgtgcgctccggcgatcccgacaatctggaggcgcaggccgcccgccgctactggccggcgctgttcgggcgggaattccgccgcgaccaggacggcgacggcgccaacgcgctgttgaactacggctatgcgatcctgcgctcggccaccgcgcgggcggtcacggcggccgggctgcacccgtccatcggcctgcatcacgccaatcgcggcaatccgctgtgcctggtggacgacctgatggagcccttccgcccgttcgtcgatctggccgtgctgcggctggccgaggccggacaccgggaggtgacgcgggagaccaagcgctatctggcgctcgtgccgtcgctcgacatgctgacggcgcaggggacgacgccgatcggcacggtgctgatccggctggccggctccctggcgcaggtggtcgaggagggcaagggcgacctggacctgccggctctcgaccgcccctgggcgccgatgccgctggaatggcccgccgcgcccccggcgggaggcgaaacgggatgctgagcgggtatcggatgatgtggatgatggtgctgttcgacctgcccgtcctgacccggcccgaacggaaggccgccacgaagttccgccagttcctgctcgaccagggattcgagatgtcgcaattttccgtctacatgcgattttgcaccggcaaggagcaggtggaagcgctgacccggcgaatcgggcagaacgtcccctcgaccggcaaggtccatatcttgtgtttcaccgatcgccaatacgaaactatggtgtgcttcgacggccgcatccgcgcggcgcaacgcaggaatccggagcaatatgtcctgttttaaccatgaagccccggattcgacgctgccggaaaccgggaaagtccatgccgaaacaaggacttacccggacatccagtgtagccgatggggatcgggggtccagccgcaacgacaagtcccatgccgcgaatgcgaaggctagtgtagccgatggggatcgggggtccagccgcaaccggtgggcaccagtgccatcgcagccgcggagtgtagccgatggggatcgggggtccagccgcaacgcggcgttcagcgcggtcgcaatgcggttgagtgtagccgatggggatcgggggtccagccgcaaccttctcgctggccttgtccatcgccgatgcagtgtagccgatggggatcgggggtccagccgcaacagtccttcctggcggacaccacggaaccggagtgtagccgatggggatcgggggtccagccgcaacagcgccgatctgcgtctttggcgggcaggaagtgtagccgatggggatcgggggtccagccgcaacatgcgatcacctgtcacaaggcgcagggttagtgtagccgatggggatcgggggtccagccgcaactgcccagcagttgcagatactcggggctgaagtgtagccgatggggatcgggggtccagccgcaacgacgctgggcggcgcgagcggcgcgctgacagtgtagccgatggggatcgggggtccagccgcaacatcatgttcatggcttggtcctcacaggttgagtgtagccgatggggatcgggggtccagccgcaacattcgacacggctattggcatccgagcagaagtgtagccgatggggatcgggggtccagccgcaacccttctggccctcagtagcggtgttcggggagtgtagccgatggggatcgggggtccagccgcaacgccctcgtgcatctcatcggcccggcgttcagtgtagccgatggggatcgggggtccagccgcaacgatcggcgcgctcgacatcgaacatgtggaagtgtagccgatggggatcgggggtccagccgcaaccgttgcggtcggcggcactttcgccagtgcagtgtagccgatggggatcgggggtccagccgcaacgttccagtcggccagcaccttgtcgtcccaagtgtagccgatggggatcgggggtccagccgcaacggggagggtcgcttgatggacatcctcgacagtgtagccgatggggatcgggggtccagccgcaactgcgggaaacctatcacccggtcaacgccaagtgtagccgatggggatcgggggtccagccgcaactcagagagtacggcgcggcgcttaaggacaagtgtagccgatggggatcgggggtccagccgcaacctggcagcgtgtcgggcgacatgatcgcggagtgtagccgatggggatcgggggtccagccgcaacgtacaaccggtgtggccgccagccttgtcgagtgtagccgatggggatcgggggtccagccgcaactgtgtgactcttgggggcgcgccaaggggaagtgtagccgatggggatcgggggtccagccgcaacttgccagcggcgcgcggcgtggagccgatgagtgtagccgatggggatcgggggtccagccgcaacacccgcgcgacgtcgaggacaaggccgatcagtgtagccgatgggggtcgggagtccacccccacgggcatggctcgtgcgacgcgggtgtgacaccgacccgcgaacacccggaaaatatcaggtcagatgctgccgttgcagatagtcctcgctctgcatctccatcaggcggctgaccgtgcgctcgaactcgaaggcgtgggtgccttcgggatagaggcgttccggcggcccctcggcggcgatgacgacattcaccttgtgctcgtacagcgcgtcgatcagcgtcatgaagcgcttggcctcgttgcgcagctcgtccttcatggtggggacgcggtcgatcagcaccgtgtggaaatgggtggcgatggcgagatagtcggccgcccccagcgccttgccgcacaggttccagaaatcgacccaggccacgctcttggcggcgcggtcgatctcgacccgccggccctgcgcggtgagggtgcagggctcgcccgccgcgccgccggtcaagtcggagaaggccttgcgcagggcggcgtccgacgccggtcccagcggatgatggtagatcggcacgcccttcagccggtccagccggtagtctgtcgggccgtccagcgacaggatgtccagcctgtccttcagcagggcgatgaagggcaggaacagctcgcgctggagcccgtccttgtacagcatgtccggcggccagttggaggtcgccaccaccacgaccccaaggtcgaacaggttggtgaacagccggcccaggatcatcgcgtcgacgatgttggtgacgtggaactcgtcgaagcacagcagccacgcctcgccggccagcgcgcgggccagttcgggcagcgcctcgtcgggaccgtcgttccggcccttgcccgactggcgatgctcgtggatgcgctggtgaatctccagcatgaattcatggaaatggacgcgccgcttcttcccgaccggggcggtctcgaagaacaggtccatcagcatcgacttgccgcgcccgacgctgccgtagatatacagcccctgcggcgcggtggaggcgatgtccggcggcggcggcgcggcccggcggcggccgagcccgaagcgctccagccagcccccgccgcccggcctgtcgccgccggcctgggcgccgtcgccggcgcagggcggctgatagcccttcagcgcctgatacaggctttggaacttctccgccgccagttcctggtcgggatcggggcgaagcgtgccgctgccgcggcgggcgcggtagagcgaaagcggtccgtcggtcatggggatatgggcgatccggctgtcgagacggtcccttacctagccgatggaaccggccccggcaaccgccgaccgggcgggaacagggaatggctgggtggcgcggcgtaggggcgcaggcgcaagccgcgattttggacagtttattcttttcttaggcaatcacgtcgattaatcgacctgcgccgtccggacgcaagccaaagaggaaatgtttccgccgatgcccgcctccgggtcctcctccgcgccaccctcccgcccgccgccattccacccgatctccggtccggcacgggcgttgcgcgaccggctgacatcggtgcgcttcctgatgaccgcctcgggcctcgccttcatcctggtggtgaacgcgctgatcggctacggcatccttcagagccggagcgaggcgctggacgcgggggaacgggcgacgcgcgatctcgcccgcatgctggaggcgcagaccctgcgggtggccatggtggtggatcatctgctgcgcgacctctgcttcgcgctcggaacctattccgacggcggcggccggggcagcccggccgtgcatgaccatctgcgcaaacggcgcgacgccgtcagcgaactggccgacctcgtggtgatcggcgccgacggcatcgccctgcaccattcggccgacgcgccgctgccgacggccaccctgacggaccgcgcctatttcaccggaccgcgcgacagcgccgaccagcggctcttcgtcggcgccaccatctccagccgggtgatgaccggacagcgcgtcatccccttcagccggcgctggaccgacgatcagggcggtttccgcggcgtgatggtcgccatgatcgatccgacgcggctggcggcgacgctggaatcccagcatatcgaccgcaagggcggcgtgatcctggctctgcgggacggcaccgtcctgctggagcggccgcaggcccagagcggggcagagggcggggcggagggcgggccgcaacggaacgggctgggcgggctgtcggattggccggctgtccgggcggcgctggcggcgcatgacgaggcgaccatccgcaccgcctttcccgcccagcccgcctccatcggcgcctccggcatcgacagtctggtcagcgtcagacgggtgcgggactatcccttcgtcatcgtggcgacgctgccggtggacgcggcgctgcgcgaatggcggcgcaacacggcggtctggaccggcatcggcgcggtcatgaccatcgccatcgccctgctgaccgccttcatcgtccgccagcatgcccggcgcgagcaggatcaggcccggctggcccgcgcctcgcgccggatccgcggcatcctcgattccatgctggacgccgtggtgaccttcgacagcaacgggcggatcatcaccttcaaccgcgcggcggagctgatgttcggcatgccggagcaccggatggtcggccagccgatcgaggcgctgatccccggcgcgcgcggcggcgccgacgaccgcgacctgaccgcgctgcgccgagacgggcacgccttccccgtcagcttcaccgtcggcgacctgcggctggacggcggcccctgcaccccggccgccttacccgcggcactcgggggggtgcgcccggacgagccgcgcatctgcgtcggcgtcatccgcgacatgacccgccgcaagcagcaggaggccgagctgatcgcctccaagacccaggcggaactggcgaaccgggccaagaccgaattcctcgccaacatgagccacgaactgcgcacgccgctgaacgccatcatcggcttcgccgaggtgctgtccagcgagttcttcggcaccgtcaacgaacggcagaaatcctgcatcaccgacatccatgacagcggccgccacctgctggacatcgtcaacgccgtgctggacatgtcgaagctggaattcggccagttcgatctgagcgaggagtcggtcgaggcgcatgaggcgatcgggcaatgcctgatgatggtgcgcgatcgcgccgccgccgccggaatcgccatccacaacgaggtgacggccgccatcgccctgctgtgggtcgaccgccgggccttcaagcaggtgatcctcaatctgctgtccaacgcggtgaagttcacgcccgacggcggacaaatcaccgtcagcgccgggctggaggcggatggcggcttccggctgacggtggccgacaccggcatcggcattccggcggcgttcatggccgacctgttccagcccttccgccaggccgagaacaccgccaaccgccgctatgaaggtaccgggctcggcctgtcgatctccaagaacttcatcgacctgcatggcgggacgctgagctgccagagcgggctgggggccggcaccagcatgacggtgcggctgcccgcctgccgggtgatcgactgcccggcaggggcgcaggccggcatgaagcaggccggcacgacacaggccggcatgaaggcaccggcctgaagcggccggtcagcgcaggcgggtggcggcgaagcgccggggcggagcgacgaagtcgtcctgggcggcgatcagctgaagctcccgcgtgcccaggcgcttggtggtctcgaagatggcgaagatcgccgccgccgccttctccagcgcgtcggccggctcgaaggcgttcaggtaatgggcgaggaacagggccgccaccgcgtcgcccgatccgttgggcggcgggtcgaaggtcaggcgcggcgtcgccaccagccaggcgccgtcggtgccgtccaccagcatctcgatgctgtcgggatcggcatcggcgcgggtcaggctggtgaccagcaccagccgcggcccgcgcgcccgcagcgcggcggtggcggccagggcgttgtccagcgtttcgaccttgctgccggtcagatattccagttcgaactggttgggcgtcatcaggtcggcggcgggaaccgcatggtcgcggatgaattcgggcaggccgggccgcacgaagaagccgcgtccgacatcgcccatcaccgggtcgcagcaatagaccgccttgggattggccgccttgacccgcgccgccgtctccaggatcacccgccccagctccacggcgcccatatagccggacaggatggcgtcctgcgccggcagcgcgccgcgggcggcgatgccgtcgacgatgtcggcgatgtgctccgccgtgaagacctgtccggtccaggcgccatagccggtgtggttggagaactggacggtgttcaccgccgtggcgtcgatccccaggcgctgcaacggaaacaccgcggcgcggttgccgacatagccataggcgacatgcgattggatggtcaggacgcttttcatgggccaagcctatgcgacggccgggcgggcgtaaagcggccgactccagggcggtggcccggctgggcggcatggcagccatgcatatgcccgtatccggaaaaggccgtggcggcatgggccatggacagggcggcggcgggccgctaaagctgccgtctccaatcatccgcatccccgggatatcaccatggccacgaccgtccgcccccgccgcagcgtgctctacatgccgggctcgaacccccgcgcgctggagaaggggcgcggcctgcccgccgacgggctgatcctcgacctggaggacgcggtcacccccgaggccaagacggcggcgcgcgacggcatcgcccaggcgctggccgccggcggctatggccggcgcgagctgatcgtgcgcgtcaacgggctgaacaccccctggggctatgaggacctgcgcatggcggcggccagcggcgccgacgccgtgctgctgccgaaggtggagagcgccgacgccgtccggcaggcggaagcggtcctgcgcgccgccggggcgccggccggacaggcgatctggtgcatgatggagacgccgctcggcatcctgaacgccaaggagatcgccggcgccacccaggcggtcggcgcgctggtgctcggcacctcggacctcgccaaggatttgcaggccgcccacaccgccgggcggctgccgctgatcaccagcctggggctgtgcctgctggcggcacgggcctatcggctggcggtgctggacggcgtgcatctggacctgaacgacgacgagggcttcgccgcctcctgccggcaggggcgcgagctgggtttcgacggcaagacgctgatccatcccaagaccatcggcgcctgcaacgccgccttcgcccccgacgccggggagatcgcccaggcccatcgcatcatcgccgcccatgccgaggccgccgcagccggcaagggcgtggtgctggtggacggcaagctggtggagaacctgcatgtcgagaacgcccgccggctggtgacgctggccgaggccatcgcggcgctctgaggacggccgatcctcactcctcctcgccgtcgcggtacaggtcgggccagtcgaagcggatcatcgcgcgcggccggtcctgcggcgggccgatgcggttgccggcgaccagcctgacccccgacgcccgcgccgccaccaccatgctggtggtcgacagcccggcgacgcagatcatcaggccggcgcgctccgccgcggtgacgatgccgttcatctcctccatcagccgggcctcggccgagcggtcggccggcatcgccacggtgatgccgttcagcccggtgccggcgaagccggacaagctctgcgacttgaactccacccgcatgaaggtccaacggcaatagggcctgatctcgtgcagcagttcgctgagacgcccggtcggcacccccggcggaaagcgcagaagctcgaagatcaggaagcggcgcagatagtcgggaatcgactggcagatctccaggaagggcagccgggtgcggcgggccgccagcgtctcgaaacagatcggcaccgacatcatcagccgggatttgttgcggaacagcccgttcaggatttccaccgacccgaccagcgcatcggcgtcgagttgcaggatctccatggcgtcgctgagcgaattcaacgccgccgctccctcgatgaaggagtcgtcggggaagatgcgcaccggcgtgcccatataggtggagatcacctgctgggtgatgtcccagaccggccggtagcggatgccgaaccggccggcatcgtcgggcgacaggcgcaactggcgcaggaccggccgggccttgccgccggcctcctcggcgtagaagatcgggcccgtcaccatcggcgaaccgtcggcgtacgcatcatagaccgcaccgcccgcagttccgcccgtagttccgcccgtagttccattgaccgaagcggaggaggaggcttcccgcccgcccgccggctccgcccgcagccgcgcctcggccagcagggtgctggcgagggcatgttcgaaccggatttgcccatccgccacgccgacggcggtcgagacgcggaggtcggccgagcggtcgtcgcccaggaacaggtgcagcagctcctgcgcgatcctggcgcagaccagggccgccgcatggcgttcgagcgacgcgaacaccaggatgtaatcgtcgccggcggtcctgaagcggatgtcgttccgggtcaggtagcggtcgatgatgctgtcggcggcggtcaggacccgcgggcgcagcgccgtccagcccgagcccaggcgatcccgcatcatgccgagatcaagcagatgcacccgcccggtcgaagcgaccgccggctgcatcagcag

SEQ ID NO: 3466 - DNA, 23240 bp, synthetic construct
  source 1..23240: mol_type = other DNA
  misc_feature 1..23240: note = Synthetic
tctgcgtgatctcctcaagctcgattcgatgtccgcgaagcttgatctgcgagtccaggcgtccgatgaagtggagcagcccgtcccgtcccacgcagacgcggtctccggtgcgatacatgatggcaccccggcgcggcccgcctgggcagggcaggaagcgttcggcggtgagatccgggcgattgatgtagcctttggccagccctgcgcccatcaggcacagctcgccggcctcgccggggggaacgggcgatagagtcccgtcgacgacgagatattcatgccccggaagcggcgtgccgatcgggatctcgttgtcgaagtcgtggccgatcagatgttccgtcgagaagacggtgtcctccgtcggtccatagagattgtagacccgagcaattccggcgcggtggagctgccgcaccaagggagcatggacaggttcgccggcgagcaggcaggcacgcaccgctcgcagcggcagcggaaaagccaggagggccgtgagggccgacggcaccgcgttgatcagggtgattgcggaggattgcggcagatccgccagactcaggatcgagtcgacaaggaacaggctgcctccgcacgccagcggcgcgaagatctcgaagatcgacacgtcgaacgaaaaggaggttgcgcccagcgcgcagtgaaaatcttcctgagaaaatcggtccagcgcccagtccagaagccgcgccccgctgccgtgggtcgccatcacgcccttgggccggcctgtcgtgccggacgtgaacatcacataggcgaggtcaccggccgccacggcggtcggatcgcatgacctgcgcggccctgccaggccgctcaagggcaggatgcggcagcttggcgcttggcccgcgtaccgttcgggctcatcggtgaccaaccagcggccgctggaaatcccgaccatgtaggccacgcggtcctgcgggaattgcttgtcgatggggagatagaccgcaccgagcgccatcaccgcgtagactgccgcgatcgcgtcgaatgtccggcaggcggcaagggcaacgatatcgcccttccgcacgccggcctcgtccagggcgccgctgatctcctcgatgcgcgccagcagttctccatagctccactgccgattcgtcgagcgtagagcgatgcggtcctgcatgccgcgctcgttgcagcgttcgaagaagcggccgtgcagtgattctgcgtaagccgttccacatgcgtcggtggtgcgaagcattcaggcactccatctaccggcatatatttgtattttctggtgtcttcggctcagcgtttctttgattgccgccaccggatgcctttccccagcccacttttcttcgcgggcagcaaggatgccgcggccgtccaccggcaaagcaggtcatgcaggcggcgcgatccagacggagttcggtccacagcagagggtttcactgcgttctccctttgccggatcggagccttgcggcctcgtccggacactttttctctaatgtaggcctaccctgggttagaacacacttgcatgtattcaatctgaggtgtatgaccgtacctgtagcatgcagttttgggaaagcaaggctgttatcttctgtcaaagcggagcgttttgacgcaccaaagcccacaggtgtacgcaagaatgcctcggggtcgcttggagccggaatccaaggctccggtcactgacgccccctgtggcgggatatacgcaggagggtgatccatggcggtccgcaagaccttgttccagtccaaccgcagccaggccgtccggcttccgaaggacgtgtcgttccccgcccatgttcgcgaggttgtcatcctgcgcgaagaaccaagccggtccatcgtgccggccgacagcaactgggacgatttcttcgactcccccggcatcgcctttctcgaccacggccagcttgagcggcaagagcgcgaggtctggctggacgagacgggcgggcgctgaccccgccctgcaccgggccagggtgttcgatacctcttgtgatggccgctggcacggacggaatgagccgcgcttaggcggcgtccggtttcgccgcgggacggcgtgctgcagcgagacgagcggtgcaagagacgccccagttccgttggcgatcaagtggaacaccgctctcagcatcaacggcgtagcgatcgccaagtccgaatagctcgcctgtccatccggcgttcggcgtggcatcgctttccactgctcgattgccgcttcgccgacccagagtgtgaggctgccacgctggctcagggccgcctcgatgcaacaaggtcccgagctcggcataaacacgtttcttggacggacccgaggtggcgccaagcctaccggaaccgccggtttgcaggcattcaagcaggcacatcgttcaatacgaggccggatcgcatataatcgtatgagtaaaacgattgttcggcaaaggtaaaaaagttcgcttgacacggtatatttgcaatgattggataaagccgttcattcaaacagagaggttctcatggaactgaacgaggtattctttgtcatgttcctcgaaaatgacgagatcgacgccatttcctccaaccagcaggaaggcgctcaatctacgcctttcgttgcctcaacgtcgaagaagaaagatgactaagtcttcttcaagtcctattccgacctaaggcggcatggactacaattatgacaattttgattgtcgcaagtactgaagactcgtggaccgctgatgcggtccacgagtcccttctggcggacggtgcggacgctgtgcgcctcgtaacagaccatttcccactgtcggtccgaatggctgcccattcaggcaacgcaggggagaatgcgcgcctgttcattgacgggcgcacgatcgaccttgcctcggtgtcggcagtgtggcaccgccgctggaggactgcggcaacggtgacttcgctcgacatcccagacgatgtccggcaagcaattcagcgcgaaagcaccgcttccttggagggcgtcgtcggcgcgcttccctgttttcatctggatcagcccgcgaccatcgcacgggcgcggaaccggcccctgcaactcgcgctggcgcggcaactcggaatcgaagtccctcgcacgctcacgacgaacagtccacaggacgcgctgagcttcttcgatgaatgtaacggcgatgtggtcgtgaagatgctatcgtcattcagcgttcgcgacgaaagcggtcatgatcaggtcgtcatgacaaaccgcgtcacttctgaacatctccgtaaaattgacacgctatcaaaatgtccgatgacgtttcaggagcgtattccgaaatccatggagctgcgcataacggtggtagggtgcgaaatatttgcggcttctgtcgaatccggtcttgaaccaacggcggagacagattttcgtcgtggcttcgtaaaactgagccagcattggaaaccctaccgactgcctccggaattcgcagagaggctgctcgcattcatggatgcgcttcaaatgaactatggggcgatcgatgtgatcgttaccccggatggccgctatgtgtttctggaagacaatccggtggggcaattcgggtgggttgaacacgccaccggcatgccgatcgcccgaacaatcgccagattgctcaccgggggcgtgcagcgccgggtcgatctgccgacggtttcctgcaacctcgggagctttgcgcgatcagccaattgaccaatttttggaaatgtaaaaattaccaaaatctcataaagaaaatggtcgaagacgccggattggctgcttcgagtgaagtatcgcccatgtggcgtaccttcaagtgccatgcaatgagggatcttgctgtgcttaccactggcggaccaaccgggagattttcaagtggacacatcagttcttacgacgagggaacagtggctaccccatagtcaggctgttcctcgactctccggattgagcgacgccgatgtggacgaattgttgtccggggggatcggaggattcgggacgccattcatcgtcacggacgctatggccaattggtcgtgcatgcaatggtcgttcgactggttcaagaagacctatggcgaaacgattgtaatcacgtcatcgtcttttgaatccgatgtccgcatgcgcggacgcctttcggactacatcgactacatcactgaagacggcgatttgcgcggtcgtgtcccgcgtaacttttcctatgtcgggacagagagccagctggacacggctggagcgggtagtgcgcttgatgggccacaatatttggtttcttgggatctcgaatacctcagcggcatcggtgaccatttccatcaaccgtatttcatgaaagatcggaatttgctggacaggctaatgccggagacccagcgagcgttcttcaacaagcacacgtttgccttcattgggccaaaggggtcactgtcccagttgcataatgatcacgatcacacgcattcgtatctggcgcaaattgttggcagaaaaaagctggtcctattttcaccggcggaggccgaactggtcgcccaggtggacccgttcggattcacggtggacgggacggggatcgatccgcaaaacccagatccggacaggtttccccggttcttggaaacgaccccgttcgaatgtgtcattgaacggggcgacctgttgttccttccgtccggttggctgcattacgcgtatggattgacagcgggcattagcgttgcgagggacagtgtcgatcgctggaacttcggaaggtggttccaatcaatggccatcaccaatctgcccaaactggcctcgcgcgtcgtccaacatccaagcctgcagagagacggcatagcgccaccctgggcggatcgggtgcgcaatgacccatatctcttgtcgcttcttacctcgtattatcgtccatgacccaggcccgcactgcatatgtacggaaccttcggcggcgtacgaaggatgaacttcgtttgcggttcgagcatcttctcttcaagggcctcgtcgaactggggtttgatgtcgtcgaacaatcctggtctccggatgacccggagccctggctgtgtgatcagcaccgaagcgatgacgttcgcccggtgattctctacgagcatctgtcaaggaaccagatgccggatggcgatgtctattacatggaaatgtatttgaacggtaccttcacgctggatcgtgatggttggggaccgtttcaggccagcatgcggaacatgccagacatcagccatgtaaactcggctgacagcgttgcctactgtgtcgagttgagcgagacatggttgagaagtggagaatcgaaatattcccagccgaatccaaaagcgatcgaggcgccgcagggatatatattcgtgccgcttcaactgagtgcggatgatgcaatcgtctgccatgcggaaatcggtgtttccgaatttctgcatcaggttgccacctgggccgtcagcacaggcaggccgcttgtaataaagcttcatccttacaatgatgatcccgcaatcgccgaagccgtgcggttttggacacagaagccaaacatctatcaatcacaagagaacgttcatagcttgatctgccaatccgccggtgtcgtcacaattaattcgggctgtggcttcgaggcgctgattcatggcaagccggtcgtgacatttgggcaatgtgactacaagtgggttacattcgcgggtttgggcgtagacctcgatttggcggccgcatacattgacggttacagtcctgcacagaggaggcgggcctacagttgggtatattattatctgacggaccatgtcctggacgtaagaggtgagaattgggcggccacaggcgctcgtttgaaggaccgtctcaggcaaatcctgtttcctatgtctgatgttggaccgtaagcgtgaactgatgtggtggatttcgaggttcagtgcgtggcgtggttcatgatttgctgtgagataacggcaaagatgcacaaacgccccgtgatggagaagatgggcgcccgttcattgcccgatcttgtcctcatggccgcgcaactcgggatccccgcccggtggcgacggtggatggtccggaaagcaaggtaagtgggaagcgcattctgtgcggcaaaacgccgcagtattgacgaatcggggcgtttctccgttgctcgcgtcattgcctccggccggttcccccaaacctgccctttgctgaattccatggaagggaagggatgatcgacccaagcctgggggcggtatccttatcatgggcccaatatatacgatcaaagtatcaaaagacggctcgcttcaaatcttagaattgtgtttgcaaaaatcatagaaaagcgaaaaccatccagtcgtatgctttatcgagagagagcatatgtttgtgttctctctgggattaatcatcctttaatatttctggcgcgtatctgatgtagataaacacaccagagaacgtgccaagatgcttgacaacgccatgcggcctcgcatgacggtggaagacttcgtccgcaaatgggggcggtcttcactgggcgagagccagggttcgcacgagcatttcatcgacctttgtcatgttctgggggagatgcctcctgccgaagcggacccgtcggccaccgattactgcttcgagaaagcggtcgcgaagacggaccggcgcccgggacgagccgatgtctggaaacgtggctgcttcgcgtgggagtacaagggacccggccgcaacctggacgcggcctacgcccagctgcagcgctacgcgccggccctggccaacccgccactgctgatcgtcagcgacatggcaagggtccgggtctacacgaactggaccaacgcggtcacggtgatgcacgagatcggcctgcgggatctgctcgattccagccggctggacatcctcaaatgggccttttccgatccggagcggctgcggcccggtcggacacgggccatgctgacggaggaggtggcggcccgtttcgcgaccctggccgcccggatggtggcgcgcgggcacgaccgctggaccgtcgcccatttcctgatgcggctggtcttctgcatgttcgccgaagatgtcggcctgctcggaaagggcctgttcacccggttgctggacgagaccgtacgtgacccggccgagttcgtgccgctggcggagcagctgttccgatccatgaagaacggcggacgcctggggttcgaaaaggtcgaatggttcaacggcgggctgttcgaagacgccggtgccctgccgctggacggggacgacctcgccattgtgcgcgaagcggcgcggctggactggtcggagatcgacccgacgatcatgggcacgctgttcgagcgcggcctgagcccggagcgccgccgggcgctggcgcgcgaggtggtgcgccgcgaccgcgacggccgttccaaaggggcggtgggggtctattacacgcccgaaccgaccatcatgaagctggtggagcctgtcataacccggccgttgcgccgggaatgggcggcggcgcgggagcggatcacggcactgctcgccgaggccaggggggcggcgccccggcggcgcgaccgggcacgccgcgacgcgcgggcgctctatgaccgctttctcaagagcctgcgccggttccgcgtgctggatccggcctgcggctccggcaacttcctgtatctggccctgcgcgagttgaaggatctggagcacgaggtggtgatcgacggggagaccttcggctttccccgtcagctcgaactcgatctgaagggcaacgagcgctccaagaccatcgggccggaggcggtgctgggcatagacgtgaacccgctgggcgtcgaactggcccgcatctccgtctggatcggcgcgatccagtggatgcgccgccatggctacgacgtgccgcgcaaccccatcctgcagtccctgaagaccatcgagcagaaggacgcgctggtcgacctgatcggcggcgagacccgctggtccgatccgcaagccctcgcagcggccgggaaggacggcggcgatgaggatgacggggagccgtaccggatggtcatcgtcggcaacccgcccttcctcggcgacaagacgatgctgggcgaattgggggcggagtatgtcacgcgcctgcgacgcctgttcgaagggcgtgtgccgggtgcggcggacctcgtctgctactggttcgagaaggcgcgcgccctgctggaagagggtaagatcgagcgcgtcggactggtcgccaccaattcgatccgcggcggcgccaaccgcagcgtcctcgaccgcatccgcgccgacggcaccatcctggaagcgtggtccgacgagccctggacggtggacggcgccgccgtccgcgtgtcgttggtgtgcttcggccccaagggcctggacgaaacgccccggctggacggccgcgaggtgccggagatcttcgccgatctgaccgcgggcggcgtggatctgacgacggcgaagccgctggcggagaatgtcggggtgtgtttcgaaggcatcaaaaaatatggatccttcgacgttcccggttcgacggcccgcgcgtggttatccagcccgaccaacccgaatggacgaccgaatgccgatgttctgcgcccttggctgaacgccctggatgtcgtccgtcgatcttcggacacctgggtgatcgacttcacggggatggatgaacaggaagcggccttctatgaggcacctttcgagcatgtgctgcgcgaagtccgtccggaacgaagcaaagaccgcaacgaacgaacccggagcgtatggtggcagcacgagcgctcccgtcccgaactgcggaccaacctctccaggcttgtacgttgcatagtgacaccggtcgtcgccaagcatcgggtgttcgtgtggcagcccaccggcgtgttgtcggccaatctgctggacgtgattgcccgcgacgatgacacgactttcggcatcctgcacagccgcttccacgaactctgggcattgcgtctcggaacaagcctggaggaccgcccccgctacaccccctcgaccacattcgaaaccttccccttcccggagggactgacgcctgatctcccggcctcatcctacgcagccgacccccgcgcgcaggccatcgccgaggcagcacagcggttgaacgagctgcgggaaaactggttgaacccaccggaccttgtgacgcgggagccggaggtggtaacgggctttcccgaccgcctgctgccgcgcgacgaggccgctgctgcgatcctgaagacccgcaccctgaccaatctctacaaccagcgcccggccttcctggcgaacgcccatgcggcgctcgacgccgccgtggccgccgcttacggctggccggccgacatttccgacgaggaggtcctgcgccgcctcctggctctgaaccatgcaaggccggctgccgatgcggtcaaacgccggaagaaggcggcgaaggcgatcgacagggatcaagggaatctgctgctgccgatctcgggcggaaaaccggcgcagtccgactctgtggaaatgcccgtggcggagccgcaacgcgctacggagccttcgcgcccaacctcgcaccggagaaaggccggatgaccggggagagaagcttgcgcaaacaagaaggggcgagccgtagcccgccccgcatcttgtgtccgccgaggcggacttgttaacggctggaccacggtttcccatcggctaaaacaggcaacgcttccagttaaaaaagagaatagcatagaccgccgcacggtcaagggttgtgataggctcgacggcgaagagtttccggcgactctatcccgcttgaactcacgcgtattcaattcgtaagcggacgatcccatgcagccttaccgcctttcccttgatctcggcaccgcttcccttggctggtgcgtgctggaccttgatcatgatggaaggccgaagggcatccggcgcatgggcgtgcgcatcttcactgatggacgcaacccccaggacaagacttcgctggcggtggcgcggcggatcgcgcggcagatgcggcggcggcgcgaccggacgctggtgcgccgcgcgcggctgatggcagggctcatccgcttcggcctgatgccgggcgaccgcgcggcacgcaaggcgctggagcggctcgacccctacgaacttcgcgcccgcgggctgaccgaacggctggagccgcaggagatcggccgcgcgctgttccacatcaaccagcgccgcggcttcaaggcgatgcgcggcaccggcgacgaggaggaggccggcaagatccgctccggcatcgaccggctggacatgcagatggcggaggccggcacgccgacgctgggcgccttcttcgcgtggctgcgcgcgaacgggcgcagcgtgcgcgcccggctggtcgggcggggcgccaaggccgaataccccttctacccggcgcggcagatgctggaggcggagttcgatgcgctgtgggcggcgcaggcgcgccatcacccggacctgctgacggaggaggtgcggaccactctgcgccagcgcatcttccaccagcgcccgctgaagccgccgcaggttggcaaatgctccctgatcccggaggacgagcgcgccccgcgcgcgctgccctcggcgcagcgcttccgcctctacaccgaactcgccaacctccggatcatcatgccggaccgcagcgagcggcccctgaccatggaggaacgcgacctgatcctgcgcgcggcgcgggcgaagccggcccgcaaggccatcggattcaaggacatccgcaaggtgctgaagctcggctccgacgtcgggttctcccacgaatccacccgcaggccggaactggcgaccgacgagacctcggcggtgctggccgacaagaagcgcttcggcccgcgctgggcgcggctgaccctggccgaacaggacgaggtggtcgagcggctgctgtcggaaaccgatgatggggcgctgatcgactggctggtcgcgcgctgggatctggaaccggacgccgcggcccgtgtcgccgacgcacggctgcccgactttcacctgcgcgtcggccggaaggccctggccgccctgctgccggtgctggaatccgaatcgcgcccccagctatctgaccagcggcccatccgctatgacgaggccgtgcccgtcgccttccccggcgcccaccattccgaccgccggccgggcgagcggctggaacgcctgccctactacgccaaggcgctggaacgccatgtcgccttcggcaccggcaatccaggcgacccggaggagaagcggctcggccggctcgccaacccgacggtgcatatcgggctcaatcaggtccggacggtggtcaacgcgttgatcgaccgctacggccagccgcaggagatcgtggtggaactggcgcgcgaggtgaagcagacgcaggagaagcgtcgtcagaaggagaaggagcaggcggagaaccagcgtcggaacgaggagcgcaaggcgctgctgcgcagcgtcaacgcgccggtcaacggccgcaacctgatgaagctccggctgtgggaagagcagggggccggggtcaaccgccgctgtccctacaccggcgagaccatcgggctggagatgctgttgtcggaaaaggtcgacatcgaccacatcctgcctttctcccgcacgctggacgacagcgccgccaacaaaatcgtctgcttggccgccgccaaccgcgacaagcgcaacctgacaccctacgagcgctggcacggcgacgaggcgcgctggtcgcggattctcggctgcgtcgaggatctgccgcccaacaagcgctggcgctttgccgaaggcgccatgaaccgctggggagaggagaaagagttcctcgcccggcagatcaccgacacgcaatatctggcccggctggcgcgggagtatctgcgccatgtctgtcaccccgaccgcgtgcgtgtctcgccggggcggctgaccgccatgctgcgccggcgctggggcgtcgattccatcctgcgcgaccacaaccgcgaaggcggtgaagcgccggtcgatgcgaccttcgccaagaaccgcgacaaccacctgcaccacgcgctggacgcggcggtgatcggctgcatcgaccagggcatggtgcagaggctggctcaggcggcatcccgtgccgaggatctggggctcgaccgtctgatggacgacatcgacgatccctgggacggcttccgcgacgagttggcggcgcgggcgcgcggcgtgaccgtctcgcacaagccggagcacggcaccggcggccgcctgcacgaggacacggcctatggtccgaccctggaggcggaacgggcgcttggcttcaacctcgtctaccgtaagccgctcgacggtctgacggagaaggaggtcgcgcgcatccgtgcccccgacctgcgcaaagccatgcaggagcgtgtcgccttccaccggaacggccccgaccggctggacgccaagcaggcggtggcgaaggcggcggaggatctggcagcgaccgaaccctgggtgggcatccggcgtgtccgcctgctggccaaggaggccgatccgatctggctcgccgggccggacggcgaaccctacaaggggctgatcgccggcgacgtgcaccacatcgacatcgtggcgcttccggatggccgctgggccgggcgcgccgccaccttgttcgaggcccgccggaccgccctgccggacggccgtgccgcaccctatgtaccggccgacggcgagcgcttcgtcatgcgcctgcacaagggcgacctcgtcaggctggaccatgacgggcgcctgcggatcatgcgcgtggcccggctggagcctgccaacaaccgcctgcgcatggtcgagcatgtggacgccggggaactggacaagcgccacgccgatccggacgacccgttccgctggctgatcgtcgccttcgacaagctgcgcacgcgcagggcgaggcgggtgaccgtcgacccgctgggccgggtgcgcgaccccggattcccgaaatgggcggcgatgcccatttccggcgaggcggagcccgcctgatgaccggccgcatcgtcgagatcgccgaggatggccgccacctgtcgctgtcgcgcggctttctggtggtggaagggcaggggcgggagatcgggcgcgtgccgctcgacgacatcggcgcggtggtcgccaacgcccatgggttgacctacagcaacaacctgctgctggccctggcggagcgcggcgtcgtggtggtgctgtgcggaccgaaccatgtgccggcagccttcctgtggccggtggatggccatcatgtacaggcccagcgcatgcgcgcccagctgaacgtctcggtgccgcagacgaagcggctttggcagttgcttgtgcgcgccaaggtccgccagcagggcgcggtgctggaggcgcgcggcgcgcccgccggtgcgttcgaggcgctggcccgcaaggtgcgctccggcgaccccgacaacatcgaggcgcaggcggcgcgccgatactggccgctgctgttcgggaacgatttccggcgcgattcggacgccgacggtatgaacggcctgttgaactatggttacgccatcctgcgctccaccgtggcgcgggcggtgatgggggcgggactgcaccccacgcttggcctgttccaccgcaacagggccaatccgctgtgcctggtggacgatctgatggagcctttccgccccttcgtcgacctcgccgtggctcggctggccgatgcggggcacgaagcggtgacgccggacaccaaacgattcctggcgcttgtcccgtcactcgacctgccgacggcggaggggaccacgccgctgtccacggtggtgatgcgggccgcgacgtcactggcgcaggcctatgaaaagggggaagcggtgctcgaccttccggccggggaaggcagcaaagcctgggcgccgaagcctttggaatggcctgctcccccacccgcgcggtcgaacgtgccgcaaccggcctgacggaccgcggcaatgttgagcggataccggatcatgtggatgatggtgctgttcgacctgccggtcctgaccaaacgcgaacgcaaggccgcgacgaccttccgcaagttcctgctggaccaaggcttcgagatgtcgcagttctccgtttatctccgccattgcattggcaaagagcaatcggaagcgctgacgcgccgaatcgagaaggcagttccaccaactggcaaggtgcacatcgtcttcatcacggaaaagcagtatgaaaccatcgtgtgctttgatgggcgagtccgtcagccctctcggaaaaatccggagcaatacgttcttttctgacggcccgagcggcggaatcgaggcagtggagcggcgggataaggctgctttttcagagccttatcccgccacgtagtgtagccgatgggaaaccgtggtccagccgcaacggcggctgccccagatccagcggcagctgcagtgtagccgatgggaaaccgtggtccagccgcaaccagggtcgtcatgttgtcctcttggttgctagtgtagccgatgggaaaccgtggtccagccgcaactgcgccgtcacccggatagacccgcagctgagtgtagccgatgggaaaccgtggtccagccgcaacggggcggcggatgaggcgcaaccggtggtaagtgtagccgatgggaaaccgtggtccagccgcaaccgcgccgcggtcgatctcgtgaagcacttcagtgtagccgatgggaaaccgtggtccagccgcaacgagccgcacgagttggagcgccgctatttgagtgtagccgatgggaaaccgtggtccagccgcaactgacgtagtcgggtgcccagccgtcttcgcagtgtagccgatgggaaaccgtggtccagccgcaacaccccaactacagcgcgtgcggcgagatcgagtgtagccgatgggaaaccgtggtccagccgcaacaggtcgcccatggtcagagcgccacgcccgagtgtagccgatgggaaaccgtggtccagccgcaacgtgccctcgatccggacgctgtcggcgatgagtgtagccgatgggaaaccgtggtccagccgcaactcgaaggcgcgctcgcccagccggcccagcagtgtagccgatgggaaaccgtggtccagccgcaacagcgcgcacggactgggtaacgggcgcgggagtgtagccgatgggaaaccgtggtccagccgcaaccgcccggttctgggtgcacgcgagcgccagagtgtagccgatgggaaaccgtggtccagccgcaacgatcgagcccttcgccgaagaactcgccgcagtgtagccgatgggaaaccgtggtccagccgcaacagagctggttttgacgccatccggcgaagtagtgtagccgatgggaaaccgtggtccagccgcaaccggctgtcccgcaaaagcgccccccttccgagtgtagccgatgggaaaccgtggtccagccgcaacaaggccctggccgttactcggcgcaagagcagtgtagccgatgggaaaccgtggtccagccgcaactttgaacgcctccatcgtgccgaccgggaaagtgtagccgatgggaaaccgtggtccagccgcaaccggtaacccctctacacccgcggcggcgctagggtctgttgacattcgccgcgttgccaagactgtagcgacgaggttgatggccgctgcgaagcttttgtctgctttgtcacatcgtgtggcgatgcggcggatgtcaacagactctagggagccccctcacaccagcggcagatcgctgccgccattgacgatgtccaccgtgccggagatcaggttctccgcatacagtgcctccagatcgatgccgccggccggacgcaccgggcggatggcgcggatccagccggatatcgcctgttcctgtcggcggcggatcgcttccgcctcgtccaccgtcacggcctggaaggacaggcggtcaccgggacgcaggcggccggcgcggggcaggtcggcggagatcacggtggcgatcttggcatagccgccggcggtctgatggtcgttcagcagcaggatcggctgcccgttgcccggaacctggatggagccggtgaccagcccgtccgacgggatatcggccgacccgcgatgcttcagcgccggcccctccagccgcagccccatgcggtcggcctgcttgccgacatgatagcgcgccgacaggaaggtcgccaaagcctgttcggtgaagcggtcgtcctgcggcccaagcacgacgcgcaacggcccaacgccatactccggcggctgcggcagttccaattcctgctcatcgggcggcccaatgggcgcgctgtcgcggacaagcggcaaccggtcgtcctggcccagaggacgcccgccgagcggaccgatgccggcccggacataggtggacaggctgcccatcaccggtgccagcgcgaagccgccggccaccgccagataggcgaccgacgccccatcgaccgccccaagccgcagcagatcgccctggcgcaggctgtggctgcggtggggttccagcggccgggaggcctccccctcgcgctccagcgtcattgccagcggaccgaccgcggcgatgcggacggaggcggcgtccacccgcaggacggggccgagcagggcgatctccagccccgccatgccctgcgggttgccgaccagcgcgttggccagccgcagcgccaccgggtcgagcgcaccggccaccggcatgcccaactcctggaagccgaagcgacccaaatcctggatcgtcgcgaacaggcccggccgcaccacggtcagaaaggcgctcatgatgcggtcctcagactggcgggatcgaagcggccggcagccaccgcctgcgcgatgccgtcgaaggcggcgcggtccaccgtctcgaagcgcacccggtcgcccgccgccagcaggacgggatcggcccggccggagtcatagagcggaaccggacagcggccgatcaggtgccagccgccgggactctcccacggatagacggtggtcagccgcccggcgacggcgacggagccggccggcacccgcacccgcggttccgtccggcgcggccgttccagttcggccggcaggtcgcccatgtagccgaagcccggcatgaaccccagcatatagacgaaatactcggccgagccgtgcaactctgccacccgctctgtggtcagccccagcccgccggccagttcggccagatcggggccgaggtccgggtcgtagcagaccggcaggcgccacagccgtccttcggacgcggcggcgtcgctgccggccagcgccgcctccaccgccgcctgcatctccccccgaccggtggcgaccgggtcgtagaccaccagcagcgagcggaaggtcggcaccgtctccaccagcccagccggcggttcggctttcagccgggcgtgcagggccatgacgcgggcgttggtcgcccggtcgatggcctcgccgaactcgacgttgaaggcggtgtcgcctgcggtggtgaagcggatcttcacgcccacgctccttacccgatcatcatcgacggcaaccacgtcaccatgccggggaacagccacaacagggccaccatcagcaccatcagcaggaagaagggcaggctggccttgccgatggtgaagatgttcctgccggtcatcgcctgcagcacgaacaggttgaagccgacaggcggcgtgatctgcgccatttccaccacaataatgatgtagatgccgaaccacagcaggtcgatgcccgcctgctgcaccatcggcaggatcaccgaggtggtcagcaccaccatggagatgccgtcgaggaagcagcccatcacgatgaagaaggcggtcagcgccaccagcagcgccgccggcgacagctgcatcgtggtgatccactccgccagcaggcgcgggatgccggtatagcccatcgccaccgtcaggaaggccgcacccgcaaggatgaagccgatcatgcacgaggtgtgggcggcaccgaacaggctgtcgcggaaggtcgcccagctcagcgtgccggtcgccagcgccagcaccagcgaccccagcacgccgatgccggcggcctcggtcggggtggcgatgccgacatagatggaccccagaaccgcggcgatcagcagcatcaccgggatcagcgcgccggtatcgcggagcttctcggcgaagctctgggacggctcgggcggcggcacccggccgggattcagcagcgaccagccgccgacataggccatgaacaggccggtcagcacgatgccggggatgacaccggcgatgaacagccgggcgatggacacgtcggcggccacgccatagacgatcatgatgatcgacggcgggatcagcagccccagcgtgccggcgcccgccagcgtgccgatggtcatcagcgggtcgtagccgcgccggttcagctctggaatcgtcatgcggccgatggtggcggcggtggcggccgaggaccccgacaccgcggcgaagatcgagcagccgatgacgttcacatgcatcagccggccgggaagccagccggtccagggcgccagccccttgaacatgtcggacgagatgcgggtgcggaacaggatctcgcccatccagatgaacagcggcaaggccgtcagcgtccaggaagtgctggccccccagatgttggtcgccatcaccatgcccaccggccgggcggtgaacagcgccatggcgacgaagccgacgccggccagcgccagcgccacccacacgccggcccccagcatcaggaacatcgtcaccacgacgacgagggatgcggtcgtctgatccatcgttcagccctcgctctgcatgccggcatgctggtaggacgcgtccccgccccgcagcaccgccacaaggtcgtcgatcagggcgatgaccagcacgaccagcccggccgccatcagcgcttgcgggatccacagcgggatcggcagtacgccctgactgaggtcgccgaaatcgtaggaatcataggtcatgcgcgcccagtaccaggcgaaataggcgctcagcgccgtaccgaaggcgaggcaggccagttcgaaggcgcggcggggcgcgccgtgcagccgctccaccagcaccccgacgcggatgtgggagccgcggcgcagcgccggccccagcatcaggaaaaaggacgccgccatgcaatagccggcaagctcgtcggctcccggcaccatgcggccgaacaggcggcttcccacctgcgtgatgatcagcacggcaatggcggcaagcgcgaccgcgcccaggatctcggcggttcgataaagaagggacagtgcggtgcgcatggcgcaaccacctcctgcggtcggtcggggcgaaggggcaaggatgcggcggcatcccagccggcacgccgcagcggggcgtccgggatgccgcgcaacggccggttacttgcggaaggcggagatgatcgcctcgccgtcggcaccggcggccttggtccattcctcggtcatggtcttgccgatggtggacaggccttccttcagcttgtcggacggcggcaggaccttcatgccgttgccggccatggtcttgttcagctcggccgtcttcttttcccactcggcccagccggcggcctcggccttggcggcggcgtcctggaccgccttctgggtgttggcgtccagccccttccacacctcggcgttgacgaagaccatgttgcgcggcagccaggcctggacgtcgtaatagaccttcacgaaatcccaggccttggtgtcgacgccggtggcggccgacgtgatcatcgcggtgacgatgccggtgccgaaggcctgcgcgacctccgccgcctcgatcttcaccgggacggcgccgctcagctcggcgatgcgggtggtggccgggttgtaggcgcggaacttctgccccttcagcgcttcgaccgactggatctcgtccttcacgtagaggccctgcggcggccacggaatcgagtagagcagcttcaggcgctggcgctccagcttcttctcgagatacggcttggagacgtcgtagagcttgcgcgacgcctggaagtcggtggcgaggaagggcaccgaatcgaggccgaacagcggatcctcgttcgcccaggagctgatcagcacctcgcccagctgcgcctgtccggactggaccgcgcgcttgatctccggatggcggaccagcgagccgttggaatggacggtgatctggatcttgccgccggtggccgccttcacgtcctccgcgaactgcttcaccaccacggtgtgcaggttcgtgtcgggatagggggtcggcatgtcccaggtctcggcgagtgctgccagcggcccggcggcgacgcccagcccaagcaggccggcgacgatcgggccggccatccgggcgacgagacgggattgcagcatgtcagcggtcatgatgttcggaagctccctgattgttggccgaagcggcgcccgccggccttgtggccggtcggacggtgggcagaagccggatgtccggcccggccggagcctgcgcgagcagcccatagccaaggcatcgtgacggcggcctcccttatcctgcccattcggtccccaagggttcaccgttccgagcgatccgtcaaacctccaatgttacaaacggggaaaaatcagcgccgcccgtcccttatgggtgcgggctcagtagatcagctcgttctcgccgctgccctcggccagcaccagttcgccgcgggcggcgaggtccttggccagctggaccatgtacatctgcgcctcgtccacgtcgcggacgcggaccgggcccatggcagccatgtcctcgcgcaggatcttggccgcgcgctcggacatgttggagaagaacagatccttcagcgactccgacgcgcccttcagcgcggtgcccagcttctgcttgtccaccgtgcgcaggacggtctggacgccgccggggtcgagcttcgacagatcctcgaaggtgaacatcagcgacttgatgcgctcggcgctgtcgcggttgcgctcctccagggccgccatgaagcggtgttcggtggtgcggtccagtccgttgaagatctccgccagcatttcgtggctgtcgcgtcggctggtgcgggcgaggttggtcatgaactccgtgcgcagcgtgcgctccacgtcgtccagaacctccttctgcaccgcctccatgcgcagcatgcgcatgatgacctccatcgcgaagctttccggaagctgggcaaggacgcggccggcatggtcggagcggatcttggacagcacgacggcgacggtctgcggatactcgttcttcaggtagttggacaggaccgactcgttgacgttggtcagcttgtcccacatcgtacggccggccggaccacggatgtcctccatgatctggtcgaccttgtccttcggcagggtcttcagcagcagccgctcggtggaatcgaaggagccgacgacggtgccgctcgacgacatctgttcggcgaactcgacgaacagccgctcgatcaggttggcggagaccgtgcccaggttcgccatcacctgggacagctccttgatctcctcgtcgtccatcagcgagaacagcttggacgaatgctcctcgcccaaggccagcatcatgatggcggccttttccgggccggtgagggtccggtagtcctcacgaaccttttgagccattgctgaccttcatgcctgcgcgattgccattaccggcagatcattgcggcaaacatcgttaacaaacgataaggaagccggtcgggaatagcaaaaccggctgtcgcgccagctttccgccggcgtcccggaaccgaagccggccggcgcggttggggtctgcgtcattcccctgcacaagaatgggaggcgcccatgcctgccccgccggacatgtcccgccgtcccgccgctctcgccatccgggcgttgatgatccgtgccgggcttcgcggcgccgcgaccgtcctgctccttcccggcctgatggtcgccctgccggcccccgtcctggcggaacaggcggtgacgctggagggctccgactgccgctatcgcgaccagtatcccgaccggcgcaagacaatccgctggtccggcgcctgtgtggacggctgggcgagcgggtccggcgtgctgacctggttccatgacggccgctatgacggccgggcggaggccaccctcgtcgacgggcggatcgaagggccggcccgcatcacatggcgcgatggccgccgcctcaacggcaatttcagggacgggctggtttcgggacaggccacccatgtctgggcggacgggcggacatatgagggggaatggcgggacgaccgccgcaccggcttcggcacgcttattttccccagtggaaacaagtatgtcggcgaattccaccgcaaccgtccgaccggtccgggcgagttcgtgaccgccgacggccgccgcttccaggcgcaggtcgacgcccgcggcacgatcagggccggggctccgctcgaccgtccgccgcaatccgcatccgttcctccgccggttcccgcatcgccgccagccgacgccgccgggccgcagcggctggaagaatggctgacggagcccaatcagcttctgcgcaccccgcagcaataaccggcgtcctttcaccgtccgtcttaggctccccatgggcgtcgcccccagtcacgccgccctttggcatacgccactatgtgaaaatgaatttacaggaatgtggaaagcctgtaactctgtgctcacgcaagccacgcttgggctttccggaggagcatcggggggatggagccacccattcagacgggatcgctgctgatccggatgcagaactgccaggcgcagctgccggcggcgctcgccaaggtgggggagtgggctctggcctatccgttccg

SEQ ID NO: 3467 - DNA, 23234 bp, synthetic construct
  misc_feature 1..23234: note = Synthetic
  source 1..23234: mol_type = other DNA
tgggattcgcgccgggcgacgcgggcgtgctcaacaacctgggcgtcacgcttcaggatctcgggcacctggacgaggccgcaacctgcttccgccagtccatcgcgctccagccggacgccgcccacgcctacctgaacctcggccttgcggcgcgcgacgcaatgctggtcgatcaggcggtggacgcggcgcggaccgcggtccggctcgcccccgcgctggcggaggcccacaccgcgctcggcttcgggctgctgctcaagggcgagttggaggaggggttcgcggagtacgaatggcgctcgcgcatggccgacttcccgtcgccccggcggagctttccgtcacccgcctgggacgggcgcgacctcgccgggcggacgctgctggtccacgacgagcagggcgtgggggacaccatcatgctcgcccgctacgccccgctgttgcaggcacggggcgtccgcgtgatcgtcgagtgcaacacgcagctcgtccgcctgctctccgccatgccgggcatcgcgggcgtggtcggccggttcgacgccctgccgccgcacgacgcccatgtcgcgctggcgagcctgccgcaccggctcggcaccacgctctacaccatccccgccgacgtgccctacctgtggcccgagcccgcgctggccgaggcctgggcggaacgtttggcgggcacgccggggctgaaggtcgggctggtttgggcgggcaatccggaattcaagggcgaccgcttccgctcggcacggctgagggacttccttgtgctgctggaggttccaggcgtcgccttcttcgctcttcagaaggggcgggggcgtcaggatctggacggctgcgggcctttgccggcgtgcttcatggatcttggcccggacatcgccgacttcgccgacaccgccgcgctggtcgccgggctggatctggtgatcacggtggatacctcggtcgcgcatctggcgggggcgctcggccgccctgtgtggacggtgctgcccttcgccccggactggcgctggctgggcgccggcgtctgcacgccgtggtatccgacgatgcgcctgttccgccatgaccggcgcgacgactggccatcggtcctggcccgcgtccgcaacgccctccactccctcagccggacccgctccgccgggcggtgagcgccgccagcgccgccgccacgcgctccacggccggcgcccaggcgcccggctccggctggtggaacaagcggagcgtcggataccagggactgtcgtcgcggccggtcagccagcgccagcaaccgttgtagcgcgacagcacccacaccggctttcccaacgccccggccagatgcgcgacggaggtgtccaccgtgatcacgaggtccagcccggcgaccagcgcggcggtgtcggcgaagtcaccgacctcgtccatccagtccagcagttccatgccgggcggcggctccttcgcctgggcggcgggcgagcccttttgcagactgatgaaagcgacgtcggtcaccgcggcgagcggggccagcgccgccagggtcaggctgcgcctccgatccaccgcgttggccttcgggctgtgcggccgcgggtcgcccgaccagaccagcccgaccttcagccgcccatccagccgcccatccacccgcccgttggccggaaggcgggcgcgccagcgctcggcgtccgccggatcaggggtgaggtagggcatctccgccggaatatcgtccagcccggtgttgaaggcgcgcggcaggctcatcagcgggcagtgcaggtcggtcaccggcaaggggtcgtgcaggttgtgcacggacaggaggccgggcatccgctccgccagccgccgcaacgcgctgtgcacggccaaacggacccggccgccacgttgcgcgaccagcggcgcgtagcgcatgaagtgcagcgcgtcgccgtgtccctgctccgcatgcagcagtatggtccggccgtccagcggctccccggtccacagccggcccggggccttgggcaccgggagttccccgaccgtccagcgcgcctcgtaatgctcccacccctcgcgcaggcgcccggccttgagcagcaccagcgacaggttgaagcgcgccgacgggttgtcggggtcgaggtcgaggatgcggcggaagcccgcctccgcctcctccagccgccgtaggtccagcccggtcacggacaggacgttcagcgccggcgggtggccgggcaccagcgccagcgcgcggcggcacagccgctccacggtggtgtagtcctctgccgaagcggcctgggtgcgcaacgcctccgccagattggcgtaggcgacgggatggtccggggcgagcgccagcgcgcggcggaagtaggccagggccgacgcggtctcgccgatctcgtgcagcgcgttggcgtggttgttccagggatcgggatagccgggccgcagcgccacggcacgccggtaaggcagccgcgcctctccgaagcgttgcgcgccgagcaacgcgccgccgaggttgttcagcgcctccggaaagtccggctgcagcgccacggcgcggcgcaggcagccctccgctcccttcgggtccttgcgcctcagccggatgtcccccaggctgcgccaggactgcgcggcgtcggggctgaggcggagcgcccgcgccagcagcgcttcggcctctgccagccggcccttgagggcgcaggcgcgcgccagatggtccaacccttcgtcccgggccgggttcagcgccagagcgtgccggtaggccaccacggcttcgccgctgcgcccgccatcgagtgcggcgtggccgagcgcccaccacgcgtcggccagttgaggggccagccgaacagcccggcgggcgagccggtatcgctccgccgccccggccagtttggcgaggttgaccagcggttcggcgtaggcggggtcgatcacggcggcccgccggaaccgatccatggcatcgccggaccgattggcggtgcggtgcagctccccctgcgaattgaggaaggcggcccggctgctctccaggcggaccgcgtggccgagcagagccgcagcggctgccacccgcccgccggtgagcgccgtcagccccagcaggtgctgcgcgtcggcatggccggggtcgagcgccagcacatgccggtagccacgggccgcagccgccgtccgcagcgcccggtgatcggccagcgcggcggccaggattgtgggtatgggatcggctctcccttcccccgcccgctccgctgcccattttgctaaagcggcggcgacgcgcgcgacgaccgggtcccaggcgccgggctcgggctggcggaacagccgcatggtggggtaccaggggctgtcctcccggtgatcgagccagcgccagcaggcgtcgaagcgcgacagcacccacaccggccggccaagcccgcccgccagatggcacacggaggtgtcgaccgagatgacgaggtccaaccgctcgaccagcgccgccgtgtcggcgaagtcgcggaggtcgccggtccaatccacgatctccaggccggggggaggcgccttggcctgcgcccccgcctcgcctttctggaggctgtagaaggccacgcccggaatcccggcgagcggcgcgaaggcggccagggtcaggctgcgccggcggtcgaccgagttggccttgaagtcgtcccggcgcggttcccccgcccagaccagcccgaccttcaaccggcgttcgcccgccaaccggtcgcgccaggtccgccggtcctcctccgccgggacgaggtagggcagcgcggccgggatcgtgtcgatccgggtgccgagcaggccagggacgctcagcatcggcgcgcacaggtcgcagggcggcggggcctcgtcgaggccgtaggcggcagccacgccgggcgtccgggacagcaggcgcttcagcgccggctgcacctgcaccaccacccgcgccccctgccgcgccagcagggacgcgtagcggacgaaatgcaaggtgtcgccgtaaccctgctcggccaccagcaggaggctccgcccgtcgagggggccgccgtcccaggccggggcatgcgtcgggtaggccgatccccacatcgcccagcgtgcctcgtacagcggccagccgcgggcgaagtcgcccgtcgtcagcagcgccagcgacaggttgaagcgggcggccgggctcttggggtcgagccgtagggcgcgcccggtccaggcaatggctgcgccgagatcacgcagggcgtggaacagcaggccaccgttgatcagcaccccggcccggtcgggcgccagggccagggcgcggcgggcgtgggccatgccacgccggaagtcgccccgcatcatgcacagcaggcaatcctgggcgtcggcctccgccgccgccgggtccaggcggcggacccgctgagtcagcgccagcgcgccgtcatggtcgcccgcctgcatcagcgccgtggcgaggttgccgcagagcctcgcctcccccggcgccagggcgacggcgcggcggagctgagcgacggcggccgtctccttgacctccgccagagcgaggccgtaggcggcacgcgccgtcgcgtcggcgggggccagcacggctgcgcgcctgatgatccgcagcacggcgtcgggccggttcaggtcctgcagcatcaggccaaggcactgccagcccgccgccaacgccggatcgagcaccagcgcccgcgcggccgtccgccgggcggcccgcatcccgccggcctgctggtgcagcgtggcgagcgccaccagcgccctggggtagtccgggcgcagccgcagcgcgcggtggacggcgatggcggcctgggccggccggccagccagccgcaaggcctcccccagattgtgcagcgccgacgcccggccgggttccagcagcatcagccgcgcgaagcagcgggcggccaagcggaaccgcccgtcgttcagcgccagcccacccagccgcagccacgcctccccgaccatggggtcggcggcgaggatgcggcgaaggacgacctcccgctctgagagcgcggtgaagctgcggcttcggaaggcgacgtccggggcgccaaggtcggtcataggggcgtctgccagatcgtcgcaccagcccggctcccttgcacgcgcatttgcgcacgcgtgtgatcttgggccaaagttccaagcgcaagaaaggcgagcttgagttgcatgatgatctcggctgctcccaggctcgtcagttgtgacgccgtctcgcgtaccacagggcgtagtccttgatccagcccctgaactatgcccgtttccgacccgctgcaacgtgttgcacggaggtggtgcagtttgaaaaggcctcttcccttgtaatgctactgtgtcatagaaggcttgccatataggagacatggcacagaggggtttggatcgccccgatgcggctgagcgccggttcgatgagtatctggaggccatcgccggtgtgttggggcacgctgaccggcacgcgccgatgcgcgcctattgcaggggtctgttgctgccgggacagcgcatgacaccggcgtgccgaagaagggcaaacagtcggtcggcgtggcgcggcagtattgcgggcagatcggcaaacaggacaactgccaggtggccgttaccctgtcggtcgccaaggatcacgccagtctgcccatcgctcaccgcctttccctgccggaaacctggacggacgatcctgcccgctgccgcacggccggggggcgccaagagcctcccagggcaaacctggcagacgatcacatggcgggagggaacaaatgcgcctttgtcgtcgcgtttcgccgccggaggaatgcctgttggtggaatggccggacggggcgccggagcctgccaagtactggctgtccaccctgccggccgacacgccgctcatggagttggtcaccgccgcgaaaggccgctggcgcatcgagcgcgattatcgtgagctcaagcaggaggtcgggctgggccacttcgaagggcgcggctggcgcggctttcaccatcatgccagcctgtgcatcgccgcttatggctttctggtcgccgagcggtgtcttttcctccctgagcaacgcatcgaaaccgggcagcgcgcggcgcctgtcgtatccgaagaatacaggctccgaggggttggtgcgtcctgaacgccacgcgccgacgtccatcgcctccgtccatcgcctccgtccagcggcgaccttcaatcggcttggcgcagcgcctgccgaggtgcccatgttgccttcaggcttaccaagctcaacagcggtgtttatgacgcagcagtagtatgtcggtgcggtaatgctatgtaaatgaaaagagaaggttggaaataatacgcatgaatgcatttgtttcctgtgcaaaatgatttgcgcaagtagcttcgctaaataatattttaagttttcatgttcagcattcttgcagttaaaacacggaagaatgcactttcatgcttgacgacgccatgcgacctcgcatgacggtggaggaattcgtccgcaaatggaaacgatcttcactgggcgagagtcagggagcacaacaacatttcgtcgatctttgccatgtcttgggggaaaagactccggcagatgccgacccgacggcgaaggactattgcttcgaaaaggccgtcgccaagaccgatgggcggcccggacgcgccgacgtttggaaacgcggctgcttcgcctgggaatacaagggacccggacgcaacctggaaacggcctatgcgcagcttcagcgctatgcgccgtccctcgacaacccgcccctgctgatcgtcagcgacatggtccgtatccgggtccacacgaactggaccaacgccgtcacggagaagcacgagatcggcctgaccgacctgcgcgaccccgaccgcctgaacatcctgaaatgggccttcaccgctccggaacggctgcgtcccggacagacgcggaccatgctgaccgaggaggcggccgggcgtttcgccgcccttgccgcccggcttgcgggacgcgggcatgaccgctggacggtggcccatttcctcatgcggctggtcttctgcatgttcgcggagaatgtcggcctgctgggcgagcggatgttcacacggctgctggacgaggcggcccacgaaccggcggagttcgttccgctggcggagcaactgttccgttccatgcgccacggtgggcgggtcgggttcgagaaggtcgattggttcaacggcggcctgttcaacgacgccgacgcgttgcccttggaggccggcgacatcgcgatggtgcgcgaggcggcgcggctggactggtcggacatcgacccgacgatcctgggaaccctgttcgaacgcggattgagccccgaacggcgcacggtcctggcgcgcgaggtggtgcggcgtgaccgctccggcctgtcgcagggggcggtcggcgtctactacacgccggagcccaccattctgaagctggtggagccggtggtcacccgccccttgcgccgggaatggatggcggcgcgcgaccgcatcgtcgctttgctgggcaaggccagggccgccgcgcccacggaacgcgagcgcctccgccggaaggcacgggcgctgtacgacggctttctggaccggctgcaccgcttccgcgtgctggacccggcctgcggctcgggcaacttcctgtatctggcgttgcgcgcgctgaaggacctggagcacgaggtggtggtcgagggcgaaggcttcggctttccccgccaactggagttggacctgaagggcaacgcgcggccgaagaccatcgggccggaggcggtgctggggatcgacgtcaacccgctgggcgtcgaactggcccgcatctccgtctggatcggcgcgatccagtggatgcgccgtcatggctacgacgtgccgcgcaacccgatcctccaaagcctgaagaccatcgagcagaaggacgccctgatcgacctgatcggcggcgaagcccgctggcccgacgccgagaccctggccgccgatgaggataaggacaggaagaacgggaacggggagccgtaccgcgtggtcatcctgggcaacccgcccttccttggcgacaagtccatgctgggcgagttgggagaggagtatgtgacgcgcctgcgccggctgttcgccgggcggctttccggcaacgtggacctcgtgtgctactggttcgagaaggcccgcgccttgctggaggagggcagggtggagcgtgtcggcttcgtctccaccaattccatccggggcggggccaaccgtagcgtgctcgaccgcatccgcgcgagcggcaccatttttgacgcttggtccgacgagccctggcaggtggaggagggggccgccgtccgcgtgtcgctggtctgcttcggccccaagggcatcgacgagacgccccggctggacgggaaggaggtcccggagatattcgccgacctgaccgggggcggggtggacctgacaacggcgcgaccgttggcggagaatggcggggtgtgtttcgaaggcatcaaaaagtatggggcgttcgatgttccaggtgcgacggcccgcgcgtggctggctgggccgttgaatccgaacgggcgaccgaacgccgacgtgcttcgtccttggctgaacgccatggatgtcgtgcggcgtccgtcggacacctgggtgatcgattttaacggtttgaacgaacaggaagccgcgctgtacgaggcgccctttgaacatgccttgcgccatgtccgccctgaacgggccaaggaccgtaacttgcgcacccggcaattgtggtggctgcacgaacgctcccgtccggaactgcgtgcgggtctggcggggcttacccggtgcatcgtcaccccggttgttgccaagcacagggtctttgcctggcaaccgacaagcgtgctgtcggcaaatcttttggatgtgatcgcacgcgacgacgacactgcgttcggtatcctgcacagccgcttccatgaactgtgggcgttgcgcctgggaacgagtctcgaggaccggccccgctacacgccgtccacgaccttcgagaccttccccttcccggacggccttacccctgaccgtccggcatcggcctatgccgacgatccgcgtgcgaaggccatcgcggcggcggcgaagcggctgaatgaactgcgcgagaactggctgaacccgtccgacctcgtggaggcggtggacgaggtggtgccggactacccgaagcgcttgctgccccgcgacgagcgcgcagccgcgatccagaagacccgcacgctgaccaacctctacaaccagcgtccggcgtggctcgtgcaggcccacgccgccctcgacgccgccgtggccgacgcctacggctggccggcagacctgtcggacgaggaggtgctggaacgtctgctggccctcaaccacgcgagactggcagcgagcgagaacaagcgccggaagaaggtgggcaaattgcccaaccccaatgcgccgcagttcttctactcgttttccggagacaaggcggaggcgtcggtttccacggaagccggttcgcctgggacaatcctcccttccgtgcagtcgggccaagcgcggaagctgaaaaggacgggttgaccgcagccgtggcgtcccgaaacaagaaggggcaggccgtagcctgccccgcatcttgtgcccgccggagcgggcttgttaacggctggacctcggtttcccatcggctaaaacaggtatcgtttccagctacggagagagtaccacaacccttcacgcggtcaagggttgtggtactctcgactatgaatggtgttcgataaggctgccgccgccgaacacgcgcatattccttttggggagcggaccgatcccatgcagccctatcgcctgtcccttgatcttggcaccaattcccttggctggtgcgtgctcgaactcgatcacgacggacagccgaagggcatccggcgcatgggtgtccgcatctttccggatggacgcaatccccaggacaagagttctctcgccgtggcgcggcggatcgcgcggcagatgcggcggcggcgtgaccggacgctggtgcggcgcgaccggctgatggcggcgctgatccgcttcggcctgatgccggcggatcgggcggcgcgcaaggcgctggagacgctcgatccgctcgctctgcgcgcgcggggggtgaccgagcggctggaagcgaacgagatcggccgggcgttgttccacatcaaccagcgccggggcttcaaggcgatgcgcggcaccggcgacgaggaggaggcgggcaagatccgcaccgccatcgacaagctggaagtccagatggaggaggccggtgccccgaccctcggcgcctttttcgactggttacgcgccaacgggcgcagcgtgcgcgcccggatggtggggaggggcgccaaggccgaataccccttctacccggcccgcccgatgctggaggaggagttcgacaagctgtgggcggcacaggcgtaccaccaccccaacctgctgaccgaggaggcgcggacgacgctgcgccaccgcatcttccaccagcgcccgctgaagccgccggcggtcggcaagtgctcgctgttccccgacgatccgcgtgccccgcgcgcgctgccctcggcgcagaggttccggctctacaccgaactcgccaacctgcggatcatcgcgccggaccgcagcgaacgcccgctgaccatcgaggaacgcgacctgatcttgcgggcggcgaaggccaagcccaccaggaaggccatcaccttcaaggacatccgcaaggtcctgaagctcggctcggacgtggagttctcccacgaatccacccgccggccggagctggcgaccgacgagacctcggccctgctgtccgacaagaagcgcttcggcccgcgctgggcgaagctgaccctggccgaacaggacgaggtggtcgagcggctgctgtcggaaaccgacgagggcgcgctgatcgactggctggccgcccgctgggagctggagcccgaagccgccgcccgcgtcgccgacacgccgctgcccgacttccacctgcgcatcggccggaaggctctggccgccctgctgccggtgctggagcgggaggcgcgcgaggggcgtccgatccgctacgacgaagccgtgccggtcgccatccccggcgcccaccattccgaccgccggccgggggaacagctttacacgctgccctattacggcgcggttctggaacgccacgtcgccttcggcaccggcgatcccaagcacttggacgaaaagcggcttggccggctcgccaaccccacggtgcacatcgggctgaatcaggtccggctggtgatcaatgagctgatcgagcgctacggtcgcccgcaagagatcgtcgtggaactggcccgcccgctgaagcagagccacgaggcccgccgccgcgccgagaaggagcaggccgggaatcagaagaagaacgacgaccgcaaggccctgctgcgcagcgtcaacgcgccggtcaacggccgcaacctgatgaagctgcgcctgtgggaagagcaggggagcggcgtcaaccgccgctgcccctacaccggcgagaccatcgggttggagcttctgctgtccgaaaaggtggacatcgaccacatcctgcccttctcccgcagtctggacgacagcgccgccaacaaggtcgtctgcctgaccgcggccaaccgggagaaaagcaacaagacgccttgggaggccttcgccggggacgaggggcgctggtcccagatcctcggctgcgtggaggacctgccgcccaacaagcgctggcgcttcgccgagaacgccatgaaccgctgggacgaggagggcggcttcctcgcccggcagatcaccgacacccagtatctcgcgcggctggcgcgggagtatctgcgccacgtctgccaccccgaccgggtgcgcgtctcgccggggcggctgaccgctctgctgcgccggcgctggggcgtcgattccatcctgcgcgaccacaaccgcgagggcggcgatccgccgatggacgcgaccttcgccaagaaccgcgacgaccacaggcaccacgcgctggacgcggcggtgatcggctgcattgaccagggcatggtgcagaaagtggcccaggccgcttcccgcgcggaggacaccggactcgaccggctgatggacgatctggatgaaccatggaagggcttccgcgacgagttggccgcgcgggtgcgcgggctgaccgtctcgcacaagcccgagcacggcaccggcggccgcctgcacgaggacaccgcctacggcccaaccacggaaaaggagcgggagaagggcttcaaccttgtttaccgcaaaccactggacggactgacggaaaaggagatcgcccgcatccgcgaccccgacctgtgccgggcgatgcaagagcgcgtggccttccaccgcaacggcccggaccggctggacgtcaagcaggcggtggcgaaggcggcggaggatctggcggcgaccgcgccctggatcggcatccgccgcgcccgcctgctggccaaggaggccgacccgatctggctcaaggggccggacggggagccctacaagggcctgatcgcgggcgacgtgcaccacatcgacatcgtggccctgtccgacggccgctggaccggccgcgccgcgaccctcttcgaggcgcaccgcaccgccctgccggacggccgcgccgcgccttacgtgccggcggagggcgagcgtttcgtcatgcgcctgcacaagggcgacctcgtgaagctgaagcatgacgggcgcctgcgcatcatgcgcgtggcccggctggagcccgccaacaaccgcgtccgcatggcagagaatttcgaggcgggcgagctggacaagcgccacgccgacccggacgacccgttccgctggctgattatcgccttcagcgtgctgcgccagcgcgaggcgcggcgggtcacggtcgatccgctgggccgggtgtgcgaccccggctttccgaaatgggcgacgactcccgccgcgccctccgacctggaagccgcctcatgaccggccgcatcgtcgagattgccgaggacggccggcacctgtccctgtcgcgcggatttctggtggtggaggcgcggggccaggagatcggccgggtccctttggacgacatcgggtctgtggtggcgaacgcgcacggcctgacctattccaacaacctgctgttggccttgtcagaacggggagtgccggtggtgctgtgtgggccgaaccatgtgccggcggccttcctgtggccggtggacggccaccatgtgcaggcccagcgcatgcgcgcgcagctcaacgtctcggtcccgcagacgaaacggctgtggcagatcctggtgcgcgccaagatccgccagcagggtgcggtgctggaggcgcgcggcgcgccctccggcgccttcgaggccctggcccgcaaggtgcgttccggcgacccggacaacatcgaagcgcaggccgcgcgccgttactggccactgttgttcggcgacgatttccggcgcgactcggacgcgggcggcgtgaatgggctgctgaattacggctacgcgattctacgctccaccgttgcgcgcggggtgatgggggcggggctacaccccacgcttgggctgttccaccgcaaccgggccaacccgctgtgtctcgtggacgatctgatggagcctttccgccccttcgtggacctcgccgtgctgcggctggccgaagccgggcatgacgaggtgacgcccgaggccaagcgcttcctggcgctcgtgccgtcgctggatctgccgacggcggagggaacgacgcccctgtccacggtggtgatgcgggcggcgagatcgctggcgcaggcctacgagagcggggacgccacgcttgatctgccggcgggcgaaggcagcaaggcgtgggcgccgatgccgctggaatggccagcacctccaaaggtgccgcaaccggcgtgatggggcaggcctacggaggggcaatcaggcggcgatgctgagcggataccggatcatgtggatgatggttctgttcgacctgccggtgctgaccaagcgcgagcgcaaggctgccacgagcttccgcaagttcctgctcgaccagggattcgagatgtcgcagttttccgtatacctgcgccattgcgtgggcaaggagcaggccgaggccctgacccgccgaatcgagaaggctgtgccgccaaccggcaaggtgcacatcgtcttcatcacggacaagcagtatgagaccatcgtgtgtttcgacggccgcgtgcgccagccatcccggaaaaatccggagcaatacgtgctgttctgacccgcgcggagagggattccgtgcatgtggagggcgggataaggctgccttttcagagccttataccgccgcgtgccgatgggaaaacgcggtccaaccgcaacaagtcgccgatggtcaccccatcgacgtgcagtgtagccgatgggaaaacgcggtccaaccgcaactcgccgcggcgcttgacgacaacagcgtcaagtgtagccgatgggaaaacgcggtccaaccgcaacagaaccaccttgcggtcgtgggccgccgcgagtgtagccgatgggaaaacgcggtccaaccgcaacggcggcagggggcgggaccacgtcggggtgagtgtagccgatgggaaaacgcggtccaaccgcaacggcatctgcctgatggtcgacagcggcggcagtgtagccgatgggaaaacgcggtccaaccgcaacaagagcttccccttcggcgccatcaccttcagtgtagccgatgggaaaacgcggtccaaccgcaacaccggcgccgctgtcatcctgccacgccacagtgtagccgatgggaaaacgcggtccaaccgcaactctcggcgcacgccagcgacacccatatccagtgtagccgatgggaaaacgcggtccaaccgcaacggcgagctgcgcgcggcatgcctcccacacagtgtagccgatgggaaaacgcggtccaaccgcaaccacacagccgacccggcaggcccatgtagatagtgtagccgatgggaaaacgcggtccaaccgcaaccgggggacagttgtccggtggtgccaggatagtgtagccgatgggaaaacgcggtccaaccgcaacgccgcgatgggcgacacctgaccgatgtagagtgtagccgatgggaaaacgcggtccaaccgcaactcttcgagcacatcccccttaaacgtctcgaagtgtagccgatgggaaaacgcggtccaaccgcaacgcggcgtgaccggtcgtggctccgacggtagtgtagccgatgggaaaacgcggtccaaccgcaacagcgtggtcagccccgtcttgatgccagctagtgtagccgatgggaaaacgcggtccaaccgcaacataacgcaatcggcgctggagaggaccgccagtgtagccgatgggaaaacgcggtccaaccgcaaccggcagagccgtaacgaccaatgggcggccagtgtagccgatgggaaaacgcggtccaaccgcaacgctgccgggtcgcggcggcttgtgttgatgagtgtagccgatgggaaaacgcggtccaaccgcaacagccatgacgctgtggtggcaggcgtggcaagtgtagccgatgggaaaacgcggtccaaccgcaaccggcaattacacccgcgtgggtgcgtccagcagtgtagccgatgggaaaacgcggtccaaccgcaactggagcctgaaaccccgtctgaaaccagccagtgtagccgatgggaaaacgcggtccaaccgcaactgggccgctcgttgtcaatgacccatttgacagtgtagccgatgggaaaacgcggtccaaccgcaacaggacgtaggggtgcacgttcacgtgcttgagtgtagccgatgggaaaacgcggtccaaccgcaacgctgctggctgtactgggtcttcatggacgagtgtagccgatgggaaaacgcggtccaaccgcaacgaagtcgttcttgaggcgttggcgaatggcagtgtagccgatgggaaaacgcggtccaaccgcaacgtggccattgggagcgtcggccacattcacagtgtagccgatgggaaaacgcggtccaaccgcaacagccccgtgtagggccgcactgcggcctccagtgtagccgatgggaaaacgcggtccaaccgcaacacgatgcgccgcccccgcccgaagagagtgtagccgatgggaaaacgcggtccaaccgcaaccatccggacgagtcccataacgttgcagggagtgtagccgatgggaaaacgcggtccaaccgcaactacggcgacgcgagcgaggcgcagaaggatagtgtagccgatgggaaaacgcggtccaaccgcaaccgggctggaagccagccccgcgcgctccgaagtgtagccgatgggaaaacgcggtccaaccgcaacgcgccaagcgcgtcctgatcgacggcatctagtgtagccgatgggaaaacgcggtccaaccgcaaccgaaaatggatggcccaattcaaacaatcgagtgtagccgatgggaaaacgcggtccaaccgcaacgccgccgggcgtgctgccgccgatcccggtagtgtagccgatgggaaaacgcggtccaaccgcaacagccaagggctggcccacggcctcatagtagtgtagccgatgggaaaacgcggtccaaccgcaacgaccgcttcggcgttgtcggccagcgtctcagtgtagccgatgggaaaacgcggtccaaccgcaacggcctgaagaagccggacgccgagcggctgagtgtagccgatgggaaaacgcggtccaaccgcaacgaactggcggagtccctgtttggcgagggcagtgtagccgatgggaaaacgcggtccaaccgcaacgtgatcgtgctcgatctcgtcgtggtcatgagtgtagccgatgggaaaacgcggtccaaccgcaacgaacggttgaagctggagtatgaccacaccagtgtagccgatgggaaaacgcggtccaaccgcaaccacgccggtcgccttcagctacttcgcgcgagtgtagccgatgggaaaacgcggtccaaccgcaacttgggagaacttgtccttgagttcgagggaagtgtagccgatgggaaaacgcggtccaaccgcaacgccgccggtcacgatgcggtgctggtggatagtgtagccgatgggaaaacgcggtccaaccgcaacgacctgctcgccctcgaccgcgctgaagaaagtgtagccgatgggaaaacgcggtccaaccgcaacgtggcggaggcgagggcggcgagcgcgtcaagtgtagccgatgggaaaacgcggtccaaccgcaactccgcctggatcgccgccagcaccgccaagagtgtagccgatgggaaaacgcggtccaaccgcaactgcacacccactacgtcgatgccaagcacaagtgtagccgatgggaaaacgcggtccaaccgcaaccgtaaccggggctgacccgcgccggcttccagtgtagccgatgggaaaacgcggtccaaccgcaaccgcggtgccgcacacgccgggcatccccgtagtgtagccgatgggaaaacgcggtccaaccgcaacaacccggaaggccccagacggggcgaccggagtgtagccgatgggaaaacgcggtccaaccgcaacaccagtcaattccttgcgttcgatgaacatagtgtagccgatgggaaaacgcggtccaaccgcaacgcgagcgcgtcgatcccgaggatgcgggtgagtgtagccgatgggaaaacgcggtccaaccgcaacggcctctccgagcgctcggtcacctcggccagtgtagccgatgggaaaacgcggtccagccgcaacatggtggcgtcagttgagcgataggagagccgagacgaggtgaacagcggccaagaaggtgccggcgagcttgtcggagcgggttgtgatggctcggaagctcttcaacttgttgacgaatcgctggacgaggttgcgttcccgatacaaggcaaaatcggtgtcacggggcgtcaaccgattcgccttggaggggataccggggtgatgcctcgcgcctccaaggcgacgatcatggcgtcaccgtcatagaccttgtcggcgatgaaggcttggggctcgacccgttcgagcaagggagcggcttggctgaaatcggaaacccggcgcggttcacccagccgggtgtctcatttcccggccgcggtacacttggacggacccggtccagaagctccacagagaagctccacagcggcctcggcgacgtcaccggggcggatggaggttatgcatcgcttggcctgttcgacacacaggctcagcccacagccggcgcacgtggtgtcccggtaaaagatcgcgtgcccgccgccgcgtggaaaccagacgcccggcagattgcggctgctgaacacggcaacgcaccgtgttccaacggatgcggcaaggtgcatcggcccgctgtcgtgtcccaggaaaagccgcgagcgctgcaacacggcggcgctctcccgaggtgacaggcggccgcacaggttgacggtcaagcccggccaatgcgccgcgatggcatcggatcgatcaacctcgttcctcgctccaatgattgcaagtccgagagaggggaatcgccgaccgatttccccgagaaccactttccagttctcgtcgccgtaatcgttgggctgccatttcgtcccgatgctgaacgcaatgaaagggcgatccattcccaacggcgacaacgcttcgaccgccgcccgatgctcgctgtccagaagccgcagggaccaggaggtttcgtctccgatccgaccgtcccccaattcgctcaagccatcgacgagatgctccgtgatcgaaggccagagcctcgtaacggggtcgcgtcgtggggtggacggcatcccgaggggaacgccgatcagacgccggatgccgcacaggcggaagaacgcggcgtcacgaagcacctgcgaccgccggcgttgatcgaccaggtaaatgagaacgtcggggcgccatgcccggatggatcgccagagcgaccagagagctttcgggtcccgggtctcgatgggatattcgatcgtgccgtggatgaaaccgcccggtttcagcagcgcttccgcgggcgccacgaagccgttgatcgggatgttggtcagcagccggcgctcggcctgtggaaaggccttctcgatcaaatgaaaacacggcaaggcgaccagcgtgtcccccagcgacccctgccggtagatcagaacacgccgcgccatggctgttgctccacgttcatgcggtcggaggtgcgcaagcgatgtgccgatcatgccggttttccctgatggctgtcccgcttcctgagcgcgtacgcgacggccgcgacgtaggattcggccatgctctcctgcgtccaatgcgtgatgacctgccgacaggcgttccgcatccgggcggccagctccggttccgtaaggatgcggccgatcgcgttcgcaagcgcctccgcgttgcgttgcggcaccacgaagccggtccggccgtcctgaaccaggccacccgccgcagctccgaccgcatcggtggcgatcaccggaagcccttgattgaacgcttcgttcacgacgagaccccaggtttccttcacatagtccaattcgacggacggaagcacgaagacgctggccatggcgtagtgggccaccgtccccgcccgatcgacgtagccggaaaagcgcacgcgcggcccgatgcccagcgagtccgccagtgtccgaagcgccggcaactcttcccccgtgccggcgatgacgagcacggcacggtcgttcgcggccgccacgtcggcaaaggcccggaccagatagggcagtcccttcacctcgttcagacggcccagatacaggacgaccgcctgatcgtcctcgatgccgagccggcgccggaggtgcgccacctcctccgcatggacggggcgccggtagaaggcgttgtccacggcctggcgcgcgacgaagatgcggtccggatcgactccctcgtcacgaaggaacgacgacacatgctccccgcaagcgacgatggcgtccgcgttccggtagatgtgccgtgtgatcgggtagaagaatcggtgagccggagtgcggaacttcatccacacttccgtccagaggatgaaggggcggccctgaaggcgtgccatggcgtaggtcacgggcagggcgaaccggccgttgatgcacttcacataggcgtcataccggcgcgccatcaggtgcagcggcagaagcggagcgatccgggtgttcgcgatcgaaaatcccttgaggtacttgtgattgatcgagccctgccaaagcccttgctctttctgccagtacttttcagtcccatcggaatagaacagaaagtcggtgtccatggtctgggcaatggcatggaacagcccgtcacgataggaggtgttgaagttggtaaccaggcacagcttcgtctgcgggtccgtgggagaggtcatcattcgactcctggccggcggtgtttccgaagttccggtgcatcgggttcccggcacgcctctgctgcgatgagggcgagggaaaacagaaaggcgatttgggcgaactggaagaccccatccgccctgggttcgaagaacaggagccccgccattccggacaggacccccaggcagccccggaccaccgcgcccaggaagggcgacggtgctccgtgcgcgacgcttccacccagccggcgcaggacgtgcagccacatccaggcgtacagaaccagggacggaaggccgaacatcaccgcctggttgatccaggtgttgtgggcatcggggtaaagccaaccggccagggccgggctccaataccggattcccgcgctggcgtcgccgaacagccaggtgaatccgtcgccgtccatcacgaacagagtggtctgccacaggccgatcctcgcggccgtcgtggaggtgtcgatcaccgcagcatcctgtcgagggagggcgccgtacagagtcacggcgaggatcgtcagcggcgtgaggaggagggcgacgcggtgacggctgcgcccccatggaccgatcgcgatcagcaatccgacgccgcaccacaggagcccgcccttgctgaacgaaaccaccaaggcggcgaaaaggacgatgcagaagatcgacaggagaattccatgggcataccgccgccgccgcaacttccagacggcgaaggtcgcgctcaggatcacgcagggaaccagcgcggcggcgaaattgttcggggtgctgtacagcccaagcgcgatcgtggtcaggtagctgccatcgaaatccgccttccaggcgttgttctccagagaggggaacagatagaaactgccggtctcgtattgcagtatgccgagggcggccacggccaccgaggtgcccaggtacaggaagatgacgctggacagttggcgctctccgcggacgcaggactgcatcatgatgaagacgagcgcgcctggaagcagattcttcaacttgccgaccgtgtcaccggaggcgcgcaggccatagaccatgatgacggcgaacaggcaccacgccagatacaggaacaggggcggcatcctgttccacccccggcgcagaatgtcggcccttccgatggagagttcgttgcccagaacgaggccgaacaggcaccaggcaagggtttcgtagaaatagaccgacaccatgctcgtcgtgtcttgcccgaagagcacgacatccaccggcaggcacagcgtcagcacgacggacaccgtcatgtagggaaccgccagagggcgatccgctcccgcggtttccgttcgggctgcatctccgccggttcccggctggccgagcgcttccttccgcgcgaggtggatcatccgtccaccctcccgtccgcacgggccaatgccacgcggaagccttcgcgccgtccggacagaaggaacgcgatcaccagcaggccgcacgcataggtcaaggattttccgatgaccgccggcagttccccgcctccggcgaaacgctcgatgatgacgccgagggccatcgccgcggcgctcagcagggccagccgcgcaaacctgaaattgacccggtggacgcgctgcgacaagccgcagagcacggccgtgaagaccagcgtggcggccgccttggcaccggctccgccgatcatgcccagcgccggcacgagcagcaccgacagcaccagcgcgccggtcaggccggccgcgctggcgatcaggttcaggtgcgtgaagccgggcttcagcaggccgacattcaacgggtagctcatgccgaccgccaccacgccggccagcagcagaagcaggaccccgggcgcgtaggggatctccggtgcgaaccacccgagcaggagcggcgcgctgaaccagacgatgcccgccgccagcagcagcgccgtcagcatgagaaaggccaccgtcccgaaaaagcggtcgccgccgtcgctgtcgttgaaatgacggaagcgttccatcgggaaccagatcatgaagggggtggtcactccctgcacgacaatggtggccagcttgatgtggagcacatagccgccgacctccgcgatgctcgcatgccccgccagcagataacggtcgcaattctccagcacctgtcccatcaggccggtgagcaggatgaagacgccgtaggtccgggcgtccgcatggcggtccggccgccagcgtggacgcgggcgaagcgcggcgatgagcgccagcgccagcgccagcacgagcgccagacgaacgccgagcagcgtttcgaccggtgtgcggcccgccggcgagagcatggccatgacggccaggacgatcaggaacgacacggaccgcccggcctgcccgacgctgtaaacggcca

SEQ ID NO: 3468 - DNA, 23228 bp, synthetic construct
  misc_feature 1..23228: note = Synthetic
  source 1..23228: mol_type = other DNA
  variation 14797..15249: note = note, n is a, c, g, or t
acagcatggccacgtttgacgatccgttcgattcctcgcgcacgctgacccgccgcggctgctcctgcggccgtcacgcgtcacaggcggaccacgacgcggcggcggccggcgaggaggcgcggctgacccgcgtggtggaaggggcggtcatgcgcgccctcttccccaacgacgcgacgcggcgcgccttcctgcgcgcggtcggcacctcgacggccgccgcggcggtcgcctcggtgctgccgctgggcctggtgacggaagccttcgccgccaccgggccgctggagaagaccgacctgaaggtgggcttcatccccatcacctgcgccacgccgatcatcatggcccaccccatgggcttctacgccaagcagaagctgaacgtggaggtggtgaagacggcgggctgggcggtgatccgcgacaagacgctgaacgccgaatacgacgccgcccacatgctgtcgccgatgccgctggcgatcaccctgggggccggctccaatcccatcccctacaccatgccggcggtggagaacgtcaacggccaggccatcaccctggccatgaagcacaaggaccggcgcgatcccaaggactggaagggcttcaagttcgccgtcccgttcgactactccatgcacaactacctgctgcgctattatctggcggaagccgggctcgaccccgacaccgatgtccagatccgcgccgtgccgccgcccgagatggtcgccaatctgcgcgccgacaacctcgacggcttcctggcgcccgacccggtgaaccagcgcgcggtgtacgacggcgtcggcttcatccacaccctgtccaaggaaatctgggaccgtcacccctgctgcgccttcgcggcgtcggaaaagttcgtgacggagatgcccaacacctacgccgccctgctgcgggcgatcatggaatccaccgcctacgccacccggccggagaaccgcaaggagatcgccgccgccatcgcccccgccaactacctgaaccagccggtgacggtggtggagcaggtgctgaccggcaccttcgccgacgggctgggcaacgtgaagcgggtgcccgaccgcatcgacttcgacccgttcccgtgggagtccttcgcggtgtggatcctcacgcagatgaagcgctggggccagatcaagggcgacgtggactacgccggggtggcgcgcaaggtcttcctcgccaccgacgccgcccgcctgatgcaggaggccgggctgaccccgccgcaggccacgagcaagagcttctccgtcatgggcaagccgttcgacccggccgacccggagggctacatcgcctccttcgccatcaagcgcacctgacgggagggagtgatcatgaccggttccctcaccctgcgcgccgggcttctctcgtgcatcctgctgaccgccttcctggtggtctggcacctggcgacccgcggcgccggggtcgccgtcgagatggacccggaatacgccgcgctgatgggcgccaccgccacccagggcgtctcggccatgccgggcccgctggaggtcggcgccaccctgtggcggcacctgcgcgaccccttctacgtcaacggcaccaacgacatgggggtgggcatccagatcgcctactcgatcgcccgggtcggcatcggctatctgctggcggtggcggtggcggtgcccgtcggcttcctcatcggcatgtcgccgctgatgtcgcgggcactggaccccttcatccaggtgatgaagcccatctcgccgctcgcctggatgccgctcgccctctacaccatcaaggacagcgggctgtcggccatcttcgtcatcttcatctgctccctgtggccgatgctggtgaacaccgccttcggcgtggcgagcgtgcgcaaggagtggctgaacgtagcccgcacgctggaggtcgggccgctgcgccgcgccttcctggtgatcctgccggccgcggcccccaccatcctcacgggcatgcgcatttccatcggcatcgcatggctggtgatcgtcgccgccgagatgctcgtgggcggcaccggcatcggctacttcgtgtggaacgagtggaacaacctgtccatcaccaacgtgatcaccgcgatcctggtgatcggcgtgatcgggatgatcctcgaccagatgctggcgcgccttgcccgcctcgtgaccttcccggagtgacccgatgaccacaccacgcttcatctccatggaaggcatcgcgcggcgctacccggcgccgggcggcggccggaccaccatcttcgaggacctctggctgccggtgcagcgcggtgagttcgtctgcgtcatcggccattccggctgcggcaagaccacggtgctgaacatcctcgccggcctcgacagccccagcgagggcacggtgatcgtcgacgggcaggccatctccgggcccagcctggaccgcgccgtcatcttccagggccacgccctgctgccgtggcgcagcgtgctgggcaacgtcaccttcgccgtgcgctcgcgctggccggacaagccgcgcgagtgggtggaggcgcaggcccgccgcttcatcgccctggtcggcctggccggggccgagcgcaagcgcccggcggagctgtcgggcggtatgaagcagcgcgtcggcatcgcccgcgccctgtccatcgagcccaagatcctgctgatggacgagccgttctcggccctggacgcgctgacccgcggcaccctgcaggacgaggtgcggcgcatctgcctggacaccggccagaccaccttcatgatcacccacgacgtggacgaggccatgtacctggccgaccgcatcgtgctgatgaccaacggccccggcgcctgcatcgccgagatcgtcgagaacccgctgccgcgcgagcgcgaccgcaccgacctgcaccgccacccccactactacaccctgcgcaaccacctgctggacttcctggtgacgcgcagccgcaccttccgcgactcccccccgcccggctacgaccggcgccacccgcccgtcgtccgccccggcgccgcaccgcagccggtgccggtgcccgagaccggcgacaccctccccctcgcccagtttgccaaccggagacatccatgaagcgcgaagacctgaccgagaagatcctcgacatgaagcgggagaagggcctgacctgggccgccatcgccgagaccatcggcggctattccccgatcttcatcaccgccgcgctgatgggccagatgaagctgccgatgccgcaggcgcagaaggcggccgccctgttcggcctgaccgaggcggagacgaagctgctgaacgaggtgccctaccgcggctcgctgccgacgctgccgcccaccgacccgctgatctaccgcctgtacgaggtggtccaggtctacggcaccaccctgaaggagctgatccaggagcagtacggcgacggcatcatgtccgccatcgacttcgacatggagatggagcgccagcccaaccccaagggcgaccgggtgaagctgacgctgaccggcaagttcctgccctacaagtactacggcgccgaggacggcctgcccgactacggctacggcaatccctgatgcccgatccgggggccgggccgtccggtcccgcccccgcgccttcccaccgcgagacccgttccccgagaaaggtccggccccatggcccaacgcccgcccctgccgccgttcacggcggagaccgccgcgcagaaggtccgcatggcggaagacgcctggaacacccgcgatccgcagcgggtggccctggcctacaccgaggacagccgctggcgcaaccggtcggagttcttcaccggccgccccgccatcgtcgccttcctgacccgcaaatgggaaaaggagcacgactaccgcctgatcaaggagctgtgggcgtgcctggacaaccgcatcgccgtgcggttctgctatgaatggcacgacgccgccgggcagtggttccgcgcccacggcaacgagcagtgggagttcgacgccgacggtttgatgcgccggcgcgaggccagcatcaacgacgtgcccatcgccgccgccgaccgcctgttcctgtgggagcccggcccgcgtcccgccgaccatcccggcctgagcgagctgggcctttgagcgccgccgccggggacccgcgccggcgctgcacgcaactgggcgtgcagctcggcgccctggcgacgacgctgatcgacgaggagcgcgtgctggaggcgaccgacgcccgcaaggcgctgctcgccgacttcgccgatttccgggcgccgctgggcctggccatgggccatctgcgcggcttcctgtccaccggcgaccccgccctgcgccgggccttcgacgccgcctacggcaaggccgcggcggcgcgccggcgcatcgccgacagcgcgccgctgctgaccgccacccaggcggtggtggccgacaccatcgcccgcctggcggaggagctggacggcgtggtcgccaccctgctggccgcggagccgccgcgccgcagcgtcgccaccgccgccggggccgccggcgaggcgtgcgcccgcctgtcggaccggctgaccggtgcgctcaccgccatgctcgaccgcgaacgcaccctgccggccacgccggagcgcaaggagctgctggcccagatcgtcgacgtgcgggggccggtgggcatcgcgtcgtcgcacctgcgcgactatctgctggacggcgaccccgccggccggcgcctgttcgcccgcttccacggccgcgccgccgaggccatggcgcggctggaggccatgcagcccctgatggtggcggaacagggcaccgccttcgccgaggtgcgggccgcctggacggcgtacggcccgggcgcgcgcgacgccatggccgcccgcgacgccgccgacgccgccgcggcaacctccggtgccggcggtgctgccgaccggctgacggtggcggcgggcatcctcgccgtggcggtgccggcgctggcgttcgccctgcacggcggcgccccggcggcggcggccctgtgccagctcgccgggctggcgggtctggccgtctggtaccggctgcggcgcggccggccgctggccgcggccaccgcggccctggacgccctggccggcggcggggagccgccgcccggtgccgttcccggccggctcggctggtcggtggagcggctgcggctgaccgtggccgacctgtcgggcgagctgtcggccaccgtcgacgaacaccgccaccaggtggtggagcggcgccaggcgatgctgcgcctcagcgacggcttttccaccggcatggccgacgcggtggcggcggtggaggccgatgtccgcaccctgttcgaccaggtgggggccatccgcaccctggccgccgccatcgaggcggaggcgggcgccatcgacgccgccagcggcaccgccaccgccaacctgtcggccatcaccgccgccgtccacgagacgtcggtcaccgccaccgagatccgccggcaggtggaccggtcgctggccatccagcgcaccgcggcggtgtcggtggaggccgccgccggcatcagccgcgacctggaggagtccaccggccgcatcgacgccgtggtcggcatgatcgaaaaggtggcgaccgagatccaggtgctggccctgaacgccaccatcgaggcggcccgcgccggcgaggccgggcgcggcttctccgtggtggccggggaggtcaagacgctggccacccggaccatgcagatgaccggcgacatccgcgatctggtggcggcggtccagggaggctccgcgcgcaccgccgcggtggtcgccgacttccgccgcgtcgtcgacgaggccgacgcggtcaccggcgtgatcggcaccgcgacggcgcagcaggccgatgccgccgccgacatcgcccgcgccaccgccggggccaacgaccaggtgggcggcgtggttgccgccatccgcaccttccgcaccggcgtcgagcgctcgcgggctgccgccggcctgctggaggatctggccgccgggctggccggacgggcccgcgacctgcacgaccggtccgaccgcttcgtcgcgggggtgcgggcgagctgaccgccacacccattgacgatttcaatgcaactcattgaaaggatcggcttccacaatgccgcagtgcactccatagtcccggccatcctgagacacccctggagagaccgggaatggacgccattctgcccgccgcgaccctggatacactgctgtccgcccccatcctgttcttcatgctgggggctgccatcgctctggcggggtcgcacattcccattcccgaggggttcggcaaggcgctggccgcctatctgctggtggcgatcggcctgaagggcggcgtggcgctggccggggccgacgcggcgtcggtgatgccggtgctgctgacggcggcggcgctcagcctgaccatgccggttctggcgttcggcctgctgcgctcggccgtgcggctggaccgggtgaacgcggcggcggtggcggcccattacggatcggtcagcctggtcaccttcgtcgccgccaccaagctgctggaaagccaggggatcggcttcggcggccacatggtggcggcgctggcggtgatggaggcgccggccatcgtcaccgggctggtgctggccggggcggccggcggcgcggcggcgctgggcgcgggggccggcggcggcacggtcaccgtgtcggggggtggcttcggcggcggtttcgggggcggccgggtgcgcgaggcggtgcgcgaggcggcgctgaacggctcggtcctgctgctggccggcgccatcctggtgggtctggtgatcggcgcgccggggctggagcggatgcacggcctgttcgtggcgccgtgggacggggtgctctgcctgttcctgctggagatgggctacctggcggcgtcgcggctgcgcagcgccctggcgctgggtccccggctgctggccttcggcatcggcatgccgctgctgggcggcctgatcgggctggccgccgccatggcgctggggctgggcgtgggcgacaccgccctgctggcgacgctgtgcggcagcgcctcctacatcgcggtgccggcggccctgcgccacgccctgcccggtgccgatcccggcgtgtcgctgccgctggcgctgggcatcaccttccccttcaacatcctgctgggcgtgccgctgtacctgatgctcgcgcgggcggtggcgggcgggtaagctggcccggggaggggccatgccgacaccgttgccgccgttcgacctcgatctcctgcgcaccttcgtcaccatcgccgacagcggcggcttcacccgggccgccgagcggctggggcgcacccagtccaccatcagcctgcagatcaaacggctggaggacgggctggggcggcgcctgttcgagcgcaccggccgcaccctggccctgacgccggagggggagctgctgctggcctacgcccggcgcctgctggcgaccgccggcgaggccatggcccgcctgatggagcccgacgtgggcggggtggtgcggctgggcacgccggaggatttcgccaccgtccacctgcccgacgtgctgtggcggttcgcccgcgcccacccgcaggtgcgcctggaggtcaactgcgacttcaccgccaacctgctggacggcttctcccggggggaatacgacctggtgctgtgcaagcgcgagcctcagggggcgtcgggcggcatcggcgtgtggcgggaaccgctggtgtgggccgccacggaacggctgctggacgaggattcgggcaacggcccggtgccgctggtgctggccccctaccccgacatctaccgcaagcgggcgctggaggcgctggaggcgcgcgggctgccgtggcgcatcgtctacaccagccccagcctggcgggggttcaggcggcggtgcgcgccgggctgggcatcaccatcctgcccaaggcgatgctggccgccgggttccacatcgtgggggaggagcgcggcctgcccgccctggccgacacggaggtggcgctctaccgcgccgccggcgccctgcccaaggcggcggagctgctggccgagcacatcgtgcgctcgctggagagcccgcgcaccgacgccgcggcgggctgagcgcccgccccggcccccatcggttttcccaatggcggccattggccggcgcccgttgcggcggcggcggcgcgacgccacatggcgggtcgccccgaacgcccgtcgccgttccgtcagcggccggcggcgagtccggcgcccgagtgcggcacgacggcggcggagcggcgggggtgacccagtgcccccgccgcgcgggcgtccgcccgttcctcctgcccggccaccagagtcaggtagcgcaggcagctcacccgcaggaaggaggcgaggttgggcacgtcgccgcggtactccacgatctcgtcatagagcttggcgatgagctggttggtggtcatgccgtcgcgcgccgcgatctcgcccagcacgtcccagaacagggcttccaggcggatgctggtgaccaccccgtggatgcgcagcgagcgcgagcggcattcatagagggccggatcggccttgacgtagatttcgcacatggcgtccaccctccccgctcgcgcccgccgtcggcggctgatcgtccggagtgcggattatagctcgatccgcgttcccagcacagccaggaactggccgagccacgcggggtgggccggccaggccggggcggtgaccagggtgccgtcggtgacggcgccgtcgatggggatgtcggcgtaggtgccgccggacatctccacgtccggccggcaggcgggataggcggacacgcgccgccccttggtcaccccggcggcggccaggagctgggctccgtggcacaccgcggcgatgggcttgccggcggcgtcgaaggcgcggacgagggcgatcacccgctcgtccaggcgcaggtattccggcgcgcggccgccggggatgagcagggcgtcgtaatcctcggcccgcgcggtctcgaagtcggcgttgagggtgaagttgtgcccgcgcttttcggaataggtctggtccccttcgaaatcgtggatggcggtggcgatgcgctcgcccgcccgcttgccggggcacacggcgtcgacgcggtggccgacggccagcagcgtctggaacggcaccatggtctcgtagtcctcggcgaagtcgccggccagcagcaggatcctcttggcgcccatggtcgtctctccctggtttcggttgcgcggcccgcatggtgccaccaccgtccggggcgatggtaacagcccgctactatggggctgattttccgcggcgcggacggtccgcgccccctcccgaagaacctgcggcaccacgctttttccgcttgcacggccgcccggaaggccctatttatccggtcccgcgcggcacccagagccgccggcgagtttcggggccatagctcagctgggagagcgctacaatggcattgtagaggtcaggagttcgatcctccttggctccaccaaaacagacgaaagcccggctcagcgatgagccgggccttttgctttgccgccggccgggcgcaacacgcgggccggttcaggggcgtccggacggacaccaacaaaaaggggcaggccgtagcctgccccgcatcttgtgcccgccgaagcaggcttgttaacggccagaccccggtttcccatcggctaaacaggtatcggttccggcaggggaaagattagcagaactcttcacgcggtcaagcgtcgtgatacgctcccccgtggatggagttcggcgccggctttgcgtccgaacacgtgtgcactctttctcgtggagcggaccgaccccatgcagccctaccgcctgtcgctcgacctcggcaccaactcgctcggctggtgcgttctcgatctggatcatgacggacagccccggggggtgcggcgcctcggcgtgcgcatcttcaccgacgggcgcaacccgcaggacaaaagctccctggcggtggcgcggcggctggcgcggcagatgcggcggcggcgcgaccgcacggtggtgcggcgcacccggctgatggcggcgctgatccgcttcggcctgatgccggccgaccgcgccgcgcgcaaggcgctggaacggctggacccgctggcgctgcgcgcccgcggcgtggacgagcggctggacccccacgagatcggccgggcgctgttccacatcaaccggcgccgcggcttcaagtcggtgcgcggcaccggcgacccggaggaggcgggcaagatccgtcccgccatcggccggctggaggcgcgcatggcggacaccggcgcgccgacgctcggcgccttcttcgcctggctgcgcgccaacggccacagcgtgcgcgcccgcccggtgggccgcggcgcccgggccgagttccccttctaccccgcccgccccatgctggaggcggagttcgacgcgctgtgggcggcccaggcgccccaccaccccggcctgctgaccgaggaggctcgcgccacgctgcgccggcgcatcttccaccagcgaccgctgaagccgccgccggtcggcaaatgctccctgatccccgaggatcggcgggcgccgcgcgccctgccgtcggcgcagcgcttccggctgctgagcgagctggccaacctcaggatcatcgccccggaccgcagcgagcggccgctcagcatggaggagcgcgacgccatcctgcgcgccgcgcgcgccaagcccgcgaagaaggccatcagcttcaaggacatccgcaaggtgctgaagctcggctcggaggtggagttctcccacgaatcggcgcgccggccggagctggcgaccgacgagacggcggcggtgctgtcggacaagcggcgcttcggcccccgctgggcccgcctgaccccggcggagcaggacgagatcgtcgagcgcctgctgtccgagcccgaggagggcgcgctgatcgactggctgatcgcccgcccggggctggagccggaggcggcggcccgcgtcgccgatgcgccgctgcccgatttccacatgagcatcggccggcgggcgctggccgccctgctgccggtgatggagacgcacgccgtcgacgggcggccgatccgctatgacgaggcggtgccggtggccttccccggcctgcaccattccgaccgccgcccgggcgggcgcctgaacgccctgccctattacggcgcggtgctggaccgccacgtggcctttggcaccggcgaccccaaggacccggtggaaaagcgcctgggccgtctcgccaaccccacggtgcacatcgggctgaaccaggtgcgcacggtggtcaacgccctgatcgaccgctacggccgcccgcaggagatcgtggtggagctggcccgccccctgaagcagaccgccgaggcccgccgcaaggcggacaaggagcaggccgacaaccagaagaagaacgaggcgcgcaaggagctgctgcgccgcgccggcgcctccgtcaacggccgcaacctgatgaagctgcgcctgtgggaggagcagggaagcggcgtcgcccgccgctgcccctacaccggccggaccatcgggctggagctgctgctgtcggaaaaggtggacatcgaccacatcctgcccttctcgcagagcctggacgacagcgccgccaacaaggtggtgtgcctgacggaggccaaccgggaaaagcgcaaccgcaccccctatgatgccttccaccacgatccggcgcgctgggcggtgattctcggctgcgtggaggacctgccgcccaacaagcgctggcgtttcgccgccgacgccatgcagcggtgggacgccgacggcggcttcctggcccgccagatcaccgacacgcagtatctggcgcggctggcgcgcgagtacctgcgccacgtctgccaccccgaccgggtgcgcgtgtcgccgggacggctgacggcgctgctgcgccggcgctggggcatcgattcgatcctgcgcgaccacaaccgggacggcggcgaggcgccggcggacggcgcggtgatcaagaaccgcaacaaccacctgcaccatgctttggacgccgcggtgatcggctgcatcgaccagggcctggtgcagcgggtggcgcaggcggcgcagcgcgcggaggaccaggggctggaccggctgatggacgatctcgacccgccctggccgggcttccgcgacgaactggcggcgcgcgtgcgcgccgtcaccgtctcccacaagcccgaacacggcaccggcggccggctgcacgaggacaccgcctacggcccgaccaccgaatcggaacgggccgaggggttcaatctcgtcttccgcaagccgctggacggcctgagcgagcgggaggtggcgcgcatccgcgacccgctgctgcgccgggcgatgcaggaccgcgtcgcctttcacagggccggccccgagcgtcttgacgtcaagcaggcggtgatccgggcggccgaggatctggcggcgacggagccgtgggtgggggtgcggcacgtccgcctgctgaccaaggaggcggcgcccatctggctggccgggccggacggcgaaccctacaaggggctgatcgccggcgacgtgcatcacatcgacgtcgtggccctgcccgatgggcgctgggccgggcgcgccgtgacgctgttcgatgcacgacgcaccgccctgcccgacggacgcgccgccccctgtgttcccgcgccgggcgagcgcttcgtcatgcgcctgcacaagggggatctgatgaagctggagcacgacgggcgcgagcgcatcatgcgcgtggcccgtctggagcccgccaacaaccgcctgcgcatggccgagcacagcgaggccggtgaactggacaagcgccacgccgatcccgacgacccgttccgctggctgatcatatcgttcgacgtgctgcgccggcgccgggcgcggcgggtgacggcggacccgctgggccgggtgcgcgaccccggattccccaagtgggcggtggagccggggccggacggggaggcggtggcgtgaccggccgcatcgtcgagatcgacggggacgggcgccacctgtccctgtcccgcggtttcctggtggtggagagcggcgggcgggagatcggccgggtgccgctggacgacatcgccgcggtggtggcgaacgcccacggcctcataccgtcggcatctgaatgatgccgacggtatgaccctatcgatcaatgcaacgcattgatctgtcgggtttcacggccggaaaccaatggaacggatctttttccggccgtatcacctacaccaacaacgtcctgctggccctggtcgagcggggagccgtggtggtgctgtgcggccccaaccactcgcccgccgccttcctgtggccggtggacggccaccacgtgcaggcccggcgcatgcgcgcgcaactgaacgtgccggcaccgctggaaaagcggctgtggcagacactggtgcgcgccaagatccgccagcaaggcgcggtgctggaggcgcgcggcgtgacgcccggcgccttcgagtcgctggcgcgccaggtgcgctccggcgaccccggcaacgtcgaggcgcaggccgcccgccgctattggccgctgctgttcggcgaggagttccggcgcgaccccgaggccggcgggatgaacgggctgctgaactacggctacgccatcctgcgctccaccgtcgcgcgcggcgtcatgggggcggggctgcacgccacgcccggcgtgttccaccacaaccggtcgaaccccctgtgcctggtggacgacctgatggagccgttccgccccttcgtggatctcgcggtggcgcggctggccgacgccggccacatggcggtcactccgcagacgaagcgtttcctggccctggtgccgtccctcgacctgcccaccgcggagggcacgacgccgctttccacggtggtgatgcgcgcggccacgtcgctggcgcaatcctacgaatcgggcacggcgctgctcgatgtgcccggcggcgaccccggccgggcgtgggcgcccatgccgctggaatggccggcacccccggagccctgaaacggcctgatcggaggcgcccatgctgagcggataccggatcatgtggatgatggtgctgttcgacctccccgtcctgaccaaacgcgaacgcaaggccgcgacggcgttccgcatgttcctgctggatcagggattcgagatgtcgcagttctccgtctacctgcgccactgcgtcggccgggagcagacggagaccctcagccgccgaatcgaaaaggcggtgcccgccaccggcaaggtccacatcgtgctgatcacggacaaacagtatgaaaccatcgtgtgcttcgacggccgaatccgccagccttcccggaaaaatccggagcaatacgtcctgttctgaccccgccacgccggaatccgcgcaaaaaaatggcgggataaggcttatttctcagagccttatcccgtcagggagtgtagccgatgggaaaccggggtccagccgcaacacaatgcctattgggtgcagggcctgtccgagtgtagccgatgggaaaccggggtccagnnnnnnnnnnnnnnnnnnnnnnnnnnnnnnnnnnnnnnnnnnnnnnnnnnnnnnnnnnnnnnnnnnnnnnnnnnnnnnnnnnnnnnnnnnnnnnnnnnnnnnnnnnnnnnnnnnnnnnnnnnnnnnnnnnnnnnnnnnnnnnnnnnnnnnnnnnnnnnnnnnnnnnnnnnnnnnnnnnnnnnnnnnnnnnnnnnnnnnnnnnnnnnnnnnnnnnnnnnnnnnnnnnnnnnnnnnnnnnnnnnnnnnnnnnnnnnnnnnnnnnnnnnnnnnnnnnnnnnnnnnnnnnnnnnnnnnnnnnnnnnnnnnnnnnnnnnnnnnnnnnnnnnnnnnnnnnnnnnnnnnnnnnnnnnnnnnnnnnnnnnnnnnnnnnnnnnnnnnnnnnnnnnnnnnnnnnnnnnnnnnnnnnnnnnnnnnnnnnnnnnnnnnnnnnnnnnnnnnnnnnnnnnnnnnnnnagtgtagccgatgggaaaccggggtccagccgcaacctcaagcacctcccgcgtcgggcgatgcggagtgtagccaatgggaaaccggggtccagccgcaacatggcggaggtgaagagggacgccctgatcagtgtagccgatgggaaaccggggtccagccgcaaccggatcggcacctggaaccaatgcgggatgagtgtagccgatgggaaaccgaggttcaggtgcgacccgcatcatgccggcagggcgttgccgcgcgcattccttaacccactcccccgcaccgggcccccacccgaccctcccccatcttcgacgggggagggctctttcggtccttgccggtcgcagggaaacaacccccgccctacgccgcgaacaggcgcagggcgcgggggcggatggcgacgggggtgccgggggtcaggcgcagggcgtcggcctcggcgcgggacacctcggcctccagaacggcgccgtcggggcggcgggacagttccacgcgcacctggccgccgcgcgccgtgagatggcgcaccaccgccaaagccgccgcctcgggggcgcgggactcgggcagcagttccagctcgtgggcgcgcacataggcgaccgcggcggccgacgcgccggcaggcgcaggggtgtccgccgccgccggggcgacgcgggccaagggggcgctccagccgcccgccgccacctcgcggccgtcgatgcggcagtccagcttgttggcgtggcccaggaactcgtacacgaagggcgaggcgggggcgtcgtggatctccaccggggtgcccacctgctcgatccggccgtggttcatcaccaccacacggtcggccacctccatggcctcctcctggtcgtgggtgacgaagacgctggtcatgtggatctcgtcgtgcaggtcgcgcagccagcggcgcagctccttgcgcacctgcgcgtccagcgccccgaagggctcgtccagcagcagcaccgccggttcgatggccagggcgcgggccaatgccacccgctggcgctggccgccggacaattgcgccgggtaccgcccggcgagatggccgagctgcaccagctccaacagctccttcacccgggcggcgatggccgccttgtcggggcggcggccgcgcggcagaaccgacaggccgaaggccacgttgtcggccaccgtcatgtggcggaacagggcgtagtgctggaacacgaagccgacccggcgctcgcgggcgctgaggtgcgtggtgtcggtgccgtcgaacaggatggtgccggcgtcggcgaactccagcccggcgatgagccgcagcagggtcgtcttgcccgagcccgaagggccgagcagcgccatcagctcgcccttctccacctccagcgacacgccgtccagcgcggtgaaggtgccgaaggtcttggtcagggagcggacggtgatgctcatgcgcggtctccggcaagggacaggcgggtggacgggacgggggcggcgtccagcgcctcccccacgtggccgtggcgttccagcagcagcttggcgcccagcgtcagcagggccagcaccgccagggtcgaggcggcggcgaaggcgcccaccgtgttgtaggagttgtagagaagctccacctgcaaaggcagcgtgttggtctggccgcgcacgttgcccgacaccacggacaccgcgccgaactcccccatcacccgggcgttgcagaggatggcgccgtacagcagcgcccatttgatgttgggcagcgtcacccgcacgaaggtctggaagcccgaggcgcccagcgtcagggccgcttcctcctcctcgctgccctgggcctgcatcagcgggatcagctcgcgcgcgacgaaggggcaggtgacgaacaggctgaccaggaagatcgcccacaccgtgaacatcacctgcacgcccgcctcctgcaaccacggaccgaacaggccctgggcgccgtagaggaagatgtacatgacgccggcgacgatgggcgacaccgagaacgggatctcgatcagcgtcagcagaagccgcttgccggggaacgagaacttggcgatagcccaggcggcgcagatgccgaagaccacgttgatcggcaccaccaccaccgccgtcaggacggtcaggccgatggcgtgcagcgtctcgggttgggcgatggcgtcgaggaacgccccgatgccggagcccagcgccagcgccccgatcaccgcgatgggggcgagcaggaaaaccagcgtccccgtcaccgcgacggcgatgaggatgcggcgcaacagcgggccgtcgcccacgcgtccggcggcagccatggctcaggccctctccgaatggcgctgcacccagaactggatgctgttggtcaccagcagcatgacgaaggccgcccccagcatcaccgaggcgaccgcggcggcggcggggtagtcgaactcgtccaggcggatgtaggccagcagggcggtgatctccgtgcggaacggcaggttgccggcgatgaagacgatggccccgaactcccccaggctgcgcgcgaaggccagcgcgcagcccgccaggaaggccgggaagatcagcgggaagatgacgcgggcgaacacctgcaggtcggaggcgcccagcgactgcgccgcctcctccacctccggccgcaggtcctccagcaccggctggatggtgcgcaccacgaagggggcgctggtgaacgccatggccacggcgatgcccacgggggtgtaggccaccgagatgcccagcggcgccagaagccgcccgtaccagccggtctgcgcgaacagggccgtcagggcgacgccggccaccgccgtgggcagggcgaagggcagatccacaaccgcgtccagcagccgcttgccggggaagctgtagcgcaccagcacccaggccagcgtcaggccgaacacggcgttgaacagggtggcccaggcagccgccgtcagggtgacccggtaggtcgccacggcccgctgcgaggagacgatgcgccagtaatcggccgcctccaggcttgccgccttcaggatcagcgcgctcagcggcagcagcacgatcagcacgaggtagagcagcgtcaaccccatggtgagcgagaagcccggcaggacgtggcgtttcatcggcgcgttccggcagcgtcagcgggcgtcagcgggccacgaagaccgtgtcgaggcgcccgccctcggcgaaatggtccttttccacggcggcccagccgccgaagacctgctcgaccgtgaacaggcggacctccggaaagcggtcgcggtggcgttcgatcaccgccggatggtggatgcggttgtagaagcgggccaggatctcctgcgcctcctcctcgtacaggaaattcagatagctttccgccagcgcccgcgtgccgcggcggtcgaccacccggtccaccactgacaccgggaactccgccagcaggctgaccggcggcaccaccacctcgtacttgtcggcgccgaactggtcgcggatgttgttcacctccgcctcgaaggtgacgagcacgtcgccgatgccgcgctcggcaaaggtggtggtggcgccgcgcccgcccgtgtcgaacaccggcacgttggcgaagatgcgccgcaccagatcggccgccttgtcggcgtcgccgccgaacgcctccagcccgtaggccgtggccgccaggtaggtgtagcgcgcgttgcccgaggtcttggggttggggaagacgggctgcacgccctcgcgcgccagatcgtcccagttgcggatgttcttcggattgccggcgcgcaccaggaaggccggcagcgagtagtagggcgaggccgcgttgggcagccgctcctgccagttggccgccaccagcccgccgcggtcggccaggatctgcacgtcggtcacctggttgaaggtcaccacgtcggccgccagcccctccaggatggcgcgggcctggcgcgacgaccccgcgtgcgactggttcaccgtcacgtcccgcccggtctgcgccttgacgcgcgcctggaaggcggggttgagcgccgcgtacagctcgcgcgcgatgtcgtaggacacgttcagcagcgtgtccgcgtcgttggccgcggccggcgccgcaccggttaccgccagcatgaccgccacggcggccgatcggagcgtcttgcgcatggttgccgtatccttgatccgcaaaattacacatttagatggtgtttttctcagatccacattacggcgtgcgcaataccgcggtcaataacgaactcgcagccgcggaacaggtcggccggcccgggccggcgcgccgtggcgccggattggccatcaaaccgcccaacctttcgccttcgccgctgaaatcctgtgcagttccgtatcggcgccggccccggccggcggcgcggatgccaagggatccgcgctctgctgcattgcatcaagattggcacgcgccttgctagttatcaggcgaggccgacaatgacgtcggagacgctcctcgcaagatcccgtcaccgggaccgcgccgtggccggcttaaaggcgagccggcaagcagactgagacgcgccggaacacaagcggccccgtgccgcccgtcgcccgcgcgcatcgccctgtccttcgcgccgctttgcgggaggtgccaatgccctgtccctcgccctcgggtccgatccccgccgccggttccggtggccgcccggccgcatgcggtgcgccctcgccttccgcatcgacccgtcgcggtccgcgactccaatccgaggactccacccgatgaccaacgcttccgaccgttccgacacgcccgcccggcccgccgccggcgtctcgcgccgcgccctgctggccggcggcgcctacgccaccgccaccgccgcactgctgggcgccgcctaccgcgcgctgcccggcggcgcctgggccgccccgctggacacgccggagacgacgaccgccaagctgggcttcatcgccctgaccgacgcggcgccgctgatcatcgccaaggagaagggcttcttcgccaggcacggcatgcccgacgtggaggtgctgaagcaggcgtcctggggcaccacccgcgacaacatcgtgctggggtcggagggcaacggcatcgacggcgcccacatcctgacgcccatgccctatctgatctcggccggcgtggtgacccagaacaaccagcccacgcccatgtacatcctggcccgcctcaacctggacagccagtgcatctcggtggcgcaggagtacgccgacctgcgggtcggcctcgacaccgcgccgttcaggacggcgctggagaagaagaaggcgtcgggcaaggcgatcaaggcggccatgaccttccccggcggcacccacgacctgtggatccgctattggctggcggccggcggcatcgaccccgaccgcgacatcgaaacgatcgtggtgccgccggcgcagatggtcgccaacatgaaggtcggcaccatggactgcttctgcgtctgcgagccgtggaacgagcagctcaagaaccagaagatcggctacaccgccgtcaacaccggcgagctgtggaaccgccaccccgaaaaggcgctgggcatgcgcgccgcctgggtcgacaagcaccccaaggccgccaaggcgctgctgatggcggtgcaggaggcgcagatgtggtgcgacgacatggccaaccgcgacgaggtgtcggccatcgtgtccaggcgcaactggatcaacgcgccggtcgccgacatcgctgaccgcatgaagggccgcttcgactacggcaccggcaaggtggtggagagcagcccgcacatcatgaagtactggcgcgacttcgcctcctaccccttccgcagccatgacctgtggttcctgaccgagaacgtgcgctggggcaagttcagcgccgacaccgacttcgccgccctgatcgacaaggtcaaccgcgaggagctgtggcgcgacgccgccgcgaccctgggcgtgccggcggaccagatccccgcctccacctcgcgcgggaaggagacgttcttcgacggcaaggtcttcgatccggaggatcccgcggcctacctcgccagcctgtccatcacccggatcgcctgacgcggcgccatcgcaggagacacctcatgcagcacagcaccgccgtgaaggcgacccccgccccccgcgccgccgcgcccgtttccgccacccccgccgcggcctccgccgcccccgccgccgccccggccacggtcgtcgccctggccacccccggacggcgggccgccgcggcggccgccggcagcctgcgccgggggctgtccaacctggcgacctcggtcctgccgcccctgttcaccctggccgtcctggtggcggtgtgggaggtcgtctgctccgcccccggctccagcctgcccgccccgtcggcggtgctggtcaacagctgggacctgatcgtcgacccgttcttcgacaacggcggcatcgacaaggggttgttctggcatctgctggccagcctccagcgcgtcgccgtcggctacgccatcgctgcggtggccggcgtcgcgctgggcgtcctggtggggcagagcgtatgggccatgcgcggcctcgaccccatcttccaggtcctgcgcacggtgccgccgctggcctggctgcccctgtcgctggccgccttccgcgacggccagccctcggccatcttcgtgatcttcatcaccgcggtgtggccgatcatcatcaacacggcggtcggcgtgcgcaacatccccgacgactaccgcaacgtcgcccgcgtgctgcgcctcaacgcggtggaatacgtctacaccatcatgatcccgtcggccgccccctacatcttcaccggcctgcgcatcggcatcggcctgtcctggctggccatcgtcgcggcggagatgctgatcggcggcgtgggcatcggcttcttcatctgggatgcgtggaactcctccctcatcagcgacatcatcctggcgttgatttatgtcggggtggtcggcttcctgctcgaccgcgtcgtcgccaccgtcgcccggatcgtcacccgcggcaccgcgaacacctgaaggaccgccccatgaccaagagctatctgtccatcgaacaggtcgacaagagcttcgcccgcaccggctcgacgaccgaggtgctgcgcaaggtgtcgctgggggtggagaagggggagttcatctcaatcatcggccactccggctgcggcaagtcgaccctgctgaacatcgtcgccggcctgaccgacgccacctccggcgccgtgctgctggacggcgggctggtggactcccccggtcccgaccgggccgtggtgttccagaaccactcgctgctcccctggctgacggtgtacgagaacgtgcgcctggcggtgaacaaggtgttcggccgctcccggtcggcggcggagcggcacgagtggacgctgcgcaacctggagctggtgcagatgacccacgcgctggacaagcgcccgtcggagatctccggcggcatgaagcagcgcgtgggcatcgcccgcgccctggccatggagcccaaggtgctgctgctggacgagccgttcggggcgctggacgcgctgacccgcgcccacctgcaggaccaggtcatgcagatccacgccaccctgggcaacacggtgctgatgatcacccacgacgtggacgaggcggtgctgctgtccgaccgcatcgtgatgatgaccaacggcccggcggcgcgcatcggcgagatctgcgaggtccggctgccgcggccgcgccggcgggtggagctggtgtccgaccccacctacctgcgctgccgctcggcggtgctgaagttcctctacgaccgccaccgcctggtggaggcggcctgagaacggggggcgcagccatggacaacc

SEQ ID NO: 3469 - DNA, 22394 bp, synthetic construct
  misc_feature 1..22394: note = Synthetic
  source 1..22394: mol_type = other DNA
cagcgccgatggtactgcatcttaagatgtgggagagtaggtcgccgccaggtcaccacggcacaagttggccccgtcctcccgagctccgggttcgcactcttctcatcgtcatgccggtccgccccggacccacgccgcccacgcgttccggccggatgccggaccacggtcttcccgcggggtggagcagcccggtagctcgtcaggctcataacctgaaggtcgcaggttcaaatcctgcccccgcaaccaaatcagccagcaatcccaaggggttgctggctttcttgtttctgacccgtgtccgtcgcaaaaccatgtccgtgtgatgtccgcaatccgggtgtcgccggatgtcgcgtttgctccgcctcggagaacaccggaacaggcggaacaccgagaacacgggaacacgggaacacgggaacacgggaacacgggaacacggcttgggccaatgtcctgtgagggagtgactttcgaacctactcttatagctatgcatcatcctctcgcctgtcgccttatcgctatccctctccaaaggagggcggatttaccatgatataatcaaccgaatctgctaccaggaggtgctggcggctttcgggctatctgcggtaggagcagcgaaagccaacatcggaactcggcagtcgctccgcagtggcacggacgatccccgctgtggaaccacgtgcacacgtggggaattgagaagaggcaggaatgagcatgtccggcgaacagggcaccttattcgatgagcgttttctcggacgctatgccggcaccatcatgtcggacccgacaaccgcgttggtggaattggtcgccaacgcttgggacgcatatgccacaacagtcgaaatccagtggcccgacagggagagcggtgcccatttccagatcacggacaacggcaaaggaatgacgccggagcagttcgaggttcgctggcgaactctcgactatgaccgcatcagttaccaaggtgcattcgaagacccgcctgccgaccttcccgctgcactgccccgcccggtgtatggccgtaacggaaaggggaggcatgcggccttcctgttctcatcgccatatcgtgtccgtacttggcgtgacggagtcgaagccatctacttggtatcccagggcaagcagaaccctatagaggtgctgctggaaagccgccgcgatggcatccaggggcatggcactgagatcaatggtgtacatctgttgccctgttcgttcacggctggcgatgtcagggcgttactgagcaccagatttcttaccaacccggagttcgccgtctttgtcgacggcgtaagggttggcttcagcgacgtgccttcagactgcttgcaggaacttaatgtagacgttccagggtacgggcaggtgaaggtgctggtgattgacagccagcgtgctgatcggacaaccaaacaacatggcatcgcttggtgggttaatcggcggttggtcggccaatgtggttggcggatgtcggaccaggaaaaggtgctcgacggccgcaccgaagaagctaagcgttatacattcatcgtgcatgccgaccttttggctcccgcagtacaggctgattggggggattttaggcctgagcatccggtttggcttcaaactcaagaggcagtgcagaacgctattcgaaacgtcatcctcggcattactaaagagaagcgagctaaagcgaaggaaactgttcgccgttcgcaccgcaacatcgttaaggatctgccgggcatcagccgcgaacgttggaatcgacttctcgatcaggtggtagatcagtgccccagcatgtcggcgacgcagattgaccaagtgatggggttgctggccaacttggaactcgccgaatcgcaatatagccttctggaaaagctgcatgctttgaagccagacgagctcgatcaatgggatgcgatcctggaacgctggacgatcagcaccgccaaggtggcactggatgagatcgaaaagcgtctgaagttgattgaggagatccgtgccaagtcagagattcctggcaccgatgaagtgcacgaaattcaacctctcttcggtcaagcgttgtggatattcggtccgcagttcgagagtattgagtttacgtcaaacagaggcatgacaacagttatcaagcagttgtttggtggcaaccaaaggggttccctgaacaggcctgatttcgtggttgttccagacggtagtgtcggcttctactcacgcccgtccttcgataccgagttcaatgagaacggtatagatgttcttgtgattgttgaactcaaaagccctggtgtgcctgtggggtcggatgagaaggggcaggtctggaagtatattcgggagttaatgaaaaagggctacgtcaccgaccggacctccgtttatggctacgtactcggtgacaggatagattctatcgacggaggagagcgaaaggaaggagatcgtattttcattcggccaatgctttacaataccttcgtcggccagggtgaaaagcggatgcttaacctccatcgacgactgctcgatgctccgttcatgcaggcggccatggcggagttcctcgcgaagccggaggtggaagcgatgcctgcccaaatgtcgttgctgaatgtcccggccgttcaggagggcggggaggtgccagcaccactaccaactggtaattcccccgacgaagcggtgatggcctaaagtgtgtcagttcagtttcccatacttggcaccttgcccgcgtcgatcagcatccgcccccatgcccgccacgttggcagaaggcccacgatggccgccagcgagagggcaggggcactgactccctcgggcttgcggccccgcttcctcgcggccttcacctgacgaagccgaacgcggtcgatctcctcccgccagccgtcgggacctgccgcggcgaccgacttcaggaaggcggccagttccgcgtcggccatgacgacggccttgtcacgacgcgagcgccagcccgacggcttggctcccgattcgtggaacagccgccgcaacgatcgggcgatgtcgatgtcgcggcggcgggcaagccattcctggacggccgccgccgtgtccgtggtcgcggtcatatcgacggtgatcttgcctcggttcggtggacatctcagctaagctccgagtggagtgggaaggtgtctgatgacgaagacgaggcgatccttcacggacgatttcaagcgtgaggctgttgccctgctggaagcgagcggccggcccctggagcatgtggcgcgggagttgggcctgcaggcctcggtgctgcggaactggcggcgggtagcccaaggccacccgccgcgcccacggtctggttcccctgccgtatccgacacggccatgccggccaagccggatgagcagacggcggagatcgcgaggctgcgacgcgagctggatcgcgtccggcaggaacgcgacattttaaaaaaggccatcagcatcttctcggaaacactgagatgaggttccgcttcattgaggaccaccgggacgagttcccgacccggcttatgtgctcggtgctcgaggtgtccgccagcggttactacgcgtggcgtgggcggccggaaagccagcgggccgccgccaaccgacagcttctggtcgaggtccgacgcgttcatggtcaccaccatggccgctatggcagcccgcgcgtgcatgcagccctccgagcggagggcgtcgccgccagccggggccgggtggcgcgtctgatgcgccggcacggcatccggggcgcagccgcacgccggttccggcccgtcacgaccgacagccgccatggcctgccagtcgctcccgatctgctgggccaggccttccaggtagccgagcccaaccgggtctggcttgccgacatcacctacctgcccaccgctgaaggctggctgtatctggcggctctcctcgacttggcgacccggaagatcgttggatgggcgatgcgcgaccatatgcgcgccgaactcgccacctccgccctggtcatggccatccagcgtcaacggccagccgtgggcctcatccagcattccgatcgcggcagtcagtatgcctcccgggattaccgggacctgttgcaggcggccgggatgcggcaatccatgtcgcgcaagggctgctgctacgataatgctcccatggagagcttcttccacactctcaaggtcgagttggtccatcgtactcggttcgaaacccgcgaccaggcgcgccgggaggtgttcgcctacatcgaaacctactacaatcgccaacgcgcccactcggccatcggatacatcacccccgaacaggccgagctaagatctgcgtgaacctgtgtccacccaaccggggcaagatcaggcattcgctcctcccccgacgtggacggggaatcgaatcacggatagctcgccttgggaatccccctcagtgagtcagcgcctccgctcgccggtatgattctcgatttcgcccgcgagggcctgtccgtgtcggcaatcgcccgccgcaccggcctggaccgcaaaaccatccgcaaatacatcgcccgcagtctggaaccgccggcctacacgccgcgcccgcccaagccgacgctcgtcggccccttcgagccctatctgcgcgagcgcatcgtcgcgttcccggaactcaccgccagccatctgctgcgggagatccgcgccctcggctacacgggcggctacacggtgctgaaggatttcctgcgcgccatccgcccgaagatgccgatcaccgcgacgccctcaccgcgacgccctcaccgcgcgcagcaccgccttgacggtggcgccgtccatgccggccggcacgcgcaccaccgcatcgccgatctgcacctctatggccgggggctccttcggtgcggctgggggcggcgtggtgtccagcaccaccggcgcgaacaccaagcccttcttcctgcaagcggttggccgcacgcgcttcccggcgccagccgaatacctgctggggccgcaatccatgacgccgggccacctcgggaacaacagcccccggcaccgcgccctcggccaaaatccgttccttctcctccggcgaccaagtccggcggcctacatcgccggtgatcacctccatgcggcgcacccgcacgggctacgggtcaagcgtaaggtcgagcgtaaacacaaaccgttctcccgatcatgcgatccgggagattcgctccgccctgatctcgccaaaaggtgggaccagaacaccgcttacgttggacgcacggaggtgctgactcggattccatgcggcggaacgtcgcagcactggcggcaggaatgcctcttccatcgcttgcgtcgtcgtctctggccggtcgctccggttcccgccctcgttgaagcccatggaagggacggagtgctcgtgtcaaggctaggggcggtgcgcttgccataggcccaacatatggatttaaagaaacagaagagtatttgaccgtcccaaaagctgtggtcttcgtcaaataacaaagaaagttgatttatgccgatgtatgatattcctgaaaaggaagcataatctccctgcttctatccttaacctgacattaaaatttccggcgcgtatctggtgtaggtaagcacatcagagaacgctccaagatgcttgacaacgccatgcggcctcgcatgacggtggaagacttcgtccgcaaatgggaacggtcttcactgggcgagagccagggttcgcacgagcacttcatcgacctttgccatgtcctgggagaacctcctcccgccgaagccgacccgtcggccaccgattactgcttcgagaaagcgatcgcaaagacggatcggcgtcccggacgggccgatgtctggaagcgtggctgcttcgcgtgggaatacaagggacccggccgcaacctggatcaagcctatgcccagttgcagcgctacgcgccggccctggccaacccgccgctgctgatcgtcagcgacatggcacggatccgagtctacacgaactggaccaacgccgtcactgtgacgcacgagatcggtctgcaggatctgctcgattccggccggcgggacatcctgaaatgggtcttttccaatccggagcggctgcggcccggccagacgcgggccatgctgacggaggaggtggcggcccgtttcgcgacgctggccgcccggttggtggcgcgcgggcacgaccgctggaccgtggcccatttcctgatgcgcctggtcttctgcatgttcgccgaggatgtcggtctgctcggaaagggcctgttcacccggcttctggacgaggccgcgcgtgacccggccgagttcgtgccgctggcggagcaactgttccggtcgatgaaggacggcgggcgtctcgggttcgaaaaggtcgagtggttcaacggcggcctgttcgaggacgcgagcgccctgccgctggacagggacgaccttgccatcgtgcgcgaggcggcgcggctggactggtcggagatcgacccgacgatcatgggcacgctgttcgagcgcggcctgagcccggagcgccgccgggcgctggcgcgcgaggtggtgcggcgcgaccgggagggccgctccaaaggggcggtgggcgtctactacacgcccgaaccgaccatcatgaagctggtcgaaccggtcatcacccggccgctgcgccgggaatgggcggcggcgcgggaccggatcgcagccctgctcgcccaggccagggcagcgggtccccggcagcgcgaccgggtgcgccgcgacgcgcaggcgctctatgaccgcttcctcacgcgcctgcgccggttccgcgtgctggatcccgcctgcggctccggcaacttcctgtatctggcgctgcgcgagctgaaggacctggagcacgaggtggtgatcgacggagagaccttcggctttccccgccagctcgaattcgatctgaagggcaacgagcgccgaagaccatcgggccggaggcggtgctgggcatcgacgtgaaccccctgggcgtcgagctggcccgcatctccgtctggatcggcgcaatccagtggatgcgccgccatggctacgacgtgccgcgcaaccccatcctgcagtccctgaagaccatcgagcagaaggatgcgctcgtcgacctgatcggcggcgagacccgctggcccgatccgcaagccctcgctacgggatacggggacggtgacgatggggagccgtaccggatggtcatcgtcggcaacccgcctttcctgggggacaagacgatgctgggcgagctgggagaggagtatgtgacccgcctgcgccgcctgttcgagggccgggtgccgggtgctgcggatctcgtctgctactggttcgagaaggcgcgcgccctgctggaggagggccgggtggagcgggtcgggctggtcgccaccaactccatccgcggcggcgccaaccgcaccgtcctcgaccgtatccgcgccggcggcaccatcgtggaggcgtggtccgacgagccctggacggtcgacggcgccgccgtccgtgtgtcgctggtgtgcttcggccccaagggcctggacgaaaagccccggctggacggccgcgaggtgccggagatcttcgccgacctgaccgggggtggcgtggatttgacgagggcgaggccactggcggagaatgagggggtgtgttttgagggcatcaagaaatacggctccttcgatgttcccgggtctacggcgcgcgcttggctgtccagtcccctcaatccgaacgggcggccgaacgccgacgtcctgcgcccctggctgaacgcgctggatgtcgtccgacgctcttcggacagctgggtgatcgactttatcggcctggaggaagaggaagccgccttgtacgaggcgcccttcgagcacgtgttgcgcaacgtccgtccggaacgggacaaggaccgcaacgaacggacccggcgcgtgtggtggcagcacgagcgcccccgtcccgaactgcggaccagtctcgccgggctttcccgctgcatcgtgacgccggtcgtcgccaagcaccgggtcttcgtgtggcagtccaccagcgtgttgtcggccaatctgctggacgtgatcgcccgcgacgacgacacgaccttcggcatcctgcacagccgcttccatgagctgtgggcgttgcggctgtgcacatggcttggggtagggaacgacccccgctacacgccgtccaccacgttcgaaaccttccccttcccagagggcctaacgcccgacatctcagcctcaacctacgccggcgatctccgcgcacaggccatcgcggaggcggcaaagcggctgaacgagctgcgggaaaactggctgaatccaccggatctcgtaaagacggaacgggaagtggtgccgggctttcccgaccgcctgctgccgcgcgacgaggccgccgccgcgatcctgaagacccgcaccctcaccaacctctacaatcagcgcccggcgtggctcgtgcaggcccacgcggccctcgacgccgccgtggccgccgcctacggctggcccgccgacatatccgacgaggaggttctgcggcgcctcctggccctgaaccacgcgagaccggcggcggatgccgtgaagcgccggaagaaggccgcgaagcccatcaaccgcaaccaagggaatcttctgctgccgcttcccggtggcaagccggcgcagtccgcccctgcggaaacccccgagacggaaacggagcgcgccaccgcatctgctcgcgcgaatcctcgccggagaaaggccggatgaccggggtggggcatcgcccaaacaagaaggggcgagccgtagcccgccccgcatcttgtgcctgccgaagcaagcttgttaacggctggaccacggtttcccatcggctaaaacaggcagcgtttccagctgaaaagagagtagcagagcccttcacacggtcaagggttgtgatacgctcagccccaaagaattttcagagaatctccggcgcctgcactcacgcgtagtcaattcataagcggaccatctcatgcagccctaccgccttgctcttgacctcggcaccaattccctcggctggtgcgtgctggacttggaccgcagcgatcctcccaggccgaagggcatccggcggatgggcgtgcgtatcttcaccgacggacgcaacccgcaggacaagaattcgctggcggtggcgcggcggatcgcgcggcagatgcggcggcggcgcgaccggacgctggtgcgccgcgcgcggctgatggcggcgctgatccgcttcggcctgatgccgggcgaccgggctgcgcgcaaggcgctggagcggctcgacccgttcgcgcttcgcgcgcgggggctgaccgagcggctggagccgcaggagatcggccgcgcgctgttccacatcaaccagcgccgcggcttcaaggcgatgcgcggcaccggcgacgcggaggaggcgggcaagatccgctccggcatcgaccggctggacgtgcagatggcggaggccggcacgccgacgctgggcgccttcttcgcatggctgcgcgcgaacgggcgcagcgtgcgcgcccggctcgtcggacgcggcgccaaggccgaataccccttctacccggcgcgcccgatgctggaggccgagttcgacgcgctgtgggcggcgcaggcgcgccatcacccggaactgctgacggaggaggcgcggaccaccctgcgccaccgcatcttccaccagcgcccgttaaagccgccgcaggtcggcaaatgctccctgatccccgaggatgagcgcgccccgcgcgctctgccctcggcgcagcgtttccgcctctacaccgaactcgccaacctccgcatcatcatgccggaccgcagcgaatggccgctgaccgtcgagcagcgcgataccattctgcgcgccgcgcgtgccaagccgacaaagaaggccattggcttcaaggacatccgcaaggtgctgaagctcggctccgacgtcgagttctccacgaatccacccgccggccggaactggcgaccgacgagacctcggccgtgctggccgacaagaagcgcttcggcctgcgctgggcgcggctgaccctggccgaacaggacgaggtggtcgagcggttgctgtcggaaaccgatgaaggggcgctgatcgactggctggtcgcgcgctgggatctggaaccggacgccgcggcccgcgtggccgacgcaccgctgcccgatttccacctgcgcgtcggccggaaggctctggccgccctgctgccggtgctggagaccgaatcgcgcgacgggcggccgatccggtatgacgaggcggtgcccgtcgccttccccggcgcccatcattccgaccgccggccgggcgagcggttcgaccggctgccctactacgcgaaggcgctggaacgccacgtcgccttcggcaccggcgaacccgacgacccggaggaaaagcggctcggccggctcaccaaccccacggtccacatcgggctcaatcaggtgcggacggtggtcaatgcgctgatcgagcgctatggcccgccgtacgagatcgtggtggaactggcgcgcccgttgaagcagagccaggaggcccgccgacggaacgagaaggaacaggcggagaaccagcgcaagaacgaggagcgcaaggcgctgctgcgcagcgtcaacgcgccggtcaacggccgcaacctgatgaagctccggctgtgggaggagcagggcaccggcgtcaaccgccgctgcccctacaccggcgagaccatcgggctggaactgctgctgtcggacaaggtggacatcgaccacatcctgcccttctcccgcacgctggacgacagcgccgccaacaaggtcgtctgcctgaccgccgccaaccgggacaagcgcaacctgacgccctacgagcgctggcacggcgacgaggtgcgctggtcgcggattctcggctgcgtcgaggatctgccgcccaacaagcgctggcgcttttcggagggcgccatgaaccgctgggacgaggagggcggcttcctcgcccggcagatcaccgacacccagtatctcgcccggctggcgcgggagtatctgcgccacgtctgcaaccccgaccgcgtgcgggtctcgccggggcggctgaccgccctgctgcgccggcgctggggcatcgactcgatcctgcgcgaccacaaccgcgagggcggtgacgtgccggtggatgcgaccttcgccaagaaccgcgacaaccacctgcaccatgcgctggacgcggcggtgatcggctgcatcgaccagggcatggtgcagaaggttgcccaggccgcctcccgcgccgaggatctcgggctcgaccgcctgatggacgacatcgacgatccctgggacggcttccgcgacgagctggcggtgcgggtgcgcggcgtgaccgtctcgcacaagccggagcacggcaccggcggtcgcctgcacgaggacacggcctatggcccgaccacggaggcggagcgggccaagggcttcaatctcgtctaccgcaagccgctcgacggcctgacggagggggaggtgaaagccatccgcgcgcccgagctgaggaaaaaggtgcaggaacggctggacgggtgccgggccgcaggcatggaccacaagcaggcgatgctgcgcgtcgcggccgagctttcgtcgcacgaagggccgtggaagggcattcggcatgtgcgtattctgaagaaggaagcgtcgccgatctggctgccggacgccgacggccggatttacaaggggctgatcgccggcgatatccatcatgtcgacatcatcgcccgagacgacggacgatggatcggccgcgccgttacgctgttcgacgctcggcggaccgcacttccggatgggcgggccgcgccttgcgcgccgggcgagagcgagcggttcgtgatgcgtctgcacaagggcgatgcggtggcgctgacgcaagacggtcgccggcgggtgatgaaggttcatatcctggaaccatcgcaaaaccgtctgcgtctggcggagcatcaggaggccggcagcctgcaaaagcggcatgacgacaacgacgatctgttccgctggttgatcgtgacctatgacgggctgcgggagcggggggcccggcgggtgaccgtcagcccgatgggggaggtcaacgatcccgggtttccgcgctgggcgacgcgggatgcgatttcgccccgtcgccggaacaaggcagacgcctcatgaccggccgcatcgtcgagatcgccgaggacggccgccacctgtcgctgtcgcgcggtttcctggtggtggaagggcaggggcgggagatcgggcgcgtcccgctcgacgatatcggtgcagtggtggccaacgcccatgggctgacctacagcaacaacctgctgctcgccctggcggagcgcggcgccgtggtggtgctgtgcggaccgaatcacatgccgacggccttcctgtggccggtggacggccatcacgtgcaggcccagcgcatgcgcgcccagctcaacgtcccggtcccgcagaccaagcggctgtggcaacttctggtgcgcgccaaggtccgccagcagggcgcggtcctggaggcgcgcggcgcacccgccggcgcgttcgagacgctggcccgcaaggtgcgctccggcgaccccgacaacatcgaggcgcaggcggcgcgccggtactggccgctgctgttcggggacgacttccggcgcgacacggacgccgccggcgtgaatggcctgctgaactacggctacgccatcctgcgatccaccgtggcgcgggcggtgatgggggcggggctgcaccccacgctcggcctgttccaccacaaccgggcaaacccgctgtgcctggtggatgacttgatggaaccgttccgccccttcgtggacctcgccgtggcccggctggccgatgcggggcacgacgcggtgacgccggagaccaagcgtttcctggcgcttgtgccgtcgctggacctgccgacggcggagggaacgacgccgctctcgacggtggtgatgcgggccgcgacgtccttggcgcaggcctacgagaatggcgaagcggcgctcgacctccccgccggggaaggcaccaaggcgtgggcgccaatgccattggaatggcccgcaccccctccggcaccgtcgaaggtgccgcaaccggcctgacggaacgcggcgatgttgagcggataccggatcatgtggatgatggtgctgttcgaccttccggttctgaccaagcgcgaacgcaaggctgcgacggccttccgcaagttcctgctggaccagggtttcgagatgtcgcagttctccgtctacctccgccattgcgtgggcaaggagcaaacggaagcgctgacccgccgaatcgagaaggccgctccatccaccggcaaggtgcacatcgtcttcatcacggacaagcagtatgagaccatcgtgtgcttcgatggccgagtccgccagccctcccggaaaaatccggagcagtacgtcctgttctgaccgtccggacggtggaatccgggcagagagacggcgggataaagcttctttttcaaagccttaccccgcagccgattgtagccgatgggaaaccgcggtccagccgcaacaacgcttggtcaatttgtatcctgaggtgattgtagccgatgggaaaccgcggtccagccgcaacccaagagacgcgcggcatgcgtcgcatccccattgtagccgatgggaaaccgcggtccagccgcaacatcttcgtcggcggcgaccgctcaatgggcattgtagccgatgggaaaccgcggtccagccgcaacggaagtagccgacaacgtgatccagcatcttattgtagccgatgggaaaccgcggtccagccgcaacgtcgcgaggtcgagggcgaggacgccgccgattgtagccgatgggaaaccgcggtccagccgcaacaccggcaccaccatcacggcgctgggcaccattgtagccgatgggaaaccgcggtccagccgcaacaatgtcggctcggtcggcctgaccgtcgagattgtagccgatgggaaaccgcggtccagccgcaaccgacaagcggcaccagatggcggtcgtcatattgtagccgatgggaaaccgcggtccagccgcaactcggccgccagcttgacgcgggcgtacttgattgtagccgatgggaaaccgcggtccagccgcaacaggtccgcggtcggcgagaccgagcccgggattgtagccgatgggaaaccgcggtccagccgcaacaactctgatgaagtatggtgcgagtcctgtattgtagccgatgggaaaccgcggtccagccgcaacagcatcgacgcgaagcccaccatcccggtgattgtagccgatgggaaaccgcggtccagccgcaactacgggctacatcgacttcctgcgccatgaattgtagccgatgggaaaccgcggtccagccgcaacccatgcatggccccaatggagccaccgccgattgtagccgatgggaaaccgcggtccagccgcaacagtcagcaactcatggcggatttccgtgcgattgtagccgatgggaaaccgcggtccagccgcaacgcctcccgcctccgggacactccgaagagaattgtagccgatgggaaaccgcggtccagccgcaacgaggatggcgttctcaagcgtcgtgcgccgattgtagccgatgggaaaccgcggtccagccgcaaccgcagcagaccgctgggcaacagagcgtcgattgtagccgatgggaaaccgcggtccagccgcaacgatggtgcggatatggtcctgcacatgcagattgtagccgatgggaaaccgcggtccagccgcaacgagctgcgggtgtcggaggtcgcgctggtcattgtagccgatgggaaaccgcggtccagccgcaacggatggacccgccggtcggcgtcttcaaccattgtagccgatgggaaaccgcggtccagccgcaaccgggcagagaataagcggatgacggcggacattgtagccgatgggaaaccgcggtccagccgcaacccgcgctgtcttgacccacttcacgccgtcattgtagccgatgggaaaccgcggtccagccgcaacccgcgctgtcttgacccacttcacgccgtcattgtagccgatgggaaaccgcggtccagccgcaacgacgtcggcggcgtcgacgcgcgacagctgattgtagccgatgggaaaccgcggtccagccgcaacaaccgggttctcgtccatgtctactggagcattgtagccgatgggaaaccgcggtccagccgcaacgcaaacgtgctgcttgcgggccttcaccaccattgtagccgatgggaaaccgcggtccagccgcaaccttcagcaggtcgtagacgttgaccccgaaattgtagccgatgggaaaccgcggtccagccgcaacgcgtcaggtcgctgtccgggtggacgcgcgattgtagccgatgggaaaccgcggtccagccgcaacggaatcaacatcttcttcaacggcggcgggattgtagccgatgggaaaccgcggtccagccgcaacgcggcatagagctgggtccccggcacggttcagttcggccgtgaaagccatacatggtcagcgtgccttctccgctgggcttcaccgtgaaagggcggcacggccggcaccggtcaggatcatgtcgttctgcggggcgtggacgcgggcgcacagcacgtcgcggtgatggcgctccagcgggttgtcgcgcgacaggccgggattgccggtcacctccagcgcccgcgccaccgcgtcgatggcgttgttggtcaccgtgtacttcaccagcaggctgtcgctctgcgagggtgctgaaccaccgtccaccgccgccgacagggagcgcagcagcacgccgttggtcagcagcagcgcctcgatcccgccgagcgcctcctgcaggcggggaacagtcgccagcgacgcaccgcccagcgccgtcggcctgcgggcgtgcaggaagccgaccagccagtcgcgggccgagcgggctataccgtcatagacgccgctgaacagggtggacatccaggcggtggctgccgcatcgggggccgcccagccggcgggcgggcgcagctcgccggcatggtcgtcgggcacaaagatgtcgcggaacaccacttcgtggctgccgctggcccgcatgccgatgtggttccaggtctgccgcacctcgatgccctgttcggcgaatcctatgccgcgcggcaccacccaggtgccgaccagcggttcggcatcgtcggtgcgcgcccagacgccgagccaggagagcgccggaatgccagttgagtagatcttggtgccggaaatccgccagccacccggcaccttgcgtgccacggtggccggcaggccgccgcggtggggcgtgcccagttccggctccacccgcaggatgttgatcagggcgccgtcggtcgctgcggtgcgggcgatccggtcgcgcagggcttccggccaggcaggaccatgccagagctggttgtggatgacatagtgcagcaccagcacgagcgcggtggacggttcgccgcgcgcgatcccgttcaccacggccagggcgtcccgcaggccgccgcccttgccgccggccgacggcggatcgaccagcgccagcagtcccgccgcctgcaagcgttcgaagttctcgaagggaaagctggcggcggcatcatgctcggcggcacgcagcgcgaactccgccgcgagggcggcgatcgacgcctcgtcgaccaccgtggcggtgctggcatcgccgaagggggcggccgggaagggcgggtcgtcaaagggcatggcaggcggctccgctgcgatggaatgggctcaggcgaggtcgaccgtgatgcgtccggcgaagcgctggctgtcggtcgaacgcttgatgaccgacacgctcttcagctcgtcggtgtaaagcgcaagctgatggcgcagctcgtcgccgacgggggtgacgttgtgggcgtggctgcgcagcatcgcctccagctcctccaccgggaatttcggggcgaagggcgcataggccgcggcggcggcgcgcaggtcggcataggcggcatgctgggcctcgatcagcgcggcggtcagcgccctggccgccggacggttgtcgcgcagcaggctgccgcgcaccccgacgaggcagcaggtgcgggtcgcgaactcgccgcagacgttgttggtgatctccaccatccgcggatccttggtatggcgccagaccagcggatcgccgtcggcgatcgcgtggatctcgcccttctccaccgccagccccagcaggtcggcggggaactggcgccattcgacatccttgttcggatcgaggccgaacttggtcagcacgaccgagaagaagttcttcgacgggctggccatgtcgctgacgccgatgaccttgcccggcaggtccagcacggtcttcacccccgccgccttcgccccgaacagccgcatgcagccgccatgcaggccggccgagatcttcacgtcgaacccctgctccagcggcttcagccagcgcagcgccatgccgacgccggcatcggccttgccggtggcgatggcctccaggagctggtcggtggagccggtgaagttgaccagctccacctccagcccgtgcttcttgaacaggtcgagctggaaggccagcggcacggcggagaagcagacggcaccggcgttccaggacaggcgcagcggttccgccgccactgcccggcggcgcaggacgaagggggcggcgagggtgacggcaccggcggcgatcaggccgcggcgggtgagggaaagaggcgggttcgcggtcatcggtcgtggacctttgcaggaaatggggagggacagggtcagtcgagcaggtcgggttcggccgccacgatccattcccacagcgggtggaagctgtaggcgccgccctgatgggtgccgacctgggagcgggtcagcagtgccgtctcatgatcgatgggctgcggctggccggcggcttccgccagcagttgggtatgggcggcgttgtcggcgctgatgaaccaccaggccgcggcctcgacggtcgggccgacggtcagcaggccgtggttcttcaggatcgccagcttcctgtcgcccagcgtctccaccagccgctcgccctcgccttcggtcaggacgacgcccgaatagggatcgaagatcacctgatcctcgtagaaggcggcggcatcctggctcagcgggttgagcaggcggcccagcgccgaccatgccttgccgtaggtcgaatgggtgtgggcggcggccaccacctccgcgcgcgcccgatggatggcggaatggatggtgaagccggcctggttgatggcccggtcgccttgcaggatggtgccgtcgccgtcgaccagatgcaggtccgacacccggatggtgcggaaatgctggcccagcgggttgatccagaagcggtcgggatgctccgggtcgcgggcggtgacatggccggccagcccctggtcgaagccgtagcggccgaacaggcggaaggtggcggccagccgctgcttgcggtgctgccgctcctcctcgacgctgctgtagctgaccggatcgaccggcggccagaatttgcgcccttcggatccaatgggtcgcggttggatgtgggtcatcgggcgggggctccgtcgggaaggggggcagtagccggtgtcggcgtccaccacgtcgcgcaggggttcgccacctgccctcactccgccgcgacggcctgggcgcgctggcgctcggtgaccagttggcggacgcgcggcagcagctcccggccataggcgatggcgtcgggcagcgggtcgaagccgcggatcaggaaggtggtgacgccgaggtcgtagtaatccagcagcgcgtcggcgacctgatccggcgtgccgaccagcgaggtggagttgcccttcgccccggtcagggcggcgatggcggtccacaggcgcttgtcgtggcggtggccccggtcggcggcggcatcggcgatggccagcaggcggcgcgcaccctcgttgctgggcaggtcgccgcgggtgaagccggtcctgtccagcagcgccttggccttctcatggatggcctcggccctggcccaggcggcgtcctcggtgtcggccaggatcggacgcagcgacaggctgaaggccggctgcggccggccggccttggcgacggcggcacgcacgcgggccagcaactcgcgcacctgatcgtgggtctcgccccacaccgcataggtgtcggcatggcgccccgccacctcgacggcggctgcggaggcgccggcgatccacaccgggatgcccgacgggttgtagggcttcacctgggagaacgccttctcgacccgatagaagcggccccggtagtcgaagggctcgtcgctggtccattcggcgcggacgatgtcgaggaactccgacgtccgggcatagcggtcgtccttgtcgtccaccgtgttgccgtcgcgggccagctcgctgcgctcggcgccggtgatgacgttgatggcgacgcggccgcggctcaactggtcgagcgtggcaagctggcgggccaggatggtcggcgcctggaagccggggcggtgggcgataagcacgcccagccggtcggtgacgctggtgatgtgctggctgacctgcaggctgtcgggcgcgtcggcgtggaaggcctggagcaccgaatcgaaaccgcccagctcatgtgccttggcgaccgtctcgatatagtcgcggtcgaccaccgggccctggcgcgggatgatctccgacgaattgtggttgccgacgaagccgacgaagcggagcggatgggcggaagcggtggtcatggcggaggtccccttttgtgcgtgacgagggttcgggtgaggaatcagctgagcggacgcgacaggacgtcggcgaagcggcggtcgaaggccggggcgatgtcgatgcgcctgggcagcacgcccaactggtggaaggtgtcggcgacggcctgggcggacgcgatgtcggcgtcggtgatcggcgccaggtcgcgctggcgcgaggtcttgcgcaggatctccaggtcggtttcgaccggcacgccgatggcggcggaatggacctgcgcccagcgctccaggttggcggcgcgccaggcgaaggcgcggcgaagacgcagcagatagtcgccgatggcggccgacttgcccggatcgccgagcgcgtcgggcgaggcgagatacaggtagttgcccgacaggtagccgttggaggtgatcaggaccctggcgcccttcctgacggcgaagggcaccgagtagccgtagatcgcccaggcatcgagcgcgccctggtcgaaggcggcctgtccctccgacggagtgaggctgatcgcctggatgtctgtgaagcgcaggcccgcctcgcccagcatcctggcgaggtagtattgcgtggttgtggcgcggacatagccgacgcgcttgcccttcaggtcggcgatcgaccggatcgggctgcccggcggcaccagcaccacctgccagttcacgtcgtccttgatgaccgcgacgatcgacaggcgggccccggcggcgatgccgaaggccggcgggatctcgctgctcgacccgacgtcgatggagccggcgttgatcgcttcgacgatcaggttgcccgacgcgaattcggcgaattgcgaccggtagccggaccgggcattgcccgatgcctccagcaccagcccatccgccgccttgtagtcggcgatgcgcaggacggtttccgatgtcgggccggaggcggcgtgcgaaagggtgggcaggccgcccagcgccagagcaccgcaggccccggctgcgctgcgcagcaggttccggcggccgatcggcgggcggccgatcagggggaggtgggggcgggcgatgtcggtcgtcatggcgggcggggtccgtggggggaaggtcagcggtcgggtgcggccgcggcgccggcgggcaggccgtaaccgcccggcaccgcgccgcccgcccgggggtcggcgcggtgcgcctcccgtccggccggatgctcctcactgacgcccaactcggccagcaggcgggagcgcagcgcgatgaagccgggatctccgtgacggcgcgggcgggccagcgggatcgggatgtcggcggcgatcctgccgttcgccatcaccacggcgcggtcggccagcagcagcgcctcgtccacgtcatgggtcaccagaaggacggcgggggcatgggcgcgccacagagtctccaccaagccctgcatgcgcatgcgggtcagcgcgtccagcgcggcgaagggttcgtccagcagaagcaggcgcggttcgcggaccagggcgcgggccagcgccgcccgctgcgcctcgccgcccgacagggtcagcggccacgcccgggcgcggtgggacagcccgacctccgccaatgccgcgaggccgcgggcttcggcatcggggtgacgcaggcccagcgtgacgttgcgcagcacccgcatccaggggaccagccgcggctcctggaacaccacggcgcgctcgtccggcacctgcacggtcccctccggcgccgggtccagcttcgccagcgtgcgcagcagtgtggacttgccgcagccggagcggccgagcagggcggtgaaggagcccggctggaggtcgagcgacaggccatccagcacattgccgttgccgaagttgcggacgaggccgcggacgccgacgacgggcttgccgaccgcgggcggggaggcggaaatccgggaaagggcgtggctcatggagcgtcactccttgatgaaggccgggcgccagaccagcgccgagcgttcgatgaggcggacggtcaggtcggcgagcaggccgagaatggcgtagacgatcagggcgacgatgatcacgtcggtgcgcaggaactcccgcgccgtcatcgccagatagccgatgccgctggaggcgttgatctgctccccgaccaccaggctgagccaggcgacgccgagggcatagcgcagccccgtcaggaaggcgggcagggcgcccggcagaatgacctgggcgatcagttcccaccgggtca

SEQ ID NO: 3470 - DNA, 14877 bp, synthetic construct
  source 1..14877: mol_type = other DNA
  misc_feature 1..14877: note = Synthetic
gatggattcggcatgacgatcgttcactcctgtccgcggctgaccagcagccgctcgagcccgtagagccggtcgaggatcagcatcgcgcccaccgtcaggaagatcagcgccgccgacacggccgccaccagcgggtcgatgttgtcctggatgtagaggaagaggcgcacgggaagcgtggtcgtctccggcgaggcgatgaagacggtcatcgtcacctcgtcgaaactgttgatgaaggccagcacccagccgctcgccacccccggcaggatcagcggcagcgtcacccgccggaacaccgtccagcccgaggcacccagcgaggccgcggcgttctcgatcgaccggtccatcccggtggaggcggccaggatcagccgcagggcgaagggcaggatgatgacgacatggctcagcaccagcccggcgaaggtgccgcccagcccgatctgcgtgaagaagcgcaggaaggcgatgcccagcacgatgtgcggcaccatcagcggcgacaggaacaacgccgtgaccgcctcccgtccggcgaattggtggcgggcgatggcgagtgcggcgggcaccgacacagccaccgcgatggtggaggacagcgcccccagcagcaggctgtcgcggaaggcgcgcatgaattccgggttgtcgccgatggcgcggaaccagcgcagcgacggcccgcgggtcggcagcgacagatagccttcgggggtgaaggcgaccacgcacacgatcaggatcggcgccagcaggaatcccaggaacaacgcgtggaagatcagggcgatgggtccgttgcggctcattcgaacacctgcttgtagcgacgttcgaccagacggttgcagccgacgatgatgacgatgttggcggccagcagaagcaccgccaccgccgcgccgagcggccagttcagcgtgttcaggaactcgtcgtaggccagcgtcgccgccaccttcagccgccgtccgccgatgatggccggggtggcgaaggcgctggccgccagcgcgaagacgatgatcgagccggacaggatgccgggcaccacctgcggcagcaccaccctgcgcagcacggtgaagggcttcgcccccagcgacagcgcggcgttctccacctgcgggtcgagccgctggagcgaggcccacaccgacagcaccatgaaggggaccagcacatgggtcagcgcgatgacgaccccggtctccgtgtacatgaactcgatcggcgtcgcgatcagcccgacgcccatcaggccctggttgatcagcccggtggagccgaacagcagcgcccagcccagcgtgcgcgacacgacggagatcagcagcggccccagcacgatcagcaggcagatgccccgccagggtgcccgcatgcggcggaggatgtaggcctccggagcgccgatcaccgccgacagcagcgtcaccaggaaggcgatgcggaaggtccgcaggaacacctcgtggaaataatcgtcgcggacgatctccaggtagttgtcgagccgccagacattctcgatcccggtgtagaagccgaagctgttcagcgacagcagcgccgtcatcaccagcggcaccaccagcagcgtggcgaacagggccagggctggaaggctcagcaggtagggcgtccagttccgtgtctcgggccgcgtggtcgtcgggccggtggccggggtgggggtgtggatgtccgtcgccatgcgtgtgtcttcgacggtcgtcatggggacgcggccggctggccggccatgacccgcatgtcctccggccgccagccgaggaggacgctgtcctgctcggccggcaggggttggccgtcatgctggcggatgacggtcagcgggccggcgtcggtcgccacctcgaacagccattgcgtgccctggaagacgcgggcctgcacccggccgggcacgccggacccggcgacgaagctgaccttctccggccgcaccgtcaccacccccggcccctccggcacctcctcgccgaccggccagacagcgccgcccaccgcgacccggcgctcccggccgtccccgctgaccacgccctgcaacaggttggtacgccccaggaagttggcgacgaaggcgctggccggctggtcgtaggcggcttgtggagcggcgatctgctcgacccggcccttgttcatgatgacgacccggtcggacagggccatcgcctccgactggtcgtgggtgacgaggatcatggtggtgccgacgctgcgctggatgcgccgcagctccacctgcatctcctcgcgcatcttggcgtcgaggttggacagcggctcgtccagcagcagcaggctgggccggatgaccagcgcgcgggcgagcgccacgcgctgctgctggccgcccgacagtcgcttcggatggcgatcgccgaaggcgccgagcccgacgagctgcagcgtctccgccacccgccgttcccgctccgcccgcggcacgccgcgcatctccagcccgaaggcgacattctccgccgccgtcatgtgcgggaacagcgcgtagctctggaacacgatgccgagcccgcgctcgttcggtttcttcgccagcagatcggcaccgtccagcgtcacccgccccgacgtggggtccaggaagccggcgatcatctgcaaggtggtggtcttgccgcagccggagggaccgagcagtgagaccagttcccccttctccacggtcagggacaggccgtccacggccagccaggaaccgaaccgcttggtcagactgtcgagcacaagataaggcatggggtgcgtctccatgtccgcgcgggggtggcgtccagccctccccccggggcgggaaagggttggacgcacccaatctttcagcgctcgatttcgcgggtccagcgcttgttccaggcctcgcggttggcgttgatggtgtcccaatcgacgaccatcagcttggcgatctgctccgggccgtaggggatgcccgcctgcttctcggtcggaagcgtcacggtcttgttgaccgggccgaatccggcgctgacggccagcgaggtctgcgcgtcgggcatcagcatgtgctgcacgaactgctgcgcctcggcggcgttcttgctgccggcgatcgggcaggcggcggacgccagcaggatgccgccctccttggggtagacgaaggccgccgggaagccggtgtcggccagcgccttggcgcggcccgacccccaaacggcgatggccgcctgtccgctctggaacagctcggtcatcttgcccggcgacggctcgtaggcgaggacgttcgggttgatcgtgccggcgaactccttgaagcccggctcgatgttcttctcgccgccgccgttcagccgcgccatcatcaccagcgcgtgcaggccgtaggagttgttgatcggcgggatcaccagcttcttcttgtacttgggatccttgatgtcgttccaggaggcgggggccggccagccattctcctcgaacatcttcttgttgtagacgaagccggtgccgaccgcgccgacattcaccgccttgcccgacggaatgcgggcgaggtcgtacagctcgtcatagacgggggccttcgccagatcggcgcagaagccgagcgccaccgcctggtacatcgggccgtcgtcgaggatcaccacgtcgatctgctggttgccgcgctgcgcctggagcttggcgagattgtcggtggagttgccggcgacgtattccaccttgaccccgtgcttctgctcgaaggccgggatgatctccttgcgcatggtctgctcgaaggagcctccataggcggcgacgtacaacgtcttctgttgcgcctgcgccgccccgcagcacagggctgccgtcgacatcaacccaaggatgaacgcccgcatcggtcccatctccgtctccgttggcccccagatgtgcgtttcttttgcacggaccgagcgtggcgccacgaacctataatggtcaaatcgaatttatggtgatctccataacaagatgttatgttgcaaccgctttgtcgccatggaagatgcccatccatgctcaattcccgccagatcgaggccttccgcgccgtcatgctgaccggcgggatcacgtcggcggccgagctgctgaacatctcgcagccggccgtgagccggctgatcggcgatctgcaatacgccctgaagttgactttgttcgagcgtcgaggctcgcgcatcgcgccgaccagcgaggcgctgtcgctctatcaggaggtcgagcgctccttcgtcgggttggagcggatcgagcagaccgcccgcgatctccaggcccggcgggccggcacgctgcgcatcgccgccatgccggcgctcgccatcggcttcctgccacgcttcgtcgcccgctttctggaagggcgcccgcgcgtggacatgtccctgtggggcagcagctccaacatggtcatggactgggtggcggcgggccaatgcgagctgggcttcggtcaggcgccattggaacacgccacggtgctcagcgagaaatcgccgtccgtcgccgctgtcgccgtggtgccggccgatcacccgctggccgggaaggagtatctgcagccgcgggacttcgcgggcgaggcgttcatttcactgggcgcgtcgacgctgttccgctaccggatcgacgccgtcttcgacgaccacggggtgaaccgtacgcagcgggtcgaaacgcagctcaccatgatcgcctgcgccatggtggcgtccggtgccggcgtggccattgtcgatcctttcacggcggaggagtatgccgggcgcggtgtcgccatccgccgcttcaagccgcggatcaacttcgaactcgccatcctccaatcggcgcagcgctccttgtccaccatagcccaggatttcctggacgggttccgcgcggaaatcatcgccttcgaccggcggagcgccgggtgacgggtgtgcgtggcgctgcgggttgccggcccttcccgtaccggagggtcagccgcttgtcgccatcgccgcattccggtggggatggtccgccgttgcgccccggctggccgccgtcctaccctgcggccagggtacggcacgagtacaggggcgccggccgatcgccatgacggtctttcttcatctcgccttcggcggcgggcggctgcacctgtggggagaggccccagccgcgcaggccgcccccttgcctcgcccgcgtggccgccggccgaagggggggcgtgcggagccgacgcccttcgatcccggtgccgagtccctcgacgaggcgctggacgcgctcggcatcgatctgcccgtcgagccggaccggctgaccgtctggctgcccaccgcggacgggcgacccctggcctccacacccgtcgtggccgagccgccggaggctgcggacgcgcccgacctggcgccctgggacaccaccggcttcgccctgccggtggaggccgccatcgacgcgctgtgccggtgcggcggcgaaccggcgctggcgccgggcctgttcgccggtgccgatttcgcttactgggccgtggtgctgcgcttcgccggcgcgctggtgggccgccgcgcggtgctgccgacgcttgtgcgcgaggcgggcggggccgtcgcccgctggctgccggtgctgctgggccgcgacgcccaggcgctggcgcgcctcgcccgcgccatgccggacgccgcgagagcggccggaaccgccgtggccccgcccgacaccgcgcccatggcggtgctggcgacggtgctggacggtttcgtggacgcgttggtgcgcggcgcgcccggcctcgccccgctgcccgcctcgacggtggccccgacggtggccgacgaccgctggctggcggcgctggtcggcagcgacccgcgggtgcgggcggaggcgaccgatctcgccgatctggaacggcggctctccgcgtggcaacgcccggtcgccgttgccgcggccagcccggtgcggctgtgcctgcgtctggaggagccgcccgccccggccgatcccggggacggggacgctccgtcggccgtggccggctccgtcgcaccctggaccgtgcgcctgctggtgcaatcccacgccgaccccagcctgctgctgccggccgcgcaggcctgggcggggaacggtggggcagggaagggtggggcgggctcccgcgagtatctgctccaggccttcgcccaggccgggcggctgtggccgccgctggaagcggcgctgaaggccggcgttccggacgctgtggagacggacgccgccggcgcggtggccttcctcaccacggccgcggtggcgctggaacaggccggcttcggcgtgctgctgccggcctggtggacgggccgcggcacgaaggcgcggatcagcgcccgcgccaaggcccgcaccccggcctttgaaggcggggccggcatcgggctggacgagctggtccatttcgactgggaggtggcgctgggcgacgccgtcctgtcgcgccgcgacctgatggcgctggcaaagttgaagacgccgctggtgcgggtgcgcggccagtgggtgctggtcgatcccgccgagatcaaggccgccgtcgaacgcctgaagacgcagggggacgcggtcagcgcccgtgacctgctgcgcatggcgctgggcggcgccacggccgacgagcccgccgccgtcgccaccgggggctggctggccgagctgatcgaccggctgaccggccgcgagcccatggccgagctggacgcccccgccggcctggcggcgacgctgcgcccctaccagcggcgcggctattcctggctggccttcctgcgccgctggggcattggcgcctgcctcgccgacgacatggggttgggcaagaccgtgcagacgctggcgcttctcgtgcgcgacaaggaggaggccgcgacggagcggcggccgcggccgacggcgctgctggtctgcccgacctcggtcatcggcaactggcagcgggaggcggcgcgcttcgcccccggcctgtcggtgatggtgcaccacgggctggggaggacgaagggagcggcgctgcgcaagacctgcctcgcgcacgatctggtcgtcaccagctacgcgctgctccagcgcgacgcggaggcgctggccggcgtcccgtggaccgggctggtgctggacgaggcgcagaacatcaagaatccggagaccaggcaggccaaggctgtgtgcgccttgccgcccggctaccgggtggcgctgaccggcacgccggtggagaacaacgtcggcgacctctggggcattctcgatgccctcaaccccggcctgctcggcacccgggcggctttcaagcgcaacttcttcgtgccgatccaggtcagccgcgacgccgacgccatcgcccggctgaagagtctgaccggccccttcatcctgcgccggctgaagagcgacaagacgatcatcgccgacctgccggacaagctggaaatgaaggtggtctgcacgctcaccaaggagcaggcctctctctaccaggcggtggtggaggaatccctgcgcgcgctggaggaggaggacggcatccgccgccgcggtctggtgctggcgttgctggcgcggctgaagcagatctgcaaccatcccgcccagtatctcggcgacggctcgcccgtcggcggcgggcgctcgggcaagctggcgcggctggaggagatgctggaggaggttctggcggtgggcgagcgcgcgctggtcttcacccagttcaccgagatgggcggaatgatcaaggcggcgctccaggaccgcttcggccgggaggtgcccttcctgcacggcggtgtgccgaaggcgaagcgcgaccgcatggtcgagcggttccaagccgaggacgggccggcggtgttcctgttgtcgctgaaggccggcggcaccgggctgacgctgacgcgcgccagccacgtcttccacttcgaccgctggtggaacccggcggtggagaaccaggcgaccgaccgcgcctaccgcatcggccagacacgcatggtggaggtgcacaagttcctgtgcgccggcacgctggaggagcgcatcgacgcgatgatcgaggccaagaagggcgtggccgaggccatcgtcggcagcggcgaggactggctgaccgaactgtccaccgccgatctgcgggcgctgctgagcttgcgcgccgacgcggtcgcctgagggaggggccgatgccgcgccgcaccgacgacgatgacgacgacggccagggctggcgttatccggtgtcgaagccgaagacggtgacgggcgggatcaaggcggcgaaccggcgcggcgatttcgccacgagctggtgggggcggcgctggctggaggtgctgcattccttccagatcggtgcccggctgacgcgcgggcgcggctacgcgcgcaaggggcaggtgctcgacctgtcggtgggggaggggaaggtgacggcgcgggtccagggctcccgtcccaggccctacgcggtgaccatcacgctgaaatcgctggcggcgaaggagcgggccagggtgcaggcggcgctggcggccgacgtggccggggcggcgcggctgctggccggtgagatgccggagacgctggaggacagcttccacgccgccggcgtcgccctgttccccgcccggctggacgacctgaagaccggctgcacctgcccggactggtcgaatccctgcaagcatgtggcggccgtctactgcctgctggccgaggcgttcgaccgcgaccccttcctgctgctgaccctgcgcggcctgccgcgcgacgtggtgctggcggggcttgaggaaggggagggcgcgccggccgccgaaccggtgccgccgcagccgctgtcggcggaggcggtcgccttctggcggggcgggacggtgcccgccgacctcgtcgccgtggccgccccggccgacggcggggccacgctcctggattcgctgggccccgtgccgttctggcgcggcgagaccgacgcggcgccggccctcggccgcgcgctggaggctgcggcccgcagggcggccgggatcggcgatccggccgaccgcgagggtggagcttgacgggccccgctccacggcatcgctgagcccgcacgctccgtgcggcgcagcgttcggatcatgcgaaggcggcaacggccgaatcgaaaaggggcggaccgtggcccgccccccatttcgtgctccccgaagggaacgtgttaacggctggaccggagtagcccagccgcaacacaacatcattgctactggcgcggaccatttccgaacgtcagtcagctcgggttgaacgtaacgtttatctacattgcctagcctaagcaccgcgatgccagatatctaacacgcttcggctcagaaaaaaaatgatgttgtgcacccagattcgtattgaccctgccgactgatatgatacacgacatgagatgtatggtagggcgttgctcgcgccccaccatacacacagaggaggcaggcatgatctcgcaactggtgatcctgctgatcctcgccctgagcgtgatcaagcggctgctcgatctcctcgggtaggatgcaggcggagggggaggggtagcgaccctcctccgacgccatcactggatgataggccatcgcgctcgccgcgtgcaatgccttcgcaaaccgggggccggattgcggatcaaatggaaaaaggggcggaccgtggcccgccccccatttcgtgctccccgaagggaacatgttaacggctggacccccgatccccatcgaatttccaaccttgaggcatcatagcccgtctgatcctgcggtcaagggttgtgttatgattttggcggcgccaaggcgccgacctgcaattcgattcaaacaacaaatgcgattgtcggaggcccacagtgcagccataccggttgtccatcgatctcggcaccaattccatcggatggtgcgcgctcaatctcggtcatgacgggcctgatcatgctgggtcgccgcgggagatccgggcgctcgggtcgcgcatcttctccgacgggcgggacccgcaggacaagtcctcgctggcggtggcccgccgggtggcgcggcagatgcggcgccggcgcgaccgctatctggtgcgccgcgcccggctgatgaaggcgctggtgcggttcgggctgatgccggccgcgccgggggagcgcaaggcgctggaggtcgggacggatccttacgacttgcgcgaacgcggtctgcgggagcggctggagccgttcgagatcgggcgcgcgctgttccacctgaaccagcgccgcggcttcaagccggtccgcacggcgacgcggaaggacgaggaggcgggcaaggtcaaggccgccgtggagaagctggacgaggccatgcgggccgccgcgacgccgacgctgggcgcgtggttcgcatggcgccggaaacgcggtgagacgatccgcgcccgcctgacgggaaagggcaaggacgcgggctatcccttctaccccgcgcgccggatgctggaggaggagttcgcggcgctgtggtcggcccaggcgccgcaccacccggccctgctgaccgacgccgcccggcaggccctacacgaccgcatcttccaccagcgtccgctgaaaccggtgccggtgggcaaatgcaccttgtacccggaggacgagcgcgccccccgcgcgctgccgtcggtgcagcggctgcggctgcttcaggaactcgccaacctgcggatcaccgcgctcgacctgtccgaacgcccgctgaccatggccgagcgcgaccgggtggtcgccaccgtgctggggcggacggccaagccggcccgcaagcccggccggatcctggacgcgctgtcgttcgacaagctgcgcgccctgctcgaccagccgccgggcacgcgcttctccctggaatcggacaagcgcccgaagctgctgggggatgagaccggggcgcggatcgcggccgtgtgggggcccggctgggggcggttgccgctggccgagcaggacgccgtggtcgagctgctgctggatgaacccgatccgacggcggccatcgacgcgctgaccggacgctgggggctcgacgccgcggcggcacggaccctggcggaggacaccaccctgccggattaccacgccgcctatggccgccgtgccgtggcggagctgctgccggtcatggaggcggaaagccggatggacgccggcggccgcgtccgtcccatccgcctggacgaggcggtgaaggcgctgcgcgggggtaaggaccattccgacttctcctccgacgaggcgctgctcgaccggctcccctattacggccgggttctggaacgccatgtcgccttcggaaccggcgatccgaacgatccggaggagaggcgcgtcggccggctcgccaacccgacggtccacatcgcgctcaaccagctccgccatctggtgaacgccgtgctggagcggtacgggcggccgaaggacatcgtcatcgagctggcccgcgacctgaaacagtcggccctcgaccgccgccgggaggagaagcggcaggccgacaaccagcgccgcaacgaggagcgcaagcggcgcatccaggaggtcggcgaacgcccgaccccccgcaacctgctgaagatgcgcctgtgggaggagcaggtgcagaacggcgtgcatttctgcccctacaccggccagaccatcgggatccgcctgctgctgtcccatgcggtggacatcgaccacatcctgcccttctcggtcagcctggacgacagcgccggcaacaagctggtctgcctgcgcgaggcgaaccgggtgaagcggaaccagacgccgtgggacgccttccacaccgatgaccacgtgagccgcggcatcctgccatgggcggagatcctggcccgcgccgagtcgctgcccaggaacaagcggtggcgcttcgccggggacgcgctggagaagctccggcaggacggcggcttcctggcccgccacctgaacgacacccgccacctgtcacggctggcgcacgagtatctgaggcggatctgcgacgatgtgcgggtgtcgccgggccgcctgacggcgctgctgcgccggcgctggggcgtggatccgatcctcgaccccgaccgtccgccgccggacgaagggggtgacgcccccgcccgcaagaaccggcaggaccatcgccaccacgcgctggacgccgtggtgatcggctgcatcgaccagggcatggtgcaacgggtgcaaaccgaggcggccagggccgagcgggactccgacgcgcaggcggagggcatcagccgtgtgctgaaggagttcgcggatccttggcccggtttccgcaaagagctgaaagcccgtgccgccaccatcaccgtgtcccaccgcccggagcacggcgtcaccggcgcgctccacaaggagaccgcctacggccccgtggctccggcggaggacggctgcaacctcgtcgcccgcaaacccatcctcggtctgaccaaaggggacgtggagggcgtgcgcgacgtccggctgcgccgctacctgctggatcggatcgagctgcgcaaacgcgacgccaacgatttcgcgggccagctcgcgaaggcggtggaggacgccgcggcgcacccgcactgggccggcctccgccgcgtgcggatcctgaagaaggaatcgagcccgatcccgatcgcccacggcaacggccggttcctgaagctggtgctggccggcgacgtgcatcacctggacatcatgctgcgcgccgacggccggcgctgggtgccgcgctgggcgaccctgttcgacacgcaccgcacccgcacccccgacggccgcgcggcaccgccggcaccggcggcgggcgagcggttcgtcatgcggctgcacaagggcgactgtctgaagctcgatcaccaggggcgatcacggatcatgcaggtgatcatcctcgagccctcgaccaacagcgtggtgctgatcgagccgcatcaggcgaagaacgaccgctcgctccacgtgaaggtgtcgtgcgatcagctccgggcgcggggtgcgcggcgggtgacggtcgatctcctgggccgcgtccgggtccatgcgcacggcgcccccgtcggcatcggaccggccagccgtggccgggagggtgatccatgaccggccgggtggtggagatcgccgaggacggccgccatctgtcgctgtcccgcggcttcctcgtggtgtcggccgagggccgcgagatcggtcgcgtgccgctggacgacatcgcggtggtgatggcgaacgcgcacggcctgacctattcgaacaacctgctggtcgcgctgtgcgagcgcggggcggtgatggtgctgtgcggctccaaccatgtcccggcggccttcctgtggcccgtcgattcgcaccatgtgcaggcgaggcggatgcgcgcacaggtggaggctcccgcacccctcgccaagcggctctggcaggcgtgcgtccgcgccaagatccggcagcaggcggcggcgctggactcgcgcggcctgcccggcggcggcctgctggagatggcgcgccgcgtgcggtccggcgaccccgacaatctggaggcccaggcggcgcggcgttactggcccgccctgttcggtgcggaattccggcgcgaccaggatgccggtggagccaacgccatgctgaactacggctacgccatcctgcgctcggcgaccgcccgcgccgtgacggcggcggggctgcacccgtccatcgggctgcaccacagcaaccgcggcaaccccctgtgcctcgtggacgacctaatggagccgttccggccgctgatcgatctggccgtgctgcggctgctggaggccggccacaccggagtgacgcgcgaggtgaagcggttcctggcgctggtcccgtccctggacatgctcaccgcccagggaacgacgcccatcggcacggtgctgatccgcctcgccggatcgctggcgcgcgtgctggaggaagggaagggcgatctcgatcttcccgcgctggaccggccgtgggcgcccatgcccctggaatggccacccccggcgccggacgaccgggcatgctgagcgggtaccggatgatgtggatgatggtgctgttcgacctgccggtcctcaccaagcccgagcgcaaggcggcgacccggttccgccagttcctgctcgaccagggcttcgagatgtcgcagttttccgtctatctgcggttctgcagcggcaaggagcaggtcgagacgctgaccggccgaatcgggaagaatgtcccctccaccggaaaggtccacatcttgtgtttcaccgaccgccagtacgaaaacatggtgtgcttcgacggccgcgcccgagccgcatcacgcaggaatcccgagcagtacgtcctgttttagccatgtcgcgcccgtttccaccaccctggaatcccggaaagccgctgaaaaatcaacgacttgccgggacagccagtgtagccgatggggatcgggggtccagccgcaacgccgccgggccggaggccgcggtttcgaccagtgtagccgatggggatcgggggtccagccgcaacgtctcgggaacggggccgcccttcgtgcgtagtgtagccgatggggatcgggggtccagccgcaaccgtaggcggggctgccttgcatggcctgtcagtgtagccgatggggatcgggggtccagccgcaacgacgaaggccgcggaccgtccggtacggtttccgg

SEQ ID NO: 3471 - DNA, 11197 bp, synthetic construct
  misc_feature 1..11197: note = Synthetic
  source 1..11197: mol_type = other DNA
taataatgataataatattctttttatttaaataataaacattattattataagttgtgttgatatgtttataagtagataagtagttgttttttctataattacggttttgtaacagtgttgataagttattaataaaacagtttttaataccggttatacacacagtgttgaaatatacacagttattaacaaattttccaccgcctgttaacaagttatccacaggttaattcaattttatatttaatatcttcgacggtctttttaaaaccttcgtcattcagtatttgtttttttaccgagtcgcacgcgtgaataacggtggagtggtctcttcccccgaaatggagaccaatattctttaacgataactttgtcatctctttactgaggtacatagatatctgccgggcgtttacaatttcctgctttctggttttatcacggatctttttctcatctatattaagatgatcactggtgatttttgttattacatctatgtttacggcaaccctctttgccgtcgaaatttcccgcacggtactttttgccagattaaggtcgatctccttaaagttgagcgcggaatttgcaagcaacttgataaggcaactttcgagttcacggatgtttgaagttatattacttgcgatataatccattatttcgtgagaaatagttatcccgatgtcttccgcttttttataaaggatagctatacgcatctcgtaagcaggcggctgaatatctgctgttaacccccagttgaaccgggaaataagccggtcctccatcccctgcagttctttgggcggtttgtcgcttgataaaacaatctgtttgttgtgctggtgcagaatattaaaaatgttaaagaaaagatcctgtgttttttctttattctttaaaaactgtatatcgtcaataattaaaacatccatcttccggtaaaacgcggaaaactcgtttattttattatctcttatagaatcaaaaaattcctgagtgaatacatctgttgaaagatagatgacttttttctccgggaaatctatagcaattttatttccgagcgcgtggatcaggtgggttttacccagacccacaccgccgtaaataaaaaacggattaaagggatttttacccgggttttgcgtgatggcgtgtgccgcggagaaggcaagctcgttgctttcccctttaataaaattatcgaacgtatatttgggattcagtccgttcggaacctgcggcgatgttttgatcggggcagattttatttttaattcgacaggcggttccggtatatcgggatttccaaaatcttcttcaaccaccctgaactcatatttaagatcgagtccggttgtttgtttcagcgcgcggtggatcaggcttttatatttactgtctatccactcggcaaaataaatatttggaatctgaagaatgattttgtcggcagtaagctctaccggttttaccggcgaaaaccaggttacgaaaggctgttcttttatctcaagtttgattatcttcgaacagtcctcccagatattccgggcggctgaaggttgctcttgcgtgttaattaaatacctcatttatatacagttatccacacttaaggcttttaaaaacggcataatttcaaaataaataaataaaaaatctgattataaaaagttatcaacaagttctcaacacactgttaatataaggtaaatccttataaaacaatgaattggggggtttctttttaataaactaacaaaaaaacagggttaagttaatatcgggggtttataccagcgtgaaacagggtttcacaaaaaaagttatccacattttatcaacaggcaccgagacccttaaacctggtacaaaataatcccgtttttactcccaaacaaattaaattttcaatatttattcctaaaaagatttattttaaaagcgtttcaaagataaattaattttttgcacacataaagcgaacggttcggcgaacggttcgcaaaaaattagacagaaaaaagataaatatgtactcaattttcgagagcgaagtaagaatcaggcccgatgatattgatgttaacaaccacgtgcacagttcgaggtatatggattacgtcctggcggccagatatgaccagatggaaaataattataagatgtcaatgaaggagttcctggagaagaacctgacgtgggtaatcagcgatgtgcacctttcttttaaaagggaactgaaactggaagacaagattgttacagtcaggacacagattgccgaagtaggcgcggcacaggccagggtaaacttctggatcctgaaaaaagagaacggaaaagaagctgcaaccggctattttttgtatacgcttgtttcaaccgtatccggacggccggtcagaataccgccggagattgtggaaaaatattcaatataattttagacacctaattaagaataaatgactgaattgttaagcggatccctcaataatttaacatccccgatggtcctgttttttatactggggtttgtagcgacggtgttaaaatcggacctcgaaattcccaatgcgataggaaaaacactttctatttattttatgatggcaatcggttttaaaggcggcgtagaattatcaaagaccggttttaccgacggtgtaatggtatcaacggcaattgcggtcattctcggcataataattccggtgttatccttctttgtgctttttaagtggttaaaacttgacgttacaaattccggagcaatagcggcgcattacggaagtgtaagcgtggttacctttgtcactgcttccacgtttctggaacaggcggccgtgcatttcaacggttatatggtggggatgatggcgctgatggaatctccggcaatttttgtatcgatactgcttgtccgttatcttaaaaaatcaacaacagatacggcaaaaggcgacttgcaggaccttattaaagaatcgctgttcaacgcaagcatcgtgctgttaacaggcggactgataatcggatatataagcggcgaaaagggaatggagatggtaaaaccgtttttcgttcagccgtttaacggggtgcttgcgctgttccttttggagatgggaatgctcgcgggaaaaaggatcggggaatttaaggaagtcgggcttgtgctcttcttttttgcgataattatgccggttgtaaatgcaattatcgcgataatacttgcctcctcgctggggctgagtgaaggcgaccgggtgctgttcgcggtgctctctgccagcgcgagctatatagccgctcctgccgcggtcagaatggctattccggaggcaaacccctcatactatataacaatgtcgctggcgataacttttccgtttaacataatctttggtatacccttttacttttacatatcacaattaatatagccggtgcgatgatgaaaaaattagagataatattagagtccgtgaaacttaatcccgcgctgaggatacttaaagaatgcgaaataagcggttacacactgattcacggcgtcgccggaacggggaagcacgggaggcagcaggggtttgagttaaccgacgtcactactaacgttatgatcatcgtggttgaagaacctgaaaaaatttataaagccgcggaaaaactaaaaactatgctaaaaaactacagcggtatggtgcttatcagtgacgtggaagttttttaatcaagtatcaatgatcagaaaattgttctgaaaatgaagttggcttgtgttgccaaccgcaggcctataacaactccgcggttctcttatagagatcctttagggcgctgctgaaaagaacagttgcgcaaagttacgcaaagaaggcgcagagggccgcaaagttttaactaaactttttctaaaccttgttcgagatcggcaataatatcagcggcatcttcaattcccacagcgaaacggatgaggtcatcggttattccggacttcagtttatcctccggcgacacctttgagtgtgtcatagaagccgggtgttgtatcagagtttctacacccccgagagaaaccgcaagtaaagcaagccgcacgctgttcatcagcgttttcgcgcccgtgaaaccgctttttaatccgaatgagatcatcgaaccgctgcccgacatctgtttttttccaacctcatactgagggtgggatttaagtcccggatatttaacccaggcaactttagggtgcgcctcaagaaaatcagccactttagccgcgttttcctgcgcgcggtctattctgattgcgagtgtttttagtccgcggataaccatatacgcctggtgaggatccatattgcacccgaggctgatcatcatattccttaactgagtgtaaatactctgttcttttgtaattataacgcccgcgacaatatccgcgtggccgttaatgaattttgtcatagagtgaaaaactatgtccgcgccgaagtcaatcggtttttgcagataagggctgctgaaagtattatccaccacgagcagaatattatttgcgtgggcaatttcggcacaggctttaaggtcgctgactgacattgtggggttcgacggcgtttcgatatacaatatttttgtattcgggcggattgcttttttcacggcttcaatatcagtggtgtcaaggtatgttgactggaatccgaagcgcgaaaattgtttttccattacgttgcgcgacgggccgtagatggcgtccgtactgacgatatgatcgccgctgctcataagcgcgagatatatggtagtaaccgcggccattcccgaactgacggcaattgcgccatagccgttttcgaggacggcaatctgctgttccagggccttaatcgtagggtttgcaatccgggtgtatataaaaccatcgcgttcgccggtaaaacactgcgcgccgtattccgcgctttcgaatgaaaatgttgatgtctgataaatcgggacggtggctgagccgaaccggtcgtctattgcgcctgcgtggataagttttgtattgaaacctgttttctcggtattcatttaatctcgttctatatttttaatttgatgatacagcgtgcctcgaagccgcagcgccgcccgcggttattatgccggtcccgactggctttgacataaaacaaaaaacggcggatttaaaagtagtgaacttgcgttcagaatacaaacaccggcgaaatagctaaaaaattataaagaaatcccccatagtgagaggggctttgtatattttgttacagggttgtgatgattgacattttgagttttattaattacgtttagggagtttaaaacaacaatcccgccagaggcgggactgctgtaaacttttcactacggaatgatccttattgtgatttgcttagtgaaagttaagggtttttttattaaataacaagcgaggtgtaaaatgaaaaaatttttaggtttggatatcggaacaaattctgtagggtgggcttttattgaatcatcacccgaagagaagaaaggaaagattgtcgctgccggcagccgcattattccaatgcagggccgtgataaagactttgaacaggggaaatccgtttccgctgccgccgacagaagaatggccagaatgacaaggcgtataaaacacaggtataaattaagaagaacgcgccttatcagagtatttaagaaacttggctgggtccccgaaaacttccccgaaaactttaaaaaacattccgccgaaaacggccctttcgacataaactattataccccattcgaagaatcaaccattaaagaactcaattcggtttttggaaccggtatcgtcccttcagactgggctgtatattttctgcgcgataaggggcagagagaacaactcactatccgcgaactgaccagggttatctaccattttaatcaaaggcgcggatttaaaagttcaagaaaggatcccagggaagcaaaagaagacgatccggaaaaatttccaaaacgcaagaccgagacattaaaccttaaggtgctttccctcaggcagactcagtcgcgaaaagaaagcacttatgaactgtcagcgtcatcagccgataaaggagaaattacgggatcaatttccctcaagactatgcctgactggaaagagaaatatgtaacatttgaagttacaacacagatcaataaagacggaactcaaaaaatttccttcaaactgcccgatcccaccgaatggcaaaaaagaaaagaagcgctccagaaagaaataaatgacagcgggctttatccgggacagttccatctgcaaaaacttcttgaagacagggattacagaataaaagacaggatcatcgagcgtgatttgtatatcaaagaactacgtgcgctttgggaaaaacaaagtgaattttatccgcggttaaaagacaaagaaattatggcggaaattgcccttgtgctttatccctccaatgccgcgaaacaaaaagagatcaggcataacgaccttctgcacgccattatgaatgatgtcatttattaccagaggccgcttaaatcacagaagcatcttgtcggtgaatgccgctatgaaaaaaagaacattatccttccggacggaaggcagcccggcgtaaaatgcgcgccaaaaagttctcccgaatttcaggaattcaggatctggcaggatatcaactccgtcagaatatacaggaacgaaacgcgcctcccgaacggaaaaataatttatgataccgaggtaaccggccaattggttaataaggaagtcaaatcaaaactgtttatgatttttgactcctctgctgccgtgaatcagaatgacatcctcaagttacttttccccggcagggggaatcaggaaaaagacaatcacaggtggaactatcccgaagaaaaagaatttaagggaaacgaattaaagtccctgctgagaaaagcattcagaagggccggattctcagaagaaggggagaagataatcgcggacccggataagttatatcttttatggcacattctttattctttggatgatgataaagccgtaaggaacgcgctgatcagcaatttcggaattccggaaaataccgcggaaaatctctcttatacggtcattcccactgctctgcagggatatgcgtcctattcctcaaaggcgcttaagaaactgcttcccctgttaagatgcggcgaattctggaaaaactcttccattcacagtgaaacgctcgaaaacatagggcgctttctgaatgagggttcggctcccaacaacaggcttgaagccataaccatacttaaagatgccggcctgaaaagcgttgaagatttcagcggcctgccgccccacattgcggcgtacacggtttacggttttcattcggaacggctgaacgagaacaaatattcttcgccggatgaaattaaaacacttcagcggggcgaactcaggaatccaatcgttgaaaaaatagtaaacgagtcgcttcttgttacaagagatatatggaaaaaattcggaaggccggatgaaatacacattgaactcgcgcgggaacttaaaaagaacaacaaacagagagaggaaatttataaacagaaccaggaaagtgaaaaaaacaaggataggataagaaaaattctttctttactgaaaggcgcaaatcccgattcacccgcagacattgataaactgagattgtgggaagagaccgcggattatgagacgcgtaccgaaatgccgaagttttcaaaggaacccgccaaaaacgaaattgaaaaatatatgctttggggagagcagaaccacttgtcgccatataccggcaggccaatacccctgagtaaactgttcacctctgcttaccaggttgaacatatcctgccaaaggcaagatactttgatgattccgccgccaacaagaccatctgtgaagccgcggtaaaccggtttaaggataaaaggactgcgatggaaatgatctttgagagcggaggcggtgaaattaagttccagggagaaaagttcacgctgctttctcccgaggcttacggcgatcacataaaaaggatattccgaggtaaaaagcagaaatatcttctgatggatgaaattcctgagggatttattgaaaggcagctgaatgatacaagatatataacgaaaaaactcggtgagctgctttttcctgtttcacgggaagatattgtgttcaccggcggacagataacttctcatttaagaaacgagtgggggctttccggagtctggaaggaaatactcaggccaagatttgaaagactggagagaatgaccggaaggaaattcatcgaaaacgatcctgttaccagagagttaaggttccttgccgattataaaagggtcgaccaccggcatcacgcgcttgacgccatagtctgcgccgcgacaacgcgcggacacatacagtacctcaacacgctgaacgcgatgcagggggacgccgcaaagtctttcagataccggtacatactcggcggaggaagaaagaggttcgcccttccctgggactcctttaccaaagataccctagatgcctgccgcggtataatagtttctttcagaaataaatcaaggcttgtttctaaaggattcaacatttacagaaaatgggttaatgataacggtaccctgaaaaatgtttttgtaaaacagaataatgagaaactgttctcggtaagggtttcgatgtttaaggaacctttcggcatctcgcttctgcgcgaaaaggagacggtaaaacttcacagagctttgcagatacaacttgaatatatccggaacggcagaaggcccgctgacacgagaatactcaacagagaagtcagggaaagggcggacgaacttctgaaaaactgtttttacgactgggaaacggcaaaagagcaccttaagaagaatccttttacgggtaaagacggatctccgctggaaaaagccgatattatcaaattctccgaaaaagcttcaaagagaacaaagctgggagcagacacaacagataaaactctgagcgagaaatttcctcattcggatcattccaaacttgctgaagcgctgcgggcacatctcggttctttcggcggcgatccgaagacggctttcagcgaagaggggctttcggttttcgcctcttcctggggctcccgcgtaaatcagatcaccgttacggaagaaatcggtaaaaagatattactgcacggaaagtattttgaaacagacaaagggggcaatcttttttacgccctctatgaaaatactgaaaccggagaacgtaaaggagagactctttctattcttgataccattgaccgactaaagaagggtcttcctccggcgccccaaatagagggatggacgctgacgatactttctccgaacgatctggtcatattacctgatggtggtaaaagtcccgacaatgtttatcgagtagtgaaattcacaaagaaagaaatccacttcaaaccacattatatttctgcgcgtttggaaaaatctgaactaggttctaatgactgcgctgaaaaaagctgggacttaaaaggagattcagtatggagccagcggacaatagtgaaaacgtgcagcaagattaatgttgacaggctcggttttataactgaaagttaaacattatgattaagaaaacggtctgtttttcaaatcccgtgtatctttcaaaaaaagatatgcagctcaaaatggatttccccggaaatgagagtgaggctaataacccggcacttgaaaggacaagcattccgattgaagatatcggcgtaattatactcgaggatcatcagataacactgacaaccgggcttcttgccgccctgcttgaaaacaattgtgccgtaataacctgtgattcttcacatatgccggccggattattcctgcctcttgaaacaaactctctgcaaagcaaacgcttccgcgagcagattgaagcatctaaaccgctcctgaagcagttgtggcagcagacgatcagcgcaaagataaaaaaccagggcgccctactcgcggaaggcggaaagaattttaagaatatgctgatctggtcggaaaaagtaaaatcaggggactcttcaaacctggaaggacgggcggccgcgtattactggaaaaacatttttcccgaggaacttgatttcgcaagggacagaaacggactgccgcctaataatcttctgaattacggctacgcgatactgcgggcagtagtcgcgcgcgggcttaccggatccggcctgattccggcgctcggaatacaccaccagagccagtataacgcatactgccttgccgatgacattatggagccttaccgcccctatgttgattttgtagttctcgggataattaataacggagaggattttgaagaactctcgccctctgttaaaaaacaactactggggatcccggcgctgacagtgaagattaacggagaaaaaagcccgcttatggtggcggtatcgcgcaccacctcttcgctggttaagtgttattcgggagaatcaagaaaaatcctgtatcccgaatttacggcccccggccgctgatggaactgaacgcttacagaattatgtggataatggtattttttgatcttcccgtaaaaacaaattctgagagaaagagatacgcacaattccgcaaaaacctgatgaaagacggatttgaaatgcttcagttctctgtttatatacgccactgttccagccgcgagaataaaaatgttcacgtaaaaagagttaaggaatttcttccgaaagaggggaatgtcggaatactatatgttacagatcagcagtttggaacaatggaaatattctacggaaaacagaaagcgggtaaagaaaatgttaaaccggatcagttggagttgttttagttccggggccggtgaagccccggagcataaatctgtaacattttctcaatcctgcgggacgggttaagttgttgttttatatagagttgccgaaatcgtactgttacaaatctctgtataaaaatatttgaaagcaaatcacaacgcataagcgtgttataagccttgca

SEQ ID NO: 3472 - DNA, 23039 bp, synthetic construct
  misc_feature 1..23039: note = Synthetic
  source 1..23039: mol_type = other DNA
tttgaaaaagcgatagaaaatattaaaccacttttagaagtcaagtctagaagagtaggtggagcaacttatcaagttccaattgaagttagacctgttcggcgtcaaacattagcattaagatggttaattgagatggctagaaaaagaaatgaacgaactatggttgatagacttgcaaatgaactttttgaagctgcaaacgagagaggaaattcttttaagaaaaaagaagatatgcataaaatggctgaagcaaataaagcatttgctcactatagatggtaatctaatatggcaagaaaaacaccacttaatagattaaggaatataggaattgcagcgcatattgatgctggaaaaacaacaacaactgagagaatcttattttacacaggtgttgagcataaaattggtgaagtgcatgatggtgccgcaacaatggactggatggaacaagagcaagaaagaggtattacaattacttctgccgcaactacttgtaactggaaacatccgaaaacaaatgaagagttaatgattaacattatcgatactccaggtcatgttgattttactattgaagttgagagatctatgagagttcttgatggggcagttgcagtattttgttcagttggtggagttcaaccacaaagtgaaaccgtttggagacaagcaaataaatatagagttcctagaatgatatttgttaataaaatggacagaacgggagctgatttttttaatgttgagtctcaagtaaatgaaaggttaaaatctaacgctattcctatccaaataccaataggtgctgaagaaacttttgctggcgttattgatttggtgcaaatgaaagctatcgtttgggatcaagatgcggaaatgggttctaactatcatattgaagatattccagctgatttgctagataaagctacagaatatagagaaaaaatggttgaagctgctgctgaagcaaatgatgatctgatggaaaaatatctcgaagatggcgaattaagcgaagatgaaatagtcgctggtctaaaagagggttgcttaaatatgactgttactcctatgacttgtggaaccgcatttaaaaataaaggtgttcaaactttacttgatgcagttgcaatgtatatgccagccccaacagaagttgaagatatcaaaggtgaaacacaagaaggcgaagatgttattgttgaatccactgatgatggagaagtagctgctcttgcatttaaaattatgacggatccatttgttggtcaattaacatttacaagaatatatagaggtgtcttaaaatctggtacctacgtacaaaattctactaaaatgaaaaaagaaagaatcggaagacttcttaaaatgcatgcaattaagagagaagaggtatctgaactttacgctggtgagattggtgcggttgttggtcttaaaaatacaattacaggcgatacattagctagtgaaaaagaccctgttgtactagaacgaatggattttccagaaccagttatctctgttgcagttgaaccaaaaactaaagcagatcaagaaaaaatgggtattgcacttggaaaactagcacaagaagatccatcttttagagttgaaaccgatgaagaatctggtcaaactatcatatcagggatgggagaacttcatctagaaattcttgttgatagaatgaaaagagaatttaatgttgatgctgaagttggagctcctcaagttgcctatagagaaactattaaaaatggtgttcaacaagaatacaaatatgctaaacaatctggtggtcgtggtcaatatggtcatgtatatctaaaaattgatcctatgagcaaagaagaaacaaatgaagaaggtttcgaatttgtcaacgaaatcaagggcgggagtattccaaaagaatatattcctgctgttgaaaaaggttgtagagaaacaatgcaaggtgggatcttggctggttatccgctagttgatattagagttacggtatacgatggttcttatcatgatgttgattcctctgaaatggcatttaagcttgccgcttctatgggatttaaagctggatgtagacaagctgatgctaaagcttgtatattagagcctatgatgagagttgaaatcgaaacacctgaagattatatgggtgatgttattggggattgcaacaaaagaagaggtcaagttcagtcgatggatgatagagctggagtcaaacttgtaattgcacttgtgccattagcagaaatgtttggctattcaaccgatctaagatctatgtcgcaagggcgtgcaacatacagtatgatttttgatcaatatatggaagtaccaaaaaatgttggtgaagaaattatgaaaaaaagaaatggttagactaatattgaccaacaataaataagaaaggaaattctaagttatgccaaaaatgaaatcaaatagtggtgcattaaaaagatttaaagtcaaaaaaaatggctcgattaaaagaggaagtgcttttagaagtcatattttaacaaaaaaatctcaagaaagaaaagttagtcttagaggaccacaaactgttaaagattgtgacactacaagaataaaaagaatgctttgtaaagcttagtttatatgttaaattgagcttacattttgtccctccatattaaatatggacaagtttgacacaaattaagtgttaacaccaaaatattatttaaatattttatggtaaagaaaggaaaataatatgcctagagtaaaaactggtacgataagaagaaaaagacacaaaaaaatccttaagatggctaaaggtttttatagtggaagaggaaaacattttagaaaagcaaaagaagcagttgagcatgctttagtatatgcatatagagatagaagacagaaaaagagagattttagaaaactttggattattagaataaatgcagcttgtagattaaatgatataagctattcaaaatttatgaatggtcttaaattggctaatattgatttagatagaaaaatcttggcagacatggctatgaatgacactacatcatttgaaagtttaattaagagtgcgaaacaagctttaaaataatctaataataagtctataaaatgagtcaattttatagactagccattttagctatataaaagtcgaatattcatataattaacctgggttaactgtatgaggaacaacaatgacagcaaatattttttttgggtcctacgaagaatcaagagaaaagcttcaaaatatcaaaaatccatattctggtgaaattatttcaaaatatccaccatgtacaaaacaagatgcactaaaagctctaaacatagcaaaactagcttcaaagaaaacaaaagaatctacacttgcgcaaagaatttcttggcttgaagatgtagtctttaagttaaaaaaaaataaagaagatatagcaaaaacactatgtgatgaagttggaaaaccaatcacttatgctcgtattgaagttgatcgttgtatcgaaactgttaagctaagctgtcatgctatgatcaatcttaatggacatactataaatactgatgcaatgccaagtggcaagaaaacaactgcttattattctagaaaacccgtaggtgttgtagcttgtatcaccccttttaattttccattaaatttagtagctcacaaaatagcccctgcacttgtaagcggaaattctgttgtattaaaaccaacaccagaagctcctttgactgcatataaattcgtaaagctttttgtggaatctaaatttgccatcaaagatgctattagtatagtgtatggtgatgtagaagttggtaatactttagtagagtctgatattcctagagttctctcatttacagggagtgtacaagttggaaatattatcgccaaaactgctggtattaaaaaaatagctctagaacttggtggcaatgcagcaacatttgtcgatcaaagtgcggacataaaattagcagcctcacgatgtgcatatggagcttttatcaacagtggtcaagtatgtatatctttacagagaatctatgtagatgaaaagatttatgataaatttgctaaatatatgaaattagaaactaaaaaattagtagtaggaaatccttatagcagtgacacattcataggcccacttattgataataaatcatgtcaacgtgctacatcatggataaatagtgctatagatgaaggagcagtttgtttgataggaaatagatctaaaggtctaaatttttatcctacaattatggcagaggttacggatgatatgaaaatagtttgcgaagaagtttttgctccaattgtatctttaataaaagtcaaaaaatatgagcaagcagtagagaaaatgaataattcgccttacggcttacaatttagtatctttacgaataatttacaacaaacacaaagctttataaatgatactaattgtggcggggtagttataaacgatattccaacactaaggtttgacattcaaccttatggtggaacaaaattaagtgggataggcaaagagggaccatcttttgctatcgaagaatttacagagataaaatctgtaataatatgttaaagtttaaatctttaactaggccctaataatacacaaaaaattacaatcgagactcgtatcttcttaatgtataaagtttctttaatgctttttttctagcgttaattctttgtttttttaatttctcaggattagattcaaagtatcttctagctcttgtctctgttactattaaatttctatcacattgttttttaaatcttctataagcttcatcaaatgattcgctttctctaacttttataccaggcatttatatttcacctactttcttgcatagatttgacttttcaaatagccattgcttcttgtggtagaattatatataaatttgtcttaaccttcctttaagtataatagagactattttatagcaatcggaggaaaggtattggaattaacacacttaaatgaacaagatagaccaaaaatggtagatgtgtcgagcaaaaataatactactagagttgctgtagctagtggcgttatagccatgagccaagatgcttttaacaatataataaataatgaaaataaaaaaggtccggtacttcaaacagctgtagttgctgccatacaaggatctaaacaaactcaccatttaatacctatgtgtcatccattacttctagctggaattaattgcaaaatcgaacaactaaatgaacttcctggatttaaattaatagtaaccgcaaaactatcaggacaaactggtgttgagatggaagcattaacaggcgttagtataggtcttcttacaatttacgatatggtaaaagctattgacaaaagtatgacgattaaccatatacaactgcaaagtaaaagtggtggcaaaagcggggaatacaaaagatgatagatttaaataaatatactgtaaagatcgattatccttgcaattgggaatataaaattattatacatcatgaacaaactattgaagatattatgcaagaggtattagaacgcagaaaacataatattcaaccatccaataaaagcactaaaggaagatttaaaagctatactctagagatgttggtacataatgaaaatgatagaaaagagctatataaattattaacggaccacaaacacattaagatggttctttgaagaataatataatttttgaaaatgatttaataaaaatcgagatcgaaccattcgaaataccttggttaaaaatatttacacaacaaaatattaaagagtttagtcagtgcgatcaagagataaaaatgtctattctagaaacattagacataatagaaaaagagatgcttagctattttaagccagacaaaataaatattgcatcgtttggcaactatgttcctcgtgtccattttcatatacaagctagatttaaaaacgatagtttttatccagaatctatttgggggatcgaacagaggcaaaatacattaacactacctaactttgatatattttacaataatataaaattaagattaaacaagatataattatcttaatgaatagaagaaactttttaactcttagtgctatttctccaatcttagcaagtgatttgtttgctaggactcatcatgcaaacagtaaaaaagatgtttatctttctcgtcaagaatttcacaccctaatatctcttaaaaacagactaagaagagttagaaaatacattggatttgcgaattttaatttagtatcttttaacaatgctttattctacggtagaaactatccatatattggtaaattcaccaaactagaactaaaactaatagataaattattttacgaatcgccaagggaatacggttttcatggaaatagaacttcttctaatatcaacaataaaatatcaaaaaaaaatatcaaaaagattcctagaacagggcattatttatttaaagatacagctcttctagattataaacgacttcaaaaagatattggtccgcatttggttttgacatcaggcattagaaatattgtaaaacaattagatctatattgtaacaaaatatacagatgtagaggaaatatgacaaaagcttctcatagtattgctccgcccggctactcatatcatacaataagtgactttgatgtaggcaaaaagggatggggaacaaaaaactttacatctgattttacaaaaactattgaattttcaaaaatgacaaaactagattatatagatatgaggtatactataaataataaagatggggtacgattcgagccttggcatgttaaagttatttaagtttttacttttacttttttattgttctcacttaaatgccaatcaaacttttaattttgatcttataaaaaaaggtcaacaaaacaataatacactcctaattgtaggtggtattcaaggagatgagccaggtggatttatatctgcttcattaatagcaacacattacgatataataaaaggttcggtttgggttattccgaatcttaatttttatagtattattaaaagaaatcgtgggccatatggagacatgaatagaaagtttgcatctttatccaccaaagacccagaatacaaaacggttgaacgcattaaacaatacatcaaaaatgatagtgtaaagctaatcgtaaatctacatgatggtagtggattttatagaccacaatatattgacaaacttcattctccatacaggtggggacaatgctctatcatagaccaatcaaatcttaatatagaaaaatatggcaatttagaagaaatatcaaatcaagttgtacaacatgtaaataaatttcttataaaaaaggaggatatatatcatctgcataacacaagaacggtagagggcgacaaagagatggaaaaatctcttacatatttcgccatcaatcaaggtaaagcagcttttggaaatgaggcaagcaaaaatcttccaactagccaaagagtttattatcatcttttagctcttgaaaaatacatgaacataatgggaattaagtttaaacgaaaattcaaactatcgtctaggggtgtatacaatgctattaacaatgatatttatatatcgttatataacgataaaattaaattaccattaagtcaaattagaaacatattgaactattttccaatagaaaaaaatggtatcgtatattttaaagctagcaatcctctccttactgtacttaaaaaaaataatatttacacaattcaatacggcaatagacgtttgtctcgcttaaaagctgattatcaatattatgacaaaaataatacttctgtcaagctacaaattgataatcaaacaaaagaaattaaatttggaacaattgtagatgtaaataataattttatggttcatgaagacaacgcatatcgagtaaatatcataggatactctacaaaaaaaggtaaagaaactaatatcaaaattacaaaatcaaaaataccaaaaaggttttccgtggatactaatggtaatatttatagagtggagtattataacgataaaaaattcgctggtatgattttaataagatttaagagttagttatattaattataagtcttattaattataaactatgttatacttatcctcattaatcaattaggagtatttcatggctaaaaaaatagaatcatcatacagagtcaaaaggtactggatgtatatagtagcaactattgttgctgttgggacaccttttattcaaattggtgggaatcaaattttcctattgtcatttgacaaaaaacaactacatcttctaggtatagcttttgatatgcaagaactttatatgatgccttttttactaatgttaatgtttattggtatttttgctgttacagctattggtggtcgtgcatggtgtggttgggcatgtcctcaaactatttttagagtaatttatagagattttattgaaggtaaaattttaggtcttagaaaaataaacaacaaacaaaaagagccaaactggggcaagaatataaataaattaaaaaaagttactggtatccttatttggtttggattatcattacttgcagcttgtgattttatgtggtatttcataccgccggcagatttttttgcatatattgctgattatacaaatcatagtgtaactattggatttattgttggtatagctttatttttggtatatgatattgtttggctacaagaaaatttttgtgtatatgtttgtccttattcaagagtgcaaactgttttatacgatgatgatacatatcaggctatatattctgaaaaaagagggggacaaatttataatcaaaataaagaaaaaattatttttaaacaaaaggatgttcctcaaaatatggattgtacagcttgtcaaagttgtgtaaccgtatgtcctacacacattgatatacgaaaaggtatgcagttagaatgtataaactgtttggagtgtgtagatgcttgtaccaccgtaatgggtaaactgggtaaagaaagtttagttcagtggtcaagtacaagtataacttgtgatgataaaaaagtatcgtttttcagaaaaaagaccatcctttacttcgttatgatattaggtattataggtatgctttttgttatgggaggagaaaaagaatatatgttgctaaatataaacaaaacaacaaagctttattctattaaagataacggacaaagagtagaaaatacttttatattattgtttcaaaatacacaaaaagaaaattttacatacgatttagaaattattggcaaatatgctgataaaattaaaataaaaagatttatcccttttaagttgagtcataataaattagctaaaaaagttataaagctatcaacaacacaaatgctagttaataatccaacaaaagacacacctattaccataactcttagagcttatgcgaaagagaaccctaaaaaaataagtgtacttagaaaagctgtttttatttacccaagagctgacaaactaaaatagagtataaataatacacagcttgggttaaaactaaaagatgataaatataaactttttaatatattttcactgtgtgtttattttatgagctttaatagaactatactgaattcttaagaaatagcaaaaattctaacatattacacaccatgtggtaaaactgacatacaatgaaaaaaaataattttgtagtttattattatgaagaatagagaagttttaaaaagatgacaacttaatgtcagttcaactttgctcggaacttcataaccgattattatagacatactgttcccacacaaatatgttacaataagattatatatatatttatctttaaaggagttgaaatggttgaaagaattttaggtttagatgttggtattgcttctgttggttgggcattaattgattatgataaagaaaatctacaaaataatcaaatcattaaaagtggtgtgagaattttcactattgctgaaaatccaaagactggtgaatctttagcacttccaagacgacttacaagaggtgctagaagaactaataagagaaaaaaacaaagaattaaagctattaaaaatttatttgttgattatcttaatttatctcgagataatttatttagtgaagataatatttttaatacaaaagcgttaattgatgtttggcaattaagagataaagctcttaaaagaaaacttactaatgttgaatttgcaagagttttaactcatatatctaaaagaagaggatataaatctaatcgtaaagtagaagaacaagctaacagtgatggtaaaaaagttctaagtgctatagaagaaaataaaaaacttttaggtaaatatttaactattggacaagctatttatcacaccacaaataatgatacagataagcaaactagaagaaataaaaaagataattataatcatagtgtatcacgagatattttgcatgatgaagtaaatattatatttgaaaaacaattaggatttgataataattttgcaaatgatgaatttaaaaagaaatataaagaattatttgtaagacaaagagatgttgcctctgttgatcatatggttggcacttgtacactagaagggagtaatgaaaaaagagcagctaaaagagcttatagtagtgaagagtttgtaacattaacaaagcttataaatacaaaactaataaatgaagatgaggaagagagatattttacaaaagatgaattagaaaaattaataaacttatgtaaacaaagtgaacagccatcatataagaagatgagagaatcaatacatttagaagaaaactataaattcaaattattagattatttaaaactagatgaaaaaaaacaaacaggtgaatttataaatccagaaaaagaaaaatttaaaagtggatttattggttttcataaattaaaaaaagtagtagaaaagtctttaagtaaaattcattggcaaaatatatcaaatgataaaagtttattaaatgatattgcaacaattttttcatatcataaaagtgatgattcaatacaacaagaacttgagaaattaaactttaaaagttttagtaaagaagaaaaagaaaagttaattaatgctttaattttaaatattaattttgataaatttttacatctaagtattaaagctattgataaattgttacctttgatgagagatggaaaaagatatgatgaagcagttaaagagattggatataaaaagatagctggaactaaagagaaatttttaagagcattaaatagtgatgaaaataaagaacttacaaatcctgtagtaaaaagagcaatagcacaaactagaaaagtcataaatgcgttaatacgaaaatatggacaatttgacaaagttcatatagaactaacaagggagattaaaaaatctcatcaagatagaaataagataaaaaaagggcaagatgaatttcaaaaagttaagcaaggaattgtagataaatttatagaggattatgggagaaaaccaaaaggaaatgagcttttaaagtttagattagcaaaagagcaatattataaatgtagttatagatgtatatatagtatgaagcctatatcggaaaaagatttactaactcaaggggtagttgaaatagaccatatattaccatttagcaaatcccttgaagatggtatgtataataaagttttatgtttaacaaaagagaaccaagacaaagtgaatagaacaccgtatgaatactttacacaaactaataagaattggcataaatttgagaattttgtaaaaagcttacacctaggaaaagctaagactacacgacttttaaagaaaaatttcgataaaaattcagtattcgataaaaattcagtagaagagtttcgtgagcgaaatataaatgacacagcttatatggcagtatatataaaagattttattgaaaataatttagagttaaaatcgaacgttatatctatcaatggaactttgacaaatatgttaagacataattggggtataggaaataaaagtagagataatcatcttcatcatgcagtagatgcaattattatagcctttgccacggatagtgaagtgcaaaggttgtctactttatctgctaagataaatgaatttcaatttacaaaaagtgaaaaaaaagcagataaattaaaatttatacctcctgtagaaaaatttagagatgaagttcaaacaagtatagatgatatatttgtgtcatttgctccaagaagaggtgtgacaggtgaagcacatgaacaaacaatatttagtccgaaagatttgaaagcaaataaaaagcaagaaaaaccatcatatttaacaggtggtagtactattagaaatgtaacattaaataataattcaaaaatagcaaaacaaagttctatgccaagaattgatatatttaagaataaaaatacaaataaattttatgtagtacctatatatacagttgattttataaatgaaagtttaccaaataaagcaattgtatctgggaaaaataaagatggcagtttaaaacaatggctagaaatggatgataaatatgaatttttattttctgtatttaaaaatgaatgtatagagataaaaacaaaaaaagaaatcataataggttattttgtttctgctcatagtggaacaggagcattagaaattaaaaatcataataatattgaaaatgatatttttaaaagagattcttcaaatgtttgtataaaatcaacaggaattcaaaatgcgatatatataaaaaaataccaagttgatcctttagggaataaaaacgagataaaaaaagagccaagaataggaacaaaaaagcaaaacaaaaaggataagtagtgggatggcgaactatagtaataagcaagccatctaaaatatcccttcataaacataactttttatatacgccaaatgatgatgaacctataagtgtacctattgatgatatttctgtaattatacttgaaacacatcaagttactataacatctgcattgcttagtaaattggcaagtttaaatatattgttatttacttgcgacaataagcatatcccaaatggtgtatttatcccttttcatcaacacagtcgtttctcgcttatggttcacatgcaaataaaatggtcacaagcctttaaaaaaagagtatggatgcacataattaaacaaaagattaagaatcaatcttatgtattacaacaaaatagcaaagcagtagaagcaaaagaattggttaatttatcaaaccaagtaaaatcaggagatagtacaaatattgaaagctatagtgcaaagctttatttttcatatttatataagaactttaacagaagagatataagtgattggagaaatggtgcaatgaattatgggtatagcataattagaggtgttatttctagagatataagttctagtggatttataccatctttaggtttgcatcacaaaaaccaattaaatgcttttaatttgtctgatgatattatagagccatatagggcatttgtagatatgagagttgataaaatatttaaagaagaaaatctcaaaaaactagatgaattaagctttaatcataaagttaaacttatagagttactacaaataaaagtaaatataaacaatgagaatacaacacttttaaacagtataaatatatatgtaaattcattagtaaattgtacaaaagagaataattttgatttaatattgctcccaaagttctcaaatgcaagaatatgaaagaagatttatgagattatttgttttttttgatttaccaacaaatacaccaaaacaaagaaaacaagcaactcagtttagaaatatgctaatcaaagaagcttttatgatgttacaatattctgtatatgtaagagtttgtaaggggcaagaaatagttaataaatatattaaaaaacttgaagaaaaattaccagatgatggaaatattagagttttacaaattactgataaacaatatgaaagaatgattttactaattggtgaagaaacaagagaagaaaaatgtgtaggaatgaaacaattattacttttttaaatattttatacaattttattaattttttagaaaaaaaatgaacttttttgacatatattgttaagttttaatcattttattttgataaaaatagttttaaaacctatacaataaaggctttccaggctagtattatagcatatttgtgtgggaacaggtgctataactctactcgtgtagttgttgcgaacttttgtattatagcatatttgtgtgggaacaggtgctataactatggcttatctagtacaaaagtattatttattatagcatatttgtgtgggaacaggtgctataactcgaaaggctcttttgatttttgcaattcgattatagcatatttgtgtgggaacaggtgctataacttcaaggacaattccgctcttatattttattaagtttgttttgtatgccagatatataatctaatttaataaaataaaatccgaaatattcacaatatgcaatagcaatttttaatctatttcatcaataagattatcttcctttaattcccaactactctatcatctgagttatagcatctactgaagcacttgtcatatccaaatctaaatgctttgccccttttacttttataagttttacatttaagcccttgctttttaaggctttataaaagtttttatttctttttgaagtagatatcgtatcttttgtcccataaacaattaaaaaattagtgcttttatctacattatctacaacatctattaaagagattaaattcttagaatttttcatcatcttatgaatatcataagctccaccagcacacacaatattttgaataagttttgggttatatcctgtgatcgttgcgcccaatatggctcctgctgaatgtcctatatagttgatcgttgttgctttgtatttttgtttgagttttttgataagctcgttcataaatacaatatactttttttctcctactaatgttggtttattatgaccatttaacaagcctttaaaattgtttgtagaagattgagagtatcccggaagtgctactgctactgttgtaatgtctgtgtttagatttatagtttcaacaaatacagcatatcttgccaaagtatctgtcccctctttccatgcaccatgtactattatatttaaagtatcttttttgtcaccttctgcttctatatattgaatacactccccacctgcaaatatataaccatcgcctttgcttttgcattcaatctgtgatactttttcttcggtggttattgttttaatattttgttgtgcatcttgtgcaatttcttctggatttaaaacctctgaataagcacttgaaatacaaaaaatccaaattaaagctatattgtacatcaaaacatccttatgcatataataaacattataacttaagtttatctatatgtaaaccatctaatactacttaagctttttttgttacaattgtaaaaaatttaaaggacaatgcatgccagtgttagatagtttcaaagtagatcatacaataatgaatgcaccagcagttcgtatcgcaaaacaaatgaaaacaaaaaaaggtgatattatcactatttttgatttaagactttataaaccaaataaaggaaaaatgacaagcaaagggatccatacattggagcatctttttgctggatttattagagagcatttaaatggcgacgatgtagaaattatagactgttcgcccatgggctgtagaactgggttttatatgagtttaataggaagtccaaaagagaaaaaagttggaaacgcagttgtaaaagctatgaaagatgttttaaaagtgcaaagtgaaagtaaaataccagagcttaatatttatcaatgtggtacttataaaatgcatagtttagcatctgcaaaaaaaacagcaagatatgttattaaaaaaggtgttgggcatatggataataaaaaattatcacttagtaagaaaaaaatgaaagaattaggcatataaaataaattttatacaaactagcgatggctccaacacgctttactcaaaagaattttctcaacattttcataacgtaaaagatggggcattaaatgagtccttatataaacatgttgttcctgccataacatatcattgtgaaagaaaagaattaaatattttagatatttgttttggtcttggatataacactttggccactatttattatattcaacataataatttagacatacaaataaatatttactctccagaaatagatacaaagctaattggatcgcttaaaaactttagctatccaaaagaatttaataatctaattaatataataaaagagcttagtgataatttatgttataaagataataatatttctatacaaatacacaatggcgatgcaagaaaatatattaaaaaactatcaaatattcatattgtatatcaagatgcttttagtagtgatgtaaataaagaattatggacaaaagagtattttgcaaatataaaaagaatactagctccaaatagtataattaccacttactctattgctacccctattagactaagtatgtatgaaaatgatttaagaatatatgaatatacaaatatatatacaaataaatctactgtagcattaagtcgaacatcgatatttgaccaacataactataaattaatagatatggagttaaagaaaacaagaaatcctactgcaaaatctttaagagattagaccttataaataaaacccgtatttgcttcgacagctatggttgccttattgttattttcatcatacatattgatgtagcaagtcttagtaatttcataatcttttattggagtaccgcctagttgagaatatattttaccatcatgtgcaaaactaatttgtccaattgcgctagttgtattacagcttacatctacttttgttaccccaaattctgataataaaatatatttgcttttatcattaagcgtatctcttgtacagccatttgaatataaatatttatttgtcaaaggatcctttaagcaatcttcttttttataatgtgccgtgcctccacttatgtcgctatatacaacataatatattccccctatacttttattgcatctgtgaaattttaacgtccaccaagccttataccatttattatttttatgatcaaatttattatctatcatagccatgtatctggtgtattttaaatacaaaaccatcttgttagttgctatgtttagttttgaactattattttttgggataaactgtgttattataataccaataagtactattgctagtatgagttctaaaaaagaaaatgattgtttatctatcgcttgatatttacgcatttattagatattatcctattttttaaaatacatagtactaaatttaatattaaaagctataatccgcatttatattgtataatctcttattcttaaaaggacgttacaaaaataactatgcagcatttgacaaatcttcttaggccagatactatagatgcttttataggacaaactcatattgtaggtaaagataaggcgttgtataaattaataaaaacaaaagatatcccccatctttttttttatggacagcctggtactgggaaaacaactttagctaaaattattgctaaacatagtcaatacgatttttattattttaatggtacaagtcttaagatcgaagagttaagaaatatatttaaacaatatcgcaatactttaatcaagcctctaatatttattgatgagatccatagactctcgcgcactcaacaagaggttttattgcctgttatggaagattttagtgctataatcattggtgctagtacagagaatccctactttaccttaacatcaggtattcggtcaagaagttttctatatgagtttttatctttaaacaaacaggaactacaacaattaatcaataaagccttagactatttgcaaataaatattgatataaaatctcaaaaatatcttattaatacagcatcaggagatggcagagcattattaaatttattagactttgcacataaagtagataaaaatatttcattatccaccttaaaagaactaagattcaatagcatagaacatggagcgaacaacaataatagccactatgacattactagtgccatgataaaatcacttagaggaagcaatatagatgcatcgctatattacttgggaagacttatagttgcgggagaaaaaattgattttatagcaagaaggcttgtaatatttgcaagtgaagatatagggaatgcaaatccaaatgctttaaatattgctgttaatactatgacatcagtacaaactatcggatttcctgagggtagaattatattatctcaatgtgtagtatatttagcttcttgtccaaaatcaaatagtaactatcaagctataaatacagttattgataatattaaaaatggcaaaatacttcagatcccaaaaaatataaagaataatgcctttggatataaaaatccgcacaacgatacctttgctgatcaaaagtatttagaggaagatttacgcttttacaactcgaaagaaatagggtttgaaaaaactttaaatgcatgggtaaaaataataaaaaaatcaaaggaaagtcaatgaatattatggattactatttaggaattgtaacatttcatgttgtagctgttatctcatggatggccgttctcttttatcagccaagattatatgcatatcacactgaatataaagataaaaaagagtttgtagatatagttaaaattcaagaatacaagatgtataaatatataagagttcctgctttatggagcactgtattaagtggtattcttatgatatatgcgaatcccagtttattgcaagaatcttggatgatagcaaaattaattgttttaatactagtaattgcttactctttctctcttgactattttatgaaaatactaaaagatgacagatgtactaaaagtggacaattttttagagcttacaatgaagttcctactttattatctatacttatagttacttttgtaattacaaaatcgatacctatttggttttgcataggaattacactattttttggctttattatttataaaatattaacacttaaaaaataaataatttaaaaatgcacttcaataccaactttagttttatattcatctggtgttgaatcatttttaatatatttgattgtcaaaggtattggaaatagatgtactgctaacagattaagctttaaactaagaacattttctgttatagtttcatcagtgttagctactacattataattatacaaattgtgtgtatacgatatgacttcatttctaatagatattggaaaattagtaaaataataacttaaatcaatcgttgtcgataaccctatagatagtttggttatatcttttacaaatatatcgttattgttgtcttctataagtacatttgtaatgtcctgttgtgagttcagaacattagtcgtaagtcctattcctcgataatcttctagcttatctacatcagaataaagccgtagtatttgaaagtgtgaatacaattgtctaaaaatattagcattaacactcaggtctgcaccatatattttatcctctctatcttctttgaatattcctgataattttgttgcaaaatatggagatgattcgaatttcattgtttctttataagtatgatttagattaaaaatcattggttttttatctttaaacgtatctgcatagtatttctttaattttacatctacactatgtctacctttcttgagtaatggatcataaatttcaagacttccgccatagtctccttgatctgcatctttatttattattttgtgcagatctatcttaaaagaaatatcctttgtgtgtgtatatctaaatccagcaatattttcttttttgtctttatgtctatatatatctaaactattaaaatcaactatatcttgaaaatgagcatcgaacttataaatacttccatctttagaatcatgctgatacgatggatacaaataactaaattctaattgagaccattcgttgtatgttacggaatgtaaatcttctaatttattgtcgaatttaaaggcatatgattcttgatcattttcgttttcatttacaacatcttcatattcgatgttacttacagcttgacttgctaaagatatctttgaaacgttatatccatttgctgtaacacttacaactattgcattatctttatctattattttaccatttatgatattgtcacttgcatgtagtctatttaatttattgttactaaatttatacaaactgcttccattttctgtattggctataaaatatatctcatcatcaacaatatcaataatttttgaaaaatatccatcaaatctaaaaatttcatttttattcttatataaaactcgcttatcatttagttgtttaaaataatagatatttccacttttgtcaaacaatgtgcttgatgatactttggcataaaattgatcattaatatatagtttagagtataaaaatgactcattgatatttatatatgccaacttatcatcatatatatcatctatttttttacctttagttgtatctagtatataattatcttcatcaaaaagtccccatttctgctctctaggagatataacaccagatgcagctacataaaaagtatcattatatttaaatacttttccattttgaaaccgtgtattattatatacatgattatcgctatttatatcataagagtgaagctgtttttttgattttaaatcgcttgtaataaaatatattttattatctattttagataaatctatactgctttttgatttagccaataaggtttttggttttagttctttaaaattcttatatttatcttttgtatattttacaaagttctctacagagctttcaaaacttatgccaaaatactttttaaatgttagatttaaagacaatgggtttacataatgatccgaatgttcatagtaaaacttattaactttattaatgccatgatgcttggctaaatatttcataaaatacccgccgactatatatttttcactacgatatggaaattctaaatgatcgttaataagtctgcttgtatctattttattcgaaaaaattaaactatttttcaatgcatttaaagacccgttatataatcttcctccattgtggcgcaaagattcatttaaaacagcatttccctctaaaaataatgtaggcaaaagaaggtttggtaaagtaaaaagtggaatagggcctacagatattaaattcgagttatcccctaaatatttatgcaaagtctttgatactgttgatttttttgcattcatttgataattgtgtatcatctcatgagcaaataatgttgctaaccaagatgtagtgccaaaataatcattcattccgctaccaccaataaaatatatacccatattaaatggtgtttgattagaaaatccatttgcaacttgtatgttattggatactaatacaattttaataggctcattaaaactatatccaaaacttttatcattttgttttataaaatcatcaatattttgttttataaatttagcttcttcttgataatctaatgtatatattatactatatttatcttctttgtacacttggtaattatcatcactacttattgtatatccaaatagatccacaaaacaaatagttaaaatacataaagctttaagcatcttcagccgctggaacatcatataaaatatcatccataggatgacggtacataggcatagagagtcttttttcatctaaaatatgaccgataaatccgatacttctacctacaataaaaaatgcatttaaagtgcctgattctataaattcattaatctcatcttctttatatcccaaagccctccacatatcaaccataaggataccaatagtaccatcaacatttaaaattaaattctcttttttactagttgtaagtgcttcaaccgttcttgcataatctaaaagtggggttgctgggaaattatcagctgcatagttcataagacctgtaactcttaagtcaggattttttaaagacttaattctatgtccaattcctgggatgggaacaccgtgctccttcatatattttaaaaatgctttggggttaaggttattatcatctgcatatttaaagtattttgcggcgccatcaatagcaccaccaaatctaggtccaattgttaataatccagttacaagtgattctacaactgatttaccagctcttgctgttactttacagttatgtgcacctgatactgctggaccatggtcagcaacagttttcataacagtttcgatgaaatctgtagcccattttggatattgttttttgaaccataataatgatacaacatcaccgataccttttccagtatttggagttgctacagaagatataggaaaacctgcatatgtagcctcttcacctctatcatcagaaatagtacagataaactctttagatcttctaactgttggacaaacattcatctcaggttctggaatctctggaagattaagatctgtaaatactttatttatcattgctggaagttcattaaatgattctggtacgtgaataccagcttctctcata

SEQ ID NO: 3473 - DNA, 22943 bp, synthetic construct
  variation 3868: note = note, n is a, c, g, or t
  variation 3811: note = note, n is a, c, g, or t
  variation 21723: note = note, n is a, c, g, or t
  variation 7627: note = note, n is a, c, g, or t
  variation 7612: note = note, n is a, c, g, or t
  variation 2090: note = note, n is a, c, g, or t
  variation 3784: note = note, n is a, c, g, or t
  variation 19888..19890: note = note, n is a, c, g, or t
  variation 150: note = note, n is a, c, g, or t
  variation 3837..3838: note = note, n is a, c, g, or t
  variation 8110: note = note, n is a, c, g, or t
  variation 19759: note = note, n is a, c, g, or t
  variation 2084: note = note, n is a, c, g, or t
  variation 2402: note = note, n is a, c, g, or t
  source 1..22943: mol_type = other DNA
  variation 8113: note = note, n is a, c, g, or t
  variation 3757: note = note, n is a, c, g, or t
  variation 7410: note = note, n is a, c, g, or t
  variation 2114: note = note, n is a, c, g, or t
  variation 2068: note = note, n is a, c, g, or t
  variation 7537: note = note, n is a, c, g, or t
  variation 3697: note = note, n is a, c, g, or t
  variation 3832: note = note, n is a, c, g, or t
  variation 3823: note = note, n is a, c, g, or t
  variation 3886: note = note, n is a, c, g, or t
  variation 7393: note = note, n is a, c, g, or t
  variation 7714: note = note, n is a, c, g, or t
  variation 3805..3807: note = note, n is a, c, g, or t
  variation 3793: note = note, n is a, c, g, or t
  variation 7399: note = note, n is a, c, g, or t
  variation 7395: note = note, n is a, c, g, or t
  variation 7401: note = note, n is a, c, g, or t
  variation 2126: note = note, n is a, c, g, or t
  variation 2111: note = note, n is a, c, g, or t
  variation 2054: note = note, n is a, c, g, or t
  variation 3847: note = note, n is a, c, g, or t
  variation 3856: note = note, n is a, c, g, or t
  variation 2389: note = note, n is a, c, g, or t
  variation 2051: note = note, n is a, c, g, or t
  variation 7684: note = note, n is a, c, g, or t
  variation 8104: note = note, n is a, c, g, or t
  variation 3739: note = note, n is a, c, g, or t
  variation 3769: note = note, n is a, c, g, or t
  variation 3787: note = note, n is a, c, g, or t
  variation 13274: note = note, n is a, c, g, or t
  variation 3826..3829: note = note, n is a, c, g, or t
  variation 3814: note = note, n is a, c, g, or t
  variation 3835: note = note, n is a, c, g, or t
  variation 7924: note = note, n is a, c, g, or t
  variation 2117: note = note, n is a, c, g, or t
  variation 3880: note = note, n is a, c, g, or t
  variation 7417: note = note, n is a, c, g, or t
  variation 7633: note = note, n is a, c, g, or t
  variation 399: note = note, n is a, c, g, or t
  variation 19728: note = note, n is a, c, g, or t
  variation 3778: note = note, n is a, c, g, or t
  variation 3850: note = note, n is a, c, g, or t
  variation 393: note = note, n is a, c, g, or t
  variation 3802: note = note, n is a, c, g, or t
  variation 7540: note = note, n is a, c, g, or t
  variation 432: note = note, n is a, c, g, or t
  variation 9175: note = note, n is a, c, g, or t
  variation 12520: note = note, n is a, c, g, or t
  variation 2273: note = note, n is a, c, g, or t
  variation 7954: note = note, n is a, c, g, or t
  misc_feature 1..22943: note = Synthetic
  variation 3772: note = note, n is a, c, g, or t
  variation 22876: note = note, n is a, c, g, or t
acgtccgtatatcatagcatttgatacaaaaaagtctaccctgtcaaaatcttcatcaatcgcttgaaatagtggtttaaattcatcaagttttaaaatgtcaagcgaatatgctcttgctttaataccgtatttattttctaagtcggnggcaattttatttgctacttcttggttagagttgtaagtaaatgcaatatttacgccattttttgcaaatttctctgctacagctttaccgatacctttggttgcacctgtgataacaagtgttttacctttcatgtttgacattatgcaactcctgcaattttatattttttcataacttcttcgatttttttcatgttttctgtacttggtgcaaccagtggaagtctatattcaagtgtnggggtnagaccggcaatgtacatcgctgccttgattggnatagggttactttcacaaaacagtactttattgatttcaaaaagttcatcattgatggctttggatgcttttaaatcaccctgaagtgctgtatgtgccagttgtgctttcatatcgggtaaaaggttggaagtcacagaagttattcctttgccaccacttgcgagtacaggaaagtcaataacatcatcgccagagaaaacatacaaattagggactttagccagaagttcaacagtacgttctatggatcctgttgcttctttgatgcccatgatgttttcaacatcatcaaaaagtctcttgacggtatctggtaagatatctacacctgtacgcccaggtacattgtaaagcataaaaggtacttttacagcacttgctatggctttgtagtgctggtaaagtccttcttgactaggtttgttgtagtaaggacttactgaaaatatggcatcaacaccacatgcttctgcatgtttggcaatgtctatggcttcatgtgtagcattacttcctgcaccggcaagtacttttgacgtactgcctttacagacttctacagcaatctctatacatcttttatgttcatcatggctcagtgttgctgattctccagtagtgccaactggacatactgcatcgataccattgtcaatttgtctttgtataagtgtcgcataagttgcttcatctaaagtaccgtttttaaatggcgtaataagtgcagtggtcgcacctgtgatgtaattattcataggttgtcctattatttagtttcttgtttttttagtattacagtggttgagaaatcgtggtcaaaatactttttagcaatactttgaatatctttgagtgtaattttatctaatttctcttcatattcaagtaaaggttggatattccctttgacatagtagtcaccataaagccctgaaactgaagctgaactctccaaagagtagataaattctgcttttgtattgatcttaactttatcaagttctgcttgtgtgacattaccatctttcagtttatcgagttctagcagtatttctttttcaacagtttccaatgatgcaccaggtgcaaccatagccatgatgagaaatacaccaggatcagttagttccatgttgtatccatagatttgattaacaagttgtttttcatttacaagtgttttttcaaaacgtgaacttttcccagaacttaaaatttgagaaatagcagagagtgtaacttgatcttcatgttcataattaggtatcgcataggcaatagcaatagtatctacttgattactttctttatgtaagatggctcgttttgctccgtctacttttggctcaactgcaatgacttttggaattttatgtttgttttctatttttccaaaatattttacagcctctttaaatacttcttctttatcaatgtctcctgcaacaataaggattgcattgtttggttgatagtatcgttcataaaaatttctaatatcttctattttccatgtgagaatatcttccataaagccaataggaagccaatggtatgggtggtatgtaaaatgcgtgttaaaaagtctgaaatatagataccccattgggttattntcngttctgagtcttcnctcttctgctacgacntcacgntctttttgaaactcaacgtcngtnagnttaagattntgcataagttcagcaaagaggtcaaacgtcatagaaaggtttttacttgctgttttaatataatagtgtgttttatcaaagcctgttgcggcattgttgaccccaccacgactttttactatggtgtcaaattcaccttctttgagnttatctgtcgatttgaagcttaagtgttcaagcatatgagccataccactttttcccatcacttcgtttcggctacctactttgtaatagatatcagttgtaataacgcctgagtngttgtccataggnatgacaacgatctgcataccgttgtctaaggtttttgtaaaatgttttggcaatgagttggccatgattactcctgatagtaacaatagcacaaaggctattttagtaaagaatgattgttgtttcatttccaatctgctccaatcgcttcagagatatggttataaccatctttttgtaaaagttggatgagtccttcattaatctctttaatgagagccggacctctgtagataagcatactgtaaatttgaaccagtgaagcaccagctttgatacgtttataggcttcttctgcagagtctatacccccaacagagattagtaatgtcttgccatagagttcttttcctatagcacgaaagagtgcataagatttatcagtaagtaaagcaccagagataccaccaaaatctttagcatgctctgtaagggaatagtctatagtggtattagtggctatgatacctgctgcaccagcctcaacggcagttttacaaagtgttacagcatcttcatgttccatatccggtgcgattttaagaagtacgggttgtgtggttatttcttttgacagtttaaaaatagcttttatgaatgcttcattttgtaaatctcttagtcctggtgtgtttggtgaggatatattgataacaatgtagtcaccgtagtttttgaatgccctaaagagtatttcatagtcatctagtgcttcattctcagaggtatgtttgtttttaccaatattgatacctacagggtagtcaaagaaatacagttttttgagtcgctggagcatgtagtaactgcccttgttattaaaacccatagcattttgtatagattggtcttcgataagtctaaacagtcttggtttagggtttccattttgaggtttcggtgtgacagtacctatctcagtaaaaccaaatcccatagtaggcatggcagtgatatattgaccattcttgtcaaatcctgcacccaatcctacagggttttggaatgttgtgccaaaaatatcttgtcgaagcatagggtgagtaataaaatactgatttgccataaaacgtaaaagtatgggaaaatgtgcagctgttcttagtccaatactggcaaatgtatgtgcagtttcaggatctactttgaagagcatttttttgagggtttggtaagaaagaaatgacactacaacctccataataagttgtatgtattatagctaactctaataaaagtaatgtaagccaaatgaagcaccctgcatactgcgtaagggcgcaagttcttctatnttattatagtggtatgaaaaatctgcatctatgttgtctgtnacatagataaggaaaccnaagttacctccntantaaaanccattnttntcttcngtaagaaantcnnnatantgnagataaccnacnnnngcnccnanntagggtctnacntcaggntatccaaacatntcatccataagnattttntctatttcaatggagaaggtttgaaaattattatttccagaaatggtgaacatcgtacgccaatctaaagtttgctttccgtaacgtaatccaaaactggtttctttaggattgggaatatttgtagaagattcaatagctactttgtctgaagagagtgtaataccaagaaaagggaatttttcagcagaatcttttgggaaaagtgttgttactaacaatacaaagagaacgataagctttgacataaacttctccaaaaaatattgattaatatataattactgttatagtacctatatttatgttaaaaaaatcttataaggtgtttgtggataattttttatagctaggacattcttttagtaaagcagtatgcgtaccgctacagagtatctttccgtcttgaaataccaaaatggtatctgcatcttcaatggtactgagtctatgcgccacagtaaatgtaataatgttatctttcagtgcatatagggctttttggataagcgcctcacttttattgtctaacgctgaggttgcttcatcaagtatgagaacatcagggtttttataaagtgctctagcaagtgctatacgttgtctttgtccaccagataaattatcgccactttcagatagaagtgtatgtatgccgttttctaacttcttgataaactctaaagcataggcttttctcaatgcctcaataacacgctgttcatccaccttttcaccataagcaacattggcagcaatagtgtcattaaaaatataaatacgctgtgtgacataggcaatttttcggtgtaaagaggtgagtgtaaatgttttgtaatcctgtccattgatacgtatctgtccggcactcggatcataaaaacgaacaagtagacttacaagtgagcttttacctgcaccactgtttcctactaaggctatagattcacctttttttgcctcaaatgaaatatttttaagtgcaggtacatcattataatttaaagctatattttgaaaagaaatcgtttcaattgttttagaaagttcatctgcacctgcaatgatggtaggtttcgtattgagaagttcatgcatacgggtgttagcagtaatggcgtcttgtgctttgttgtacaatgaggaaatacgttttataggggtgtatagcatgaaaagtgcagtagcaaaagcaaaaaaagctcccacagtcatgtgttcgtctatcacttctttcccacctatgtagatgaccaagccaatggctacagagcctaagatttccatgatgggtgatgtgagggcatttgtttttatctgtttcataatgaatttaaacacattctgattttcagtggcaaaacgtttttgttcatagtcttgtgttgagttagatttaattacttcaatgtttgaaagtatttctccaagtcgtgaagtcatatctgcggtactttcttgtgagagttttgagtatttacgcatcttttttgcaagttttgttaaagggaaaatagcaataggcatgataatgagaaaataaaatgcaagtttgggactctcataaataacatatcctgtaagtgccactatagttaaactttctcgtataagatctgggatgatattggcaaccacgacttgtatacgggtaatgtcattggtaacacgagagagtatttctcctgtatgcatagacttgaaaaattccatatctaagtagctaaggtgggaaacaagtttgttacgcagttttcgtacaacatcttgaccgatatatgaagtatagtaagtttgtatatatccaccgatacctttaagtgtaaaaacccccactaaaagaaaaggcataagtgcaagcatcttttcatctttgttgataaagacatcatccaacacgggtttaatgagttgtgcagtaccagcagtacctatagccacagccatcatccccagtacagcaaagaaaaactgtcgtttatagcctgaaagataaggaagatactgtcttaaaagatctttcatacgttatgctttttcccagagtgtgccgtctgctgtatccatgatggagataccaagttcgagtatttcgtcacgtaatgtatcagaacgtgcaaaatctttttcttttttagcttttgtacgttctgaaataagggtttctattttattttttaggttttcatctacgcctatttgaaagtaagaaaaaggctctttacctccaaaacctaaaagtgtatctataaattctatatttgccagagtctcttttttaagtgccttatctttagggttggcatctaatgcatcattggttgtcgcaatcatttcatctatgagagaaagtgaaatggagatatttagatcatcactcatagcatcgagcagggcttttttaaattccttattgacagaagaagatttaccaggtgagacacgttttttgagtctatagagtttgtcaagtcttttttttgaagtttgcagttcctcttctgaaaagttaaaatcatttctataatatacagagtttaggtagtagcgtaacacttcaccatcatacactttcagcgcatcttttaagaaaaagctgttaccaagagacttgctcatcttttctccgtttatctgtacaaagccattgtgcatccagtattttgctagttcatgtcctgtagcacagcggctctgggctgcttcattttcatggtgaggaaagagtaagtcggctccgccaccatgaatatctatggtgtactgttcattgcctttaaaatgtttctctatcatggcagaacactctatatgccagccgggacgacccgaagaaaaggatgtagtagaggcagtatcaaaacagatatcatcactacctttgcacgctttccagagggcaaaatcttttgggtttcttttttcactgttatgttctactcggctaagtgtggctttatcatctgcaacacggtgtgatatgttgccataggcactgtcttttgaagtatcaaagtaaacatcaccagtagaggtgacataggcgatatctttatctatgagtatttgtatcatctgttctatggctgtaagagattctgtggccttaggttctatgtctgcgcgtgctatgcctagtgcatccatttcttcgaggtatctttgtatgtaaaaagaggtaagctctttcatacttttaccactctcttcaacttttttgatgattttgtcatcaatatcggtaaagttttttgccatagtgacttgaaagcccaatgctttgaatgtgcgtgaaagcaaatcaaaagccaaacttgctcttgcatgacccaaatgggcatcatcatatacggtaggcccacagacataaatgctcactttaccatcatagataggttcaaaagggagttttgttttttgtacgctgtcaaagagttgcatagtcagtagaacctttacgagtaaataatgttgtgattatagcaaatttatctaatgagtgtgagnanccancnattaagcanatagatnaggatggaaaataacaacatagcaacgacaaaatagagtgagtttttagagcgtaaaatagctaaaaacttgtctgtacctacttcttttactgtaaagaaaaacaacacaaatccaccnatncttccagccaaagcaagtccagatgcaccaagtggatgcatcagtattagtgaagcagtgacagaagttacnagggaatagactgcnattttngcagccttgagatgcctgtgtgaagcatagagaaaaagtgaaaaaagtttngcaagaccaaaaggcaaaagacctatcatntacatttgaagtactgagacggtttctgtggtttgagcaatagtaaattttcctcgttcaaataagagccatacaatgggttctgctaagagtataccacctaccatcgcacctcctagcaaaaatgctaaaagccaaaatgctttatgaagatttttatacgcatcgtcttcatgtccgttttttaatgctttggaaacagaaggaaanagtacggtagctgtagctatggctatgatngcaagaggaagctggaagatacgatttgcataaaaaaggtatgagaccgaacctgtgactaaaaaagtagccagaatagtgtcgataaatgcagagatttgtggcgttgaattgcctaaaattcctggtaaaaaaagagaattaaagtgntttttntcntcttgaacatctttgtcttttctatatttccatccacctaaaagaattttgtgtaagttaaatttccgtatggcaattaagtgtactatcacctgtaatgcaccaccgatcagcacagcaaagctaagtgcataagcaacagtctgggggtcttctttcatatagagccacagtgctgcaatcatcgcgatgttcaaaagtgcagtggacatggctgtagtgacaaagtgttctttatactgtaacaaggtagctaaaaaggtcactatgaagatgaggtctaaataccaaaaattgatggcagtcataggtgatgttttatctataagctcagcatcccaaccccatgctaaaagtttagtgataggctcgggaaagaaggtaataagtaaagaaaatgccattaaaaagagtaaaaaccttaaaaagatagcagtagcaaagacccctttatgttttgaagcgatgaaagaaggcataaaagcttgagtaaaagcaccttcagcgaagatacgacgaaaaagattgggtaatttaaaggctataaagaacatatctgaccacacagaagcccctagtgcagacgccataagcacatcacgccctaagccagtgatacgtgatatgagtatgccaaagctattggtgaagatggattttaatcgcatgggacttctttatgatttcttagttaggtattttagcgtaagtaggtataatttttgatggcttatttaaaacaaaaaacaccaatcacaagaatattgggcataacaaaaagactttacagtttagaaaaacttcaaagtactgtattggcagaagagtatgaagtctctgcacgcaccatacatagagatatgcttaaagtttcagagattattcctttagataataacttaggtacatggagtcttaattcatctgagtttacaagtaatgataatgccttctataaggcgctactgttttcttttgcacaaaatatagagatagaacttgagtgcttagagaagtctaatgcaagtaaagagaatatttcttttgcaatagagtataaanaactacctaaaaaacttggagaaaacattgttaaagccatacaagacgaaaaacagtgtagcttttcttactatcaaagataaagagataagtaaaagacgcatagaccccgtaaaaatatatactgagagtggacgttggtatgtcatcgcgagagactataaagataacaaaataaaatcttttaatcttagaaaaatccagaaatttaaacaagaaatagaaaatacaacgctcactttagaaatgagagagatagcagatggtatgaaaagcatctggtcaagtacaggtgagggtatgttggtcaaactttatgtacaacctgagatttctcagtacatcaaagatattaaactacataaatcgcaatttatttatgatactcatcatgatggtggcttagaggtgcattgcacaattacccataaattagaattacttcctcaactaaaatactggttaccacgtatctatgtacttgaacccaaatggttacaagatgagcttatgagcgatttagagatttacaaagatgaaagtgttaggtttgacatataggtgtcaataggttgtgataacatatcagattgaaatgttttagagccatatattgacatgagctatttttccaagcagcaaaatgtttgacaataagttttggcaggtttaggtaaatgatagggtgaagttttattgaggatgacaactgaatgtcagaaccttgctcgaaaaacttcaaaaacgattattatagcactttcgtgtccccacacaaataagctatctgatatgatagtgtaataaactttaagggagaataaaatgggtcaaagaatattgggtttagatataggtatagcatctgtaggatgggctgttataaattatgacaaagtagatgctacacaaaacaaaattataaaatctggcgtgcgtatatttacacaggctgaacacccaaaagatggtagttctttggcaatgcccagaagattagctcgtggtgctaggcgaactttaaaaagaaaacgtcaacgcatgaaagctattaaaagactttttataaatactttgtctttatcgcacaaagatttatttttaggcgagatagatgagactatctatagtaagcaaggacgcttagatgtgtgggaacttagagcagaatcaataagcagagtattgacagctgaagaacttgcgagggtgttgacgcatatggcaaagcgtagaggatataggtctaacagaaaagtagatgaaaatggagatagtgaaggtaaaaaggttttaggcgccatagaaaataatctatcacttttggaaaaatatgaaaccataggtcaagctatttatgagactactaaagaaacaggtattagaagaaacaaacaagatgactacctacatagcatatcaagagagatgcttttggatgaagtgaatgtagtatttaataagcaacaagcatttaaaaatattttggctacagatgagttaagaaatacatacatagaaatagcattttctcaaagagattttgcttctgtagatggcatggtaggtaagtgtacttttgaaaaagaagaactacgagctgcaaagagaacctatagtgctgaagcgtttgtgaccctgacaaagcttatcaatacaaaagtagtacttgaagatggaacagaacgaggactaaacaaagatgagttagaaaaaatcatactattgtgtaaacagagtgaaaagcctagttacatcaaaataaaagacattataggattagaaagtacatctagctttaaaaatatagaagattatgaaacagataaagtaagtggagagtttttaaaaaaaactagaaaatttgtttctgcttttaaaggctatcatgagcttagaagagtagtagaaaaggtactttctaagacacattggcataatttatcacaagatagcaagttacttgatgaaataggaacaatattttctatacataaaagtgatgataaaataaaagaagctttagatagcttgactttttcaatgtttacagaaaatgagattaatgtagtaaaagaagctttgataggttctataagttttgaccaatttatttatcttagtttgaaagcattagataagttattaccgtatatgagagatggtaagcgttacgatgaagcggttactttagtaggatataaaaaagagagtggtatacaagaaaagtttctaagagcattaaacaaagaagagcaaagtgagcttacaaattcagtagtaaaaagagcgatagcacaaacacgaaaagttattaatgcacttatacgtgagtatggacagtttgataaggtgcacatagaacttacacgagagataaagaaaagccataaagatagaaatgagataaagaaaggtcaagagaagtatcagaagtttaaagaagaggtcgtacaagattttattaaattatttgatagagaacccaaaggtgcagagttacttaagtttaggctatggaaagagcaagatggctattgtgcgtatagtggatatattggagaaaaggcatatataaaacctgaaaaacttatggcagatgtaaagtatgcagagatagaccacattttgccatacagtagaagccttgatgatggactgaataacaaagtactatgtcttgccaaagaaaatcaagataagcaaaacatgactccatttgagtattttgagagtataggtagagactggtacacatatgaagtacatgtgaaagcaatgaaaggcattaagagagttaaacgtcaaagacttttaaaaaagaactttgatgaaaactctgaaaatgagtttagagagcgtaacataagagatactgcatacatggcacggtatatcaaaggttttatagaagataatcttgaactgacaagtagtggcaagaaaaaagtaataagcatcaacggtacattgaccaatatgcttaggcataactggggtgtgggtaataaaagtagagatacacacttgcaccatgctgtggatgctatcatcattgcttttgctacagacagtgaagtgcagagactttctacactttcagccaaaagagctggctttgtttatgaaaaaagcgaagacaagtcaaaaagatttagatttacccctcctatagatgattttagagataaggtgcaaaagagtatagaagaaatatttgtttctaatgctcctagacgcaaggtaacaggtgctgcacataaagaaacaatacgttctaaaagattagaaaaagttaaaggtacttttgaagtcaatgaggggttagctgaaaatggtgaagtnaagagagtagatatatttacaaaagagaataaatatcattttgtctatttatatgtagctgattttgagaaagaagaactaccaaatattacaataaaaaatattgaagtcgataagtcttttgagtttctgttttctatatttaaagatgagttaatagagataaaacaaaaagggaaagatgcaatacaagggtatatgaagttttctctttcagatggtagatttgcaatttcgcaccatttagactcaaagtttaatgctacaaaaaataggttctcaacaggttccttagaatacttaaaaaaatatcaagttgatgccttgggtaatattcaagaagtaaaaaaagaaagtcgagtatcaactaaaaaaatattgaaaaaagaaaaagaaaaaacacttaaaaagaaaaagaaataatattatgggatggagaacagtagttataactaaaccttctaaaatctccatagaaaatgatcagttaaagtatgcacctaaagatggagaggtcataagagtacctatagatgacatctctgtcatcatcttggaagtgcatcaagtgactataacttctgccttgatgtcacggcttacagagtccaatatagtcttatttacttgtgataagacacatacccccaatggcgtgtttataccctttcatcaacatagccgctatacacaagtagcacataaacagatagcttggacagaaccatttaaaaaaagagtatggcaaaaaatngtctctcaaaaagtatggaatcagtcaaagacattggaatatatgggtaaagagaaagtaggacaattagaagcctatgcaaaaaaggtaaagtctgctgacagtaccatggtagaaagttctgcagcacgcatatacttcatagcactttttggaaagtttaaccgtagagatgaaagtgactggagaaactcagctttaaactatgggtatgcactcataagaggagccatatcgagaagcttggctgcccatgggtttttacctgcttttggacttttccaccatagtacacttaatgcttttaatctttcagatgacattatagagccatatagagcttttgtagatgtagtggtgtcagaacattatgaaaattttatagagcttccagatactaggtttttacctgaacataaagtagagctgtatcaattgtttactatgaaagtagttataggtgatgaatcaactacactccttaatagcatagaagtatgtgtaacctcgcttatgaacgctactttagaaaaagatgtagacttgttgaagcttccatacttggacaatagtgatgactagccatgaaagtagatttatgagattatttgtattttttgatttgcctactgggacaaaaaaagaacgctcacaagcgactaggtttcgtaatatgcttttgaaaaatggatttatgatgttgcagttctcagtttatgttcgtgtatgtaaggggcaagatatggtaagtaaatatcttgatattactatgaaacacctgccggcaaaaggacacatacgagccatgcaagtcacagacaaacagtatgagagaatgcatattctcataggtgaagaaacaacagaagaaaaaaatgtaggaatgcaacaacttttacttttttgaagaaaaaaatagagaaaaaatgagaaaacttaaacaatttttgtaaataaatttatttttaacatagggaaatagtctcaaagtattagtgtataagggctaaaaagccccgtagtatagcgtatttgtgtggggaagggtgctataaccaagctgcttcttttactatagaagagaagagtatagcgtatttgtgtggggaagggtgctataactcgctactaatgatatacaaactatttcgaagtatagcgtatttgtgtggggaagggtgctataacaccttaaacatattatataaaagtttgcagagtatagcgtatttgtgtggggaagggtgctataacgagtatgcctttaaatactctaatatcataagtatagcgtatttgtgtggggaagggtgctataacgatgatacatccgttaatcaaccctgacagagtatagcgtatttgtgtggggaagggtgctataacagagcgtaggtttttcataccattgtttcgagtatagcgtatttgtgtggggaagggtgctataacgtttttttatacatatgaatgatatttcttagtatagcgtatttgtgtggggaagggtgctataacctcttgtttttgggatacaagcagatgggcagtatagcgtatttgtgtggggaagggtgctataacggtgcgacgcttcaggatgtaggtgtagatagtatagcgtatttgtgtggggaagggtgctataactataacagggctaattaaaaatggaatagaagtatagcgtatttgtgtggggaagggtgctataactatgtaaaatcagaggatagatactcaataagtatagcgtatttgtgtggggaagggtgctataacacagtggtcaatacaacgctgtgcatctctagtatagcgtatttgtgtggggaagggtgctataacacttgggtagtcatgggagtacttgggtatagtatagcgtatttgtgtggggaagggtgctataacttaatttcttgttcttgttatcttctgttataattcaccatactaaagataggaactgttatgataaaaaaacttgctattacgggaggtacacatggtaatgaatatacgggcgtgtatctggttaagaaatggaaattaaaacctgagttgattacacgcagtaattttgaaaccatatgtttgcataccaatgaacaagccattaaagaggtaagacgttatatagaccatgacttgaacagatcatttggcagtgtggatttgaaaaatgagactttagagacacatgaagcaaaacttgccaaacacctcaatgcacacttaggaccaaaaggaagtgaagagacaaatgtagacttcatcgttgatttgcatacgactacagcgaacatgggtttgtctatcgttgtaagtaacgacagtgtattgacatggaaagccatcgcttatttgtgtcaggtggaacctttgcttcgtgtatatcgttggcagggggatgaagaaggttcttttgtggactccatgtcaccacatggttttgccatagaagtgggagcagtgcctcagggtgttttaagagcagacctgtttttgcaaacagaagctctaatttatcatctcttggatttttttgaaaaatacaacaatagcgaaacatttacattttctaacaggttagaaatttatgatcatgaaattttggttgactacccacgagataaagagggtgatattacggccatggtacatcaggaaagacaagataaagatttcttagcgctaaagacaggtgacccactcttcttaacactgtcaggagatgtattcagatatgagggtgaaacactttatgcactttttatcaatgaagcagcatattatgaaaaagggtttgctatgtgtttggctagaaagaaatatataacgatagaaacatagataaaatatgacaatatgacatattttttagtctgcctgaagatacgtgatatactttttaaaatttagaagtggagtggtgatgatagttggtatagaaggaacagtagaacgaaaagaccctacatttgtacatataaatgtgagtggactcatttatgaagtacatgtctccatcaacacgtcaaataacataaatgaaagtaaagtaaaattgtttgtcacacaagttattcgtgaagatgccaatcttctttttggctttatggataccaatgaaaaaaagatgtttgacacggtactcaaaataaacggcgtaggaccaaaagtagggcttgccatttgttctacatttacgccaagtacctttgctaaagttgtggcttctaaagatgtgagtatgctcaaacgggttcctggcattggtccaaaggctgccagtcgtatacttgtagaactagcagactttatcgtagatggcaatgctcaaagtgaagcttcgggagcactgggagatgcagtgatggcactggaaagtttagggtttaaaagagatgctattcacaaagccttacaaggtgcaagtggtgatacgagtacacttgtaaaagaaggcttaaagcagttacaaagattatagtatatgttgtcatttaccaaaagcgatacccgatagtaaagtttgatgaattatgattgtcctgagaatcaacatcttgattatatgatagtgtagtaaaccatttttcattgaactcataaaataaaacagttgagattgattttgctgcatgttctgtggtaaatttactttcagagtaggtgtaggaaaggtttacataaaactttttagtgaagaaataccctgaaccaaagtaaaaataattcgtattctgtaatggggtagaggtttgctcatcccggataaatgtatgtcccaagcctccaaatagtgaccatgacctccttggatagtaactaaatgatgttaagagagagatatctgtattgttaccgacaaaatcgtaagtcggaagtctaagtgccatactgactcccagtctgaagttgggggccagtctaaatcttctttttaccttcactgttgtgtcaagctgaccccttcccttattgtgtataaagtaaccagtacgtaaagcataactccaatcacctttatagtatgtcatacggattctgcttgttttttgactttctcttcctatgaagtcattgttaaaactgtatcccaaccttaaggcgagaacaagactatcggtgacttcatcaagtggaagcattaggattgttgtagtacatcctttttcattgactgtatttaaaaaaggcgtattaggacattgatctaaactatcaggtacaccatcaaaatctttatcattaaggtttacagcataacttaaactgttaccaatcaaccatgctagtagtatatttttaattattgttatcattttaatccctatcattattttcagcttcgctctcaattttctcttcaatttggttttcaacttgctcatctgtttcattttttcttgctaactctcgagtaggattttttgtgtagttctttttttcaagagtatgcaattctttaaatgcttgatctgcatgtttactgcgagtgatggattgtatttttttcatagctttaattcgttcctcttcttgcatttgtatcatcttttgtttaaatgcattcataagtttaaaacgttcagatacaggtgctctttggatagcttgtatttgtgcatcaatattggcatgtaaaggtagaaaaaaagatacaaggaatagtataatatataaagatttcaacatcatagtattattacgttctcttctcatctagattttctaaatttaatataatatttgttcctacatttttctgagtatttatttctatatctatatcaagtgcagaagtgagtttttttacaatagacaatcctaatcccaaccctctgtcttgttctttgtagtagcgatcccacactttatctagatttttgatacctttacctgtatctttaatacagatggtttcatttaaaacagttagactcacagtaccttgaggtttattgtattttgctgcattactaagtagattatcaagtatacgcgtaaaagattcttcattggttactttttttaactcattataggatgtgtaggtaaatgtaagtttaggatagatactttgtataaagtttaaacgttttttacataataaagcaagattaacttctatattttgagagggggagtgttgtaaaaaactttttaagttattttgtaaaagcataattgtatttatactatgtgatattcgttggataaaggtatttttttcagattcctcctctagcattttgatattcagtatcattgaagtaatgggtgtgttaaaatcatgtaaaatatctttaataaattcatcatttaattttaaagcttttcgtatgggagttaaactgtaaagcgtaaaaagaagtgccaataccaataaaagaaatgttgcaagaataaatttaagtaaaagtgatttcttaatacttgataaatcgtggatgaagtttttttctgggtaggaaatttttagattaaagttttctgattttggcatcttaaaataggcatgtataccatcattatcatacagttgattaagtgcttttttattttttttagaaaaatcaaaaataaatttctcacatttcatggtgtaactacatacttccatggttttatagaggtcgtgcttatattctcttttttgtgtacggaaaagttctgaaaataataatatgagtaagatttcaagtaaagaaaaaaatactaaaaaatttttgaataaagattccttttcatatcttttcaataatataccctttccctctgatatttttgatatctatttttaacctttgttttatttttgtaattgctacgcgtaacgcagtgtctgaagcttgctccaaacattcacacagttcttgtttctcaacaacacatccgctatttatgagcaattttgtaaagattttaaattgcacattacctatgtctattatttcaccatctttacgtaagatttgtgcatcctgattatattcaatattaccatggtatagagattcgtttttaaatttagatttgagacgaataagtagctcatagggatcaaaaggctttttaatatagtcaattgcacctaaagcaaaaccttgagacatagagtgcatatctgtaagtgctgtgataaagatggttggtgtattatcccccgcatgtcgcaaagcatttaaaagttctaaaccacttccatcaggaagattaatatcaaaaagatacaaatcataactattatcataggttaaattttcagcttcttccatatttaatgctacatctatgttatatccttctcgtgagagaaaaagttctagtgtttcagagagaatttggtcatcttcaaggagtaaaagttgcatcatgattatattttaccagtaaacgttaaagtatacatatcttaataacccttttatcatctaaatttacngttctagttgtacatcattaaattaatatgntaaatattttgatttcctgcataaacatttacctttaaagttactagtattggtagagatattatatatctaaatcaggcgtgttgtcatcatcatcataatcatgatcatcatcgtcatcgtcatcgnnntcatctatattatttgggataccatcattgtcatcatcttcaatatagtcaggagaatcattgtcatcgtcatcatctctgtaatttggggtaccatcattgtcatcatcttctatgtaatcaggtgtgttgtcattgtcatcatcatcatagatattgtattctccatcattatcatcgtcttcataggcattgactataccatcatcatcatcgtcttcatatgcatctatatagccatttccatctgtgtcatatacaggagtgttgttaataccgatatttgtagaattattgaggtcaactagaagtggttggtctactacatgatccccattggtatcattcacatctgcataattaagtgctagtggtatatgagaaagatcgacattagcattaattgtaagcgttgaacctgtagcagtaccctggataaatcctataggggtaattattctagtagtgtcgttattttcattggtcgtcatgacaagtttacaatttgtattttgaggtattattatttcaaatggatgtttactggtgccattttgtgttgaagttacctgtacataagttccatcttcacaaaaagcttcgatgagtgttcctgggactgtaccagatatttttgccatagctattgcaacggtagtatcactagaaccacctccacaacctacaagaaacgggatagcaatgaggctcaataatatagaattctttttcattttgtctccatataaattcattatgtgaatttttaagattattatacgttaatttatgttaatgaagtgttaattgaaaattcacccaaagtatacttatatgagtgtgagtgttatagatggcttattgccatctataactaagagagtaagagtaattgagtttagctattcaaggttccagatgaagtacgatcatcatcatcatcatcattgtcatcataatcatcatcgtcatctttgataccgtcattatcgtcatcatcgtcgatatgattagcaagtccatcgtcatcatcatcttcggtgtaatcggcatatccattgtcatcatcatcatctctatgatttatataaccatctttgtcatcatcttccatatagtctggatggtcgtcattatcatcatcatcatggatattgtattctccatcattgtcatcgtcttcgtaggcattgaccctaccatcgtcatcatcatcatcataagcgtctatatagccgtttctgtctgtatcaaatacaggcgtgtcattgacaccgatgtttgttgagttattgaggtcaacataaagtgcttggtctactacatgatccccattggtatcattcacatctgcataattaagtgctagtggtatatgagaaaggtttatatcaccattaatagtaatggttgaacctgtagcggtaccatggataaatccaataggggtgatgactctagtcgtgtcattattttcattcgtagtcatgacaagtttacaatttgtgttttgaggtatttctatctcaaatgggtgttgacttgttccattttgtgttgaagttacctgtacgtaagttccatcttcacagaaagcttcgatgagtgttcctggtactgtaccagatatttttgatgtcgctagtgcggcagttgcatcgctagaaccacctccacaacctacaagaaacgggatagcaattaagctcaatagtatagaattctttttcattttatctcctttttaagtttatgaaataagataatgtaattatacgttaacctatgttactgatatgttagaggagtgttaatgcaatgttaattagattngatttgtgtgaagtatgaagagttttgacttaatgaaaaattcgggtgcttaaattattattttttcttataatttactaaataatcatccaccatttttagctttagtgatttactaaacccattgtgtattttgtggagttttttcatcggagagaatacaccaccatctaaagaatttgtagtattctgcatgcttaaatgtttgtactttttataggtaaataagtaaggtaaatttgttctcaaacttctgtatgcagagacaagttttgcatgtgtataattttccttccctgtagtttcgttaagtgttttctctgccaaaaagtctttgtacattttataccaagcatctaacttctttgtaaagatagtttcattggtgaaagtaagacgaagcagtattttctgcaagtctttactggcttggagtttaggatgttttgttatatatcgttgtatgatcctcttttgatgaaagtgacacatctgtacaggatatgattcaaaagctctgtacaagcctctcttaccatcaatagtgatggaattaatggtgtagtctagagttataagctctgtgagcagatacttgtagtctttgatggtttcattttgtatatgcttccatataagtacttctttggttatactgtcttttagtaccaatgttcctagcttgtcctttctctttccatagaaagtggcatcgcatactaagtttactgctcgtggatgatgtattttatatgctggttcatattcaaatatttgctttctaacccaaggaatacttcgatggtattgctgagataaatcacttaaaatatatctcttatatacgtacttattaaaaataataacttgtaggttcttagtgcgtctctttgaagaaaatgatacctcacattcagtacaaaagtatctctttatacctcttcttgaacccttacttatgacactcttttgattacattttggacaagtttttagtcttttttacagccatctgtaaataaacctttgtttattacgactataccgtactttgatggtgtttttaagcacccgtctttttcattaaatctaaaaaggctatattttgctccccctctcccggccatcacttaattattcccattattatacncacaatgaatacaaaataaacgctataatcatatacttttaaaaaataaggatttactgatgtcaga

SEQ ID NO: 3474 - DNA, 22883 bp, synthetic construct
  source 1..22883: mol_type = other DNA
  misc_feature 1..22883: note = Synthetic
tttaaagatagtgctaaaaatatctttgaaatttttaaagatgtaaatatcaaaggtgaatgggtagtaattattgagccaactatttttgagggtcaagctttaaatgttgatgatataaaagatttagatttagctccaaaagtaaaagcaaaacttctttctaaacttacaggaaagaaaacaaaagatatttatcaagaactaatgcaataaataaattcacctactcacttcttttaaattgtttattcttaactttaaagaggtttatcaagattttttcgataaaatcttatctatgataatatatggaaaacaaatagtactacacgtacttgataaacatcctcacttaattgaagaggttctattttcaaaagagatagataaaaaaatattctcaaaatttttaaaacttggtaaaaaagtcataagacttgataataaaaaagcacaagcccttgcgcaaggtggaaatcatcaaggcttttttttaagactaaaagagtttgagtacagtgatatctctgaaataaaagaaaaaaattttattttagttttagatggactaacagatgttggtaatattggagcaattgcaagatctgcatactcactaggtgttgatgcaatagtagcttcaaatgtaaaaactcttaataattcaggtcttataagaacaagttctggagctatgcttgatattccttttgccttatatcctaatacacttgatttagcaaatgaactaaaacagtgtggttttgcacttattggtgcaacgatggatggtactgacttgaaaaaatatggaaaaatagacgaatctgataaggttgcactatttttaggaagtgaaggaaaaggtctttcaaaaaaagttgaaaaaaaacttgacttgaaagtatctattggtatgcaacatgatttcaactctttaaatgtatctgttgcagcaggaatattaatatataatttgaaaaaatagaagtaggccatgataaaaaaaatatttttcttaacaattttagctttaacactacaagcttcaactatacttgataataaaatatcaaatttaattggaaagtttgactacattaagcataaaaatcttatcaattatatattcaaagataaacacaattatataattggggaaaatattgattatattaaggtgattaaaaaacttcaaagcaatggtcttttaaacctatcattagatagaccaaaagatgtttatattaaattcaatacaaatcatgaccctataaaatctttaaaaattttaaaagacactcttaaatctttaggcttttactattattttacaaaaacattaaaatatgacaaagaaaatctaaattgggaaatcaagctgaaaacagaagccgccattgaccctctcattttagcaaatgaactctataaacaaaactgtagagttgctgatataaaaagagagggagataataaatgggaatacagcattgatacaacattttcatcattaaataactcaattcaaataacagtagatgaaaaaaaatatttaagaaaaccgcttaagccttatttactaaaaatcaaaggtgatgcaagcaaaattacagttgtatcaaaaatactaaataactggttccctaaagttgtattttatgataagagtttaaatattttaaaacttatcaaagaagataaggtgcatggaaagttagttcttgaagtgccacaaaacacaaaatatataaaaatagatgacttatacacgcttataaatatcaagcgtggattaagtattataattaaggagtagtagtgtttcctgaaattgaatttgaaagaatgaaaagacttccaaactatgtgtttgcagaagttaatgaaataaaaatggatgcaagaagaagaggcgaagatattatagatttctctatgggtaatccagatggtccagctcctcagcatatcgttgataaactaaaagaaacagcagataaaccaaaaaatcatggatatagtgcaagtgctggtatttataaattaagactagctatttgtaactggtataaaagaaaatatggggttgattatcttgatcctaataaacatgcttgtgctacaatgggtagtaaagagggatatgttcatcttattcaagctattgtaaatgttggagatgttgcagttgttccagacccaacttatccaatacattcatatgcatttatgcttgcaggtggagctattcataactttgaactaccatttgatgagcaaaactatagagttgatgaagatctgttttttgaaagattaaataaaacattaagagaatctattccaaaagtaaaatatgttttagtaaactttccacacaatccaacttgtgcaacagtaagacctgagttttaccaaagattagttgatttagctaaaaaagagagattttatattatctctgatattgcatatgctgatattacttttgatggatataaaacaccatcaattttccaagcaaaaggtgctattgatgtagcagttgagtcatttactctttcaaagtcatacaatatggcaggctggagagttggttttatagttggaaatgaaaagcttgtaggagctttgaaaagaattaaatcttggcttgattatggtatgttcacacctatccaagttgcagctactgttgcacttgatggaccacaagattgtgtagctgaacatattaaaaaatataaccatagaagagatgttatgatagaagcatttaaagatgctgggtgggaaatggaaacaccaaatgcttctatgtttatatgggcaaaaatcccagaaaaagccatgcatcttggaagtatggaattctctaaacagcttctaacagaagctaaagttgcagtaagtccaggtattggctttgggcattatggtgataagtatgtaagaattgccttaatagaaaatgaaaaaagaattagacaagcagcaaaaaatataaaaaaatatttaaaaactttataattattaggatagaaaatgttaaaaatagcaattattggtgtaggaacagtaggttcaagtgtagcaaatattttaaaagataataaagagattattactgcaagagctggaagggaactaataccaacaattggagttgtaaataatttatctaaaaaaagagatgtatctattgaattaactgatgatatagataaggttttaaacgatgactcaattgatattgtagttgaacttatgggtggagttgagaagccttatgaagttgtaaagaaagctttaaaaaaaggaaaatcagttgtaactgcaaataaagcgctattagcttatcatagatatgagcttgaagagtttgcaaaagatattccttttgaatatgaagcagcagttgcaggtggtattcctattattaatgcattaagagaaggattaactgcaaataatattctttcaattcaaggtattatgaatggtacttgtaattatatgcttacaaagatgattgatgagggtgtaaaatatgaggatattcttaaagaagcacaagatttaggttatgcagaagctgatccaacttttgatgtaggtggttttgatgcagcacataaactactaattcttggttctattgcttatggaattgatgcaaaaccagaagatatcttaattgaaggtattgaaaatatcacaagttatgatattgagtttgctaaagagtttaattactctattaaacttcttggtattgcaaaaagagaaaatgacaatgtagaacttagagttcacccagcatttgttccaaaagatcaaatgattgcaaaagttgatggggttatgaatggtatttctgtaattggtgataaagttggtgaaacaatgtattatggaccaggagcaggaggagatgcaactgcaagtgcggttattgcaaatattgttgatatagcaagacgaggtaaaggctctccgatgcttggttttgaaagaaattatgggaataaactttcattattaaataaaaaccaaacaagaacaaaatattatctaagattagaagttgcagataaaacaggcgttttagcaaaagtagcttcaatcttaggagagtgtggtatttcaatagaaaaaatgctacaaaaacctttaggtaatcaaaaatcaaatcttttactttcaactcatagttcagttgaaaaagatattttaaaagcaattgaagagctagaaaatactaaggtagtaactcaaaaaccagcaatgattagaatagaggattagtcttctcttctaatctttaaaacttactttttagctaatatctacatttataacttaattaaggttagcatttgaaaacagactcacatttacttaaagatgatattccaagcttacttaaacaaataactattcctgcaagtactggaatgttttttaatactatgtacaatgttgtagatacattttatgctggacttatttccacacaagctatttctgcactttcattatcttttatgatattttttacaattattggattgggatatggattctcttctgctattacagcacttattggaaatgcaagtggtcgttctaaaagatttttagcttctatatatgcccacaaaggtatcttctttatgcaactacttgcaatagtacttacaataattgggtttataatctcaccttatttatttaaactattaggtgcaagtggtgaatacttacaaatggcacttgattatatatatataattttagctggaactatatttttcatgactaactttgcacttaatgcaatacttatctcaaaaggtgataccaaagcttatagaaatactttaatatttggtttttttgcaaacttagcactaaaccctttatttatatatggatttttatttattcctgctatgggtttaaaaggaatagcactttcaactatactaatacaacttttaaatgcttcatatcttttacttaaagttatggatacaaaacttgtacattttcataaaataaactatttcttacctcacaaaaaaatttataaagatcttataaatcaaggtattccctcatcaatgaatatgcttattatgtctattggttctttgtttttaatgtattttgtatcactttatggagtaaaagcagtagcaggatatggaataggttttagagttgaacaaatcatgcttcttccagcacttggacttagttctgctgttctttctattgtttcaaataactttggagcaagaagatatgatagagttatagaaactgttaataaagctttaaaatatggatttataattgctacttttggaataatatttttatatatttttggaaaaactatcatttctcaatttgactcagacccaatagttataggctttgggtatgactatttagttattgaagtcttggttttttatgcttatgtaatactatttatttgtgtatcaacacttcaaggtataaaaagacctaagatgattttatatatagctttatatcgccaactaattgcaaaatatgctattgcttatgttatagttatttggcttgctttagattatatctatttatggcttggtgttcttttcatgatttatagtgctgcaatttttgcatacttttatacacaaaagcttttaaaagaggttacgctaaataaactttctaaaaaatagaaagtttatttaaaaagttatacttgcttcccaataccttttgttaagtgaagaacaaaagctaagccttttcttgtctcttcatcttttaatagtttaagtaaaccaaataaagatggtacttcattttttttcatttctctatttgcatatcttacagcattttctgttacaaagcctgctgtggcaagattatctactgtacctatcattttatcaaccattggagcagttgtcatctcaatattatctgatataacagctaataaatctattagattatctattctaccagtttgtattaacattgagaacttctcttcaagtttttccatctcttctgtttttagaacttctactttttcactcattattttctcctataccattccacgagctgctgcccaataaattcccatattaaaaccttttcttacgaaacttccaagtttactgcaaggagttggttttacatcttcgtcataatcataccaaagtggcattccgcaagataatcccatctgtgcaattgcaattactttaccatcataagcttctgttggatagccgtatctaagctctgaggcaatattatcagcaacaacatctgtttgattatgtatagttccacctgcttttgaaactggtagatcaactgtatctcctaaagtatatatattctcatatccttttacttttaaagtttttttatcagttggtaaccatccctcatcattaatagcttttgataatcctgattctcttataaactttgttgcaataaaaggaggtgttgacatcaaaatatcaaactcaatctcttcaccctcttctgaataagcaattttcttatcaggatcaactttgtttaaagtaaaacttgttttatgctttacccctatatcatcaaaaatagatggtaaaactttagaagtaggtccttgcataaaaagtccatcagttatactttgagcaacttttggataagtatatataatctcaacatcttctcttactccatgttcttttaaatgatcatgcaacataatcgttgtttcaacaggtgcgataccgcattgataaggaacatttggagtttttgggaaactaacagttactaaaactcttcctttttttaactgtccaagcttttttgctagctcttttgctccatcataagaatagaaccaatttccaccctcttttaatccaggaattctatctactgctacttcacaacctgtagcaagaactacataatcatatttataaatagttccacttttcccttttacaaaattttcactaggttttatctgtattgcttcatctattataaaatttatttctggcatcaaaagagttttttgttctcttacaaattcatgccctgatgctttatgaaaagcaacatacatagctccaggtctataataatgatattttgaatctgaaatcattgtaatttctatttcatctttatcaatttcatgcataagtcttcttgctaaattatttgcagtcattgtaccagcagtaccaccgcctacaataagaatttttttcttcatagaaactccttttataattaattctaacgaaagaacaaaaggaaataataagattagtgtaagattaatataagatttaactcatgcatagtttatatccaaagcctttaatattttggattgagttttcataaagtttttttctaagacttgaaatcaccattctaatggcttcatttgttgtgggttcttcccaaattgaattttctatatactctaaacttacaattgtatttctattttcatataaaagttcaaatagtaaagactctttttttgttaagtttatttttgaatctttacttattatcatcttttgtacaaaatcatatacataattctcttttagttttattttatcaataattttcttttgattttttacactcaaagagatagagaccaataactcatctatatctattggctttttaaaataaaaatccacttctgcatcaattgccctatttaaatagatatgattattaaaagctgtcataacaattctgatacaacttggcttaacacttgcaattttttgtaacaaatgcaaaccatcaacttctggaatctgaatatctgcaactattacatcaatatcttcttttctaaatattgcaaaagcatccattgcattatttgcaatttttacttctttaaaataaattgagagtattctttctaaccattttaatgtactctcatcatcttcaacaattaataaagttagtgcttgtagttttgtatataattttcccattaattttcatcttttgattttagtgaaatagtaaatactgcacccatttgattattttgtacagttaaatttcctttcatattatgttctataatcacttttgacatataaagacctattccatttccttgcttttttgttgtaacataaggttcaaaaatttgttcaatatttttcatacaaatacctccaccattatcaccgatgctaagttctataaaacttccattttgaataatatcaatattaataaaactattaaactgctttcttaaaatcaaaacatctaaggcattttgtattatatttaaaagagcttgcctaaactcattttctaaactataaagttctaagtttacaccctcttcaatatttacatttatttttatgttttcattttttaattgaacatcaattagtttgattgtatctttcacactatttaatatattaaaattctttttttctttggaaattttaaagaaattactaaaatcatcaattgtttcagacatataattgattttttcaatcatctctgtttccatttcatttaacaaattaaaatcaaaatcttcgctattgtttaagtgttttaaaccttgaacaataactccaagattatttaaaggctgtctccattggtgtgcgattgattcaatcatctctcccattgaagcaagtcttgattgatgacacataatttcatattgtttagttctactttctacttctttgtttattcttctttttaaatcttcttgatatttaacatcagaagtaatatcagaagtaatcatcacaatttcatttgtacttttaatataacttaaagacatactcgcattgatttttttgcctgattttgtaacacaaattttcctaaatctttcaacaattccttcctcaattgctctttgtactgcacttttactaggctgtgcatattcaggagaagataaagatatacaagactcactgtataactcttccattgaatactccatcattgtttgaaaaaatttatttgcgtaaagaaaagtaccctcttcatttaaaatagagataccatttcctgctaaatcaaaaactgcatgaagttcctcttttttagaccttaaatctctaagacttttttttaattctaaatataaattcctatactttgtgacatctttgaagtaatatgtatcatcaaaatatgaaacttcataatctttattattccaataaatagttaagttatctatattttttgattttaataataaaagtttattataagttactttactaaaatgttcatataatttgctattattaaacttctcttttatctgtccaaatgaatcaattattgtgtcattttttactactaaaataattatttcaggaagattgtttaaaattgttgaaaatttattgttcttttgcattatttatgatatctattattaaattaaagtttttataaaagatgagtatattatttagattcgaagattctattatgaaataactcacttaaaggctcaaacaaaacatcttttgcttcttgaaactcaatatcattttcaaaacatagttctaaaagatggctttgatagcttatttctagttctgatattatttttatgattcaaaatactttaattttagtacttttatgtacaaaagctattaagagaaacttatattaaaaaatattatttagcaaatatttaagttttattttaatattatatagccatatgttttaatttgaagtttttaaaagataacctaagtggttagagctttactcactttgttctgctactaaaacttcaaacttgcagagtgattattatagacatactgttcccacacaaatattctatgttggaattgtaattgtttttaaattaaaggaatattaaatgagtgaaagaatattaggtcttgatataggaatttcatctctagggtgggcaattattgattatgataaaaataatagtttaaataataagattataaaaagtggagtaagaatttttactattgcagaaaaccctaaaactggtgaatctttagccttaccaagaagaaatgcaagagcttccagaagaacaatcaaaagaaaaaagcaaagaattaaaggtataaaaaatcttttagtaaaatatttagatttttcaaaagatgaaatcttttcacctaaaaatatttttaatgaaaaaaaacaaaaagatgtatggcaacttagagataaatctctaaaaagagaacttacaaataaagagtttgcaagagtcttaatgcaaatagctaaaagaagaggttataagtcaaatagaaaagttgaagagaatggaaatagtgaaggtaaaaaagttttaagtagtattgaaaaaaataaaaaacttttaaataactatttaacaataggtcaagctatatatcaaactacgaaagaaactagaactagaagaaataaaaaagatgattacaatcacagtatttcaagagatatgttagttgatgaaattaatataatttttgaaaaacaaaaagagtttaaaaatccttttgccagtgataatttaaaacaagagtatcttgaactatttttaaaacaaagagattttgcaagtgttgataaaatggttggattttgtaccttagagggaaaaccaaataaaagagctgcaaaagcttcttatagtgctgaactttttgtaacactaacaaaactaatcaatactaaaataattgataataaccacaaagaaagaagtcttacaaaagaagaactagaaaaaataattttactatgtcatcaaagtgaacaaccaacatatttgaagataaaagaaattatctgcttagatgaaagttcacattttaaaaatgtgagtttttatgaaatagataaaaaaacaggtgaggttagcaaaaaaactactaaatttattagtgcatttaaaggattccatagtctaagaaaagtaattgaaaaaactttttctaaaacacattggcaaaatatctctcaagataaaaaactattaaatgacatagcaacaattttttctcatcataaaagcgatgaaaagataaataatgagcttcaaaaactagaaataaagattttaaatgaaagtgaaaaacaaattttaataaaagcacttattgaaaatattcattttgataaatttttaaaccttagtataaaagctattgataaacttttaaaatatatgctgttaggaaaaagatatgatgaagcagttgatttatgtaaatataaaaaagttgagggaacaaaacaaaaatttttaagagctttaaataaagatgaacagtttgaacttacaaatccagtcgtaaagagagctttgtctcaaacaagaaaagtagtaaatgcactaataagagtatatggacagtttgataaaatcaatatagagctaacaagagaaattaaaaaatcacatagtgatagaaaaaaaattgaaaaagctcaagatgaatatcaaaccttaaaacaaggaatagtaaaaaactttattgaaaactttggaaaagaaccacgtggaaatgagcttttaaaatatagactttggcaagagcaaggtgaaagatgtatttatagcggaaaagaaattgatataaaaaggcttatttctgaagtaaattatgcacaaattgaccatatattaccgtttagtagaagtttagaagatggtatgataaataaagttatttgtttgagtaaagaaaatcaagacaaaaagaaccgaacaccttatgagtattttactcatgaaaacaaagattggcattggtttgaagagtttgttaaaagtcttaaaaatataaaaaaaggaaaaagagatagacttctaaagaaaaattttgatgaaaactcagaaattgcttttagagatagaaatgcaaatgatacagcttttatgtcaagatttataaaagattttattgaaaataatttagaactaaagagtaaagataaacaaaaagtatttacaagaagtggtactcttacaaatatgttaagacataactggggaattggaaataaaagtagagataatcatcttcatcatgcagtagacgcactaattgtagctttttcaacgcaaagtgaagtaaaaagactatcaacacttagtgccaaaatagatggcttcacatatgaaaaaagtgaaaaaaaagctggacaattaaaatttgtaccaccaaaagaacactttagagatgaagttcaaaaatctattgatgatatttttgtatcttttgcaccaagaagaggagtaaaaggtgcggcacacaaagaaacaatttattctaaaaaagctgaaaagaaaaaaggaacttttgaaataaacaatggattagctgaaaatggtgaagttaaaagggttgatattttcaaaaaagatggtaaatatcattttatatttttatatccatcagattttttaaaaaaagaattacccttgcttacaattaaaggtattgaaattgatgatagttttgaatttattttttcactttttaaggatgagtatattgaaataaaacaaaaaaataaagaacctcattatggatatttaaaatttgtggagagtgatggtagatttaatgtattacctcattctcaatcacaattaaataaaaaagataacagaatttctacagggtcagtagaatacataaaaaaatatcaagttgatgtattaggaaatacgtttgaaattaaaagtgaaaaaagaataggaacaaaaaaacaaaggtaatacaatggcttggagaagtgtaattataagtaaaccatcaaaaatatctttaaataatcataactttttatattctccaattgatggtaaagatattgttgtacctatagttgatatatctgtaattattcttgaaacacatcaggttactataacaagtgctttgttaagtcgtatggcagaagaaaatatattgattttttcttgcgataaaaaacatacaccaaatggtatatttactccatttcatcaacatagtcgtttttctcttatggttcatcttcaaataaaatggagtgaaccatttaaaaaaagagtttggcaacagattattcaacaaaaaattgcaaaccaagcaagtgttttaaaacaacttgataaaacaaaagagtacaaagagcttttaaatatacaaaaaagggtaaaatcaggagatatagaaaacctagaagcacaagcggcaaaactttattttaattatttatttaataatttcatgagaagagatgtaagtgattggagaaattcagcgttaaactatggatatagcattataagaggtgttattgcaagagatttaagcgcaagtggcttgataccagccattggaatccatcataaaaatcaattaaattctttcaatcttgcagatgatttaatagagccatttagagcatttgttgatttagaagttgataaaatacaaaaagaaaacaatattccaaaaatacatgaactacattttaatcataaaataaaattagtagagcttcttcaaaaaacagtttatataaatgatgaaaaatctacattgcttaatagttcaagtattgtcataaactctttagtaggtgctacaaaagataatgaattcaaatccttaaaactaccaagatttgataatgaagaatgaagaagttgaacaaagatttatgagactttttgtattttttgatttacctacaaacacaaaaaaacaaagacatcatgctacaaaatttagaaatctacttattaaagaagcttttactatgcttcaatattctgtttatattagagtttgcaaaggccaagaaatagtgaataaatacattgatattatagaaaataatttacctagtgaagggaacataagagttttacaaataacagataagcaatatgaacgaatgaaaattctaattggtgaagaaacatcagaagaaaaaagtgtaggaatgaaacaacttttacttttttaattttataataaaaaacctatcaaaaaaagattatattcatcatcgtatttgttaaaaaaatagtatatttttaacaaaaaaaactaataaaacttatgaaattatacttaattcatatcttttttatctaagataacttataccaagcccactattccatggacttaataaaaggtattatagcatatttgtgtgggaacaggcgctataacaaaaaatgattgggttagataatttaaagcattatagcatatttgtgtgggaacaggcgctataacatggacattttggttatgatctaagtccatattatagcatatttgtgtgggaacaggcgctataactagttactggattactagccaaatggtctaattatagcatatttgtgtgggaacaggcgctataactttagttaagcaaataaactatattgataaattatagcatatttgtgtgggaacaggcgctataactttagttaagcaaataaactatattgataaattatagcatatttgtgtgggaacaggcgctataacgacttaaaattaagtatgggtcaagcagttattatagcatatttgtgtgggaacaggcgctataacaaactattatagatgtaaagtgctaagtctattatagcatatttgtgtgggaacaggcgctataacgtgacaatgtgatgggacatgacggtgctgattatagcatatttgtgtgggaacaggcgctataacattaaatttgagtcaaaatcaagttcattaattatagcatatttgtgtgggaacaggcgctataactattcataacctgcaaattcttcaattattattatagcatatttgtgtgggaacaggcgctataacaaagacgaatgcactgataagcatattgcaattatagcatatttgtgtgggaacaggcgctataacacttatgttcaataagaaattttagtatatattatagcatatttgtgtgggaacaagcgttattatctaaagtaaaataatttatccagtaaaaattattaaataaagacaagatttctaattattaaaaatatataaactaaataactcacttaaaggctcaaacaaaacatcttttgcttcttgaaactcaatatcattttcaaaacatagttctaaaagatggctttgaatatttttagttttatctatttttcgtaaaagataaaatatcactgggtttatttgtctatacttaacctcatcatctttaaaatcataataaataattgcataattctcttcttttttttctatatttgcatttaaaatatcatagttaaatttcttaagtcttgcactatttgaaagtttatagctattttcataatgaaactcttttaactcttctattttgtactcttgcatggctaattcaatctcaatccagtcaaagtataaaagttcataaagatattttctatcatgaaatagtctatttttttttacaaactttctataatcatttgcaatttgccaaacaaactcagtggtacaaggctcttttagaaactttcttattgagttttctaactctttttcactaatatactttttaaactctaaaaaactattttttataatctcttcatatctataataaactaacttttgataaactttatatttagaagagatctcttttttattatcttttgtaacaatattaataaaatctttttgtatatctttttctaaatcagccattttgaacttcttttactatgtttttcatgtgaagatactctttttcaagctcacttaatggaggaatattattatccctttctatcatcacaggggcgtttatttgttttaaagtatactctaaaagtttccaaactccactacaaataggcatgccatgagaatctattctaagatttgattcctcatcaaaatagtgacctgcaatatgcatatatgcaattttacttttgtcaatttggtcgataaaatctcttgctttaaaagagtgatttactgaatttacaaatacattatttacatcaagaagcattttagcacctgatttttccaatacttcatttataaagtcaacttcacgcatatttgcataaggtattaagtaatatgtggcattttctaagattaaatttctttgaattatatcctcaacctcttttactctatcacttataatatttaccattctttttgtcataggcaaaggcaaaagctcatatgtttgcatattatttagtgatgagaaactaaggtgttcagaataaaactcaatattatatctatctaaaaactcttttatctttttaacaaactctttatttaacttatcaatagaaccaattgatagtgataatccatgggcaacagtaggttttgaaaatagtacttgctcaaaggctttttcataaacccttggcatatgcatccaattttcaggagtaacttcccaccaatcaggtgagaaattgctatgttttaaatctaataaaaaatcacttcttagacctaatccacaccccttcaatttagtcatacaaaactcttagttaacttccacatttaccagcaccacaagagccagtaacttttttgtcttttttcatactattgttgtgcatgtcatttttcatgtcattgcttttcatatcaccaccacatttagcagaaccagtagagcctttcatctctttttgcatatcagctccacatttaccagaaccgcatgagccttttttctctactttcttcatatcgccaccacacttaccagctccacaagaaccactacttgcagcaactgctgttgttgatgtaagtgcagctcctagcatcatacctgctagttttaattttgtattacttctcatgttttttccttaaactatttttctactgcttgaacttcaatttctaattctactttttcactaacagctactccaccaaactctaaagctttattccattttaaatcaaaatctgtacgattaatctctccctcaagtgagaatcctactctattatttccctctaagtctttgattgtaccaccaatttcaacttctaatttaacctcttttgtaattcctcttattgtcaaatcaccaatcataacaccttcgtcatcgctttttttaatatatgatttcataacaaatttaagttctggatacttttttgctaaaaagaagtctgcacttcttaggtgattatctcttttttcaatacctgtatctattgattctgtttttattgttgcgtttaatgctttgaatacttttgttttgtaatcaaaatcaatatttgcatcaaacttcttaaactgaccatttacttttgtaatcataagatgcttaactgagaaacctacttctgagtgtgctttatctaaagagtgaggtgttgcatttaataatcccgctactaaaaataaacctgctagtaattttgctgttaacttcatattgtctccttcgtgtcattttcatacaaaagcattatagaatacttatgtgtattgtttgtgtagaaatcttatttattattatgttatacttaccttaacttttaggattaattatgaatatactattattagaagacgaccttatactaaatgaaataatcacagaatatcttgaaaataaagattttgaagtaacatcaacttatgatggagaagatgcattatcttatctattttcaaatatctatgatttattacttttagatgtaaatgtaccaaatataaatggttttgaaattttaaaaagattaagagatgagggtattacaactccatctatttttattacttcactaaatcaaattgatgatttgaaaaaaggctttgatataggttgcaatgactatattaaaaaaccctttgagcttgaggagttaggattaagaattgaaaatataaaaaagacatttaatataaatgcaaatattttacaaattgaagagaatattacttttaatactcaagatttaattttaaataatgatggtattattcatcatcttccacaaaaagaggctaaaatacttatttatttagtaaataatgccaataaaataataccccatgaagagttgatatctaatgtttggggttatgaagatactcctagttcttcaacacttagaacatacataaaaaatcttcgtaaaattttaagtgatgagtatatacaaacaaaaaaaggagttggttatagttttaacaagaagtgaaaaatctgcacttgttagatttttgagcctatatcttggttcatcgtttattttacttactattattgcttggcttttttataaagtagagtcaaatttatattatgatttgataacttcaaatatgaaaagtgttgcctctaaaatatcttcaaccataatctatgcgcatatgacaaatcaaaaaataaatcctgaaaagattagaaaaaatattgattttgattttgcactttataacaacaatcatgaaaaacttgtaggaaatattgaggataagattgattttacaaaaaagataaatcaatatgggaacagttttattttaattgatgattctgcattggggcatttaggaataaattatgttgttattaaagagaatttctttcataaaaaaatacttgaattaaaagagaagatttttatatcctttttactaatttttgcatttttatttataactggcttttatcttgcaaagatgtttattaagcctattacaaatgaaagattaaaattaaataactttataaaagatacgactcatgaattaaataccccaattactgctattttaatgtgtacaagtaaaggttcatctcttagtgaaaaaaacttacaaagaataaacctaagtgcaaaaagaatttcagaaatatataaagacctaatttatctatttttagaagagaagaaaaaagagtcaccaaaggttctaagaattgatgaaattttaaatgaacaaatagagtattttacaactttagcttcaaaaaaaagagtagaaatcacaacagatattgaatcaacttctttttttatagacaaagagagttttattaggctaagtaataatcttatttctaatgcaataaaatataacaaaataggtggttcagtagatattattttgaaaaataatcagtttattgtaagtgacacaggtacaggtattgataaaaaaaatttaaaagatattttcaaaagattttatagggcaaatagtgttcaagggggatttggaataggtctaaacatagtatacacaatatgtaaagagcacaatattgatataaatgttgattctacacaaaataaaggtacaacttttactttaaatttaaattccacgttaattgcacagtaaaaatgtaagaattccttattaaataacaaaaaggagttcttatgaaaagtttttttaaacttttttctattctaatcttagcatttggtattgcaaatgcagaacctatttcacaatctggaaataaaaatggctatgatgtaaaatttacatctgaaaaatcacttgttgttggacaaaatagtttctttgttcaaatttttaaagatggcaaacaaatcactaatgcaaaaactaaaataaagttttatatgccagagatgccaggtatgccatatatggagtttaaagataaaggtaagcttgtaggagataaatataaattagatgtaaatttatcaatgagtggaacatggcaatatcaactaaagtttaaaacttctaatggagaagttcatactttaagaggaagcgtgaacttataatgaaaaagtttttatttgtaatcactctttttatatcaagtctaacagcaaatagcattgatactttagtaaatagtgctattttgaaaaatagtgagcttaaaagtatagaaaaatctattatgattgcaaatgagaatatcttacttgcaacaaaatattcaaatcctactttgtctttaggtttaacagatattcatacaaatgaaaactataacaaaagagatttagaaccaatgcaagcacagtctataggaataactcaggctattcctataactgataaactagagattaatcaatcaattcaaatcacaaataaaactattttagctcttagtttagaagataaaaagctattattaaaatcgaaaatttatgaacttgcatataaaatagctattttaaaagaaaaaagagattttataataaaacaaaaacaaaacttacaaaagattgaaaaattacaaaattataaatatcaaacttcaaacaatgatgtaaactctatatttaacacaaaaattgcaagaaaaaactttgatattgtattaaataatttagatacaaatatacaaactttaaagctaaatcttgaagaaataacatacaaaaatataaataatataaaaataaatacaaatatagataaaaaatatatcaatttaaagtttgacaatcatccaaaaataaaagccttgcaacagcaattaaaattaaataaacagcaagaagcttttgaagaggcttctaaaacatctgatattaaattaaatgctacatattttaatagaagagagtttcaagattatgtaaatatctctgtttctattcctttgtcaatttataatacagaaaatataaaagtaaaaaaagcacaactagaatatttaaaaacaaaagatgatttacaaactttaaaacaaaactttattatttcaaataagattttacaaaaagagctaaataatagctataaaaattacaaacttattacaaaagatattattgcacttcaaaatggtattgaaaaaagtttgaatattaataataagtttaaaaataacaccataaaaatcatacaaaatctaaataaaactattagtttaaaaataactgcacttgatgaaaaaacaaaatatttcacagctttatcaaaagctatttattatgaaggaaaatagatgaagaaaatagtacttatatgtttgcttggcttaactttaataaatgcaaaaataattgaagttgaacaactatttaataaaaaaattaccactgtaaaaaaagaaaaagtatcatttaccaaagagttttatgcaaatagcttaataatagaagataaagttgttgatatagtaacaagatttgatggctttataacaaaactagatgcaaatagattatatatggatgtaaaaaagaatcaagcacttttttctatctattctgatgatatttataatataactaaagagttaaaaatagcaaaagatttagataaaaacctttatgaaagtacacttgataaacttgaagttctagctattaataaaaaagagataaatagaattaaaaattcaaaaaaagagtttaaagatgtgactttttactctcctatagatgcaataatcttacaaaaaaatataaattataaatcatttgcaaaaaaagggaaacttcttttacaacttgcaaatatagataaactttgggttattgcaaaaatatatgaaagtgatttaaaagatataaaagtaggtcaaagaacaaaaatatattttgatggattagaacaagcagttgaatcaaaaatagattttatttatccaaatattgactcaacaagcaaaacagttgatgttagaatgaccgttgagaataaggataaaaaaatatatccaaatatgtttgcaaaagtaaaagtagagattgcacatgaaacaatgcttactttacctaaaacagctgttttaaataaagcaagcaaatattatgtgtttgaaccaatttcaaaaagtgaatttgaaccaattgaagtaaaagtaaaaagagtatcttcaaataagtatcagattctaagtggtcttagtgagggtcaaaaagtaataaataactcactattcttgcttgatagtgatgctgttacaaatggtctttatgacaatgatgacgatgattggtaggaaataaattatggttgaaaatataatctcatatagtataaaaaacaaatttctagtacttttttctattatagtattgacacttgcctcattttgggcagttaaaaatactagtttagatgccttacctgatttatctcctccacaagtaattgtgcaagtaaaatgggcaggacaaagtccaaagacaattgaagagcaagtttcatatcctcttatatcaaacttgatgagtttgccaaatattgaaacagtaagagctatgagttctttttcaaatgcattgatttatataatttttaaagataatacagacctttatgaatcaagaaatagaatattagagcaattatctcaacttcaaggagaattcccctcaaatgcaaaaataactattggtccagatgcaacaggtgttggttgggcttatgagtatgcattaaaatctgatacaaaaagtttagatgaactaagaactttgcaagattattactataaatttgcacttttaggtgtagatggagttagtgaaattgcttcaattggtggatttataaaaaattatgaaattactttaaatcaaaataaaatggtgcaatacaatataggtattgatgagataaaaaaagcccttgaaaaaagcaataatgacaaaggtggaagaataatcttagagaatggttatgaacacttaattacagcaaaaggttatttaaaaagtgtttatgatatt

SEQ ID NO: 3475 - DNA, 13669 bp, synthetic construct
  misc_feature 1..13669: note = Synthetic
  source 1..13669: mol_type = other DNA
aacagtttatcaagcagtattttatcaacctctatggaaaaagtttgaagatcgttattgccagagagggtaaatacggtacgccaatccagggtttgttttccataccgtataccaaaactattttccctggttgttttagtgatggatttgaaatcaatggtatgggtgtccgtagtgattcctataaaaggaaattgttccacatcttgttgtgaatacagtgcagtgaggagaaggtgtaaaagtatgatcagtcttgcaataggcatagctataaactcctggataacttttgatagacttgacactcttgcagcaactcctcatgtgagcctctgcaaatgatctgtccatcctggaataccaagatggtatcagcctcttcaatggtgcttaaacggtgtgcgacagtaaaggtgatcatttctgatttgagttcgtgaagggccttttgtatcagggcttcacttttgttatccagggcagaagtagcttcatccaatataaggatatccggatttttatagagtgcgcgtgccagagcaatgcgctgtctctggcctccggagagattgtctccgctctcagaaagcagtgtatggataccatcatccaatttgttgataaactctatcgcatgcgctttcttcagagcttcaaccacacggttttcatctatctcttccccataagcgacattggccgcgatggtgtcgttgaagatatagatacgttgtgtcacataagatatctttttgtgtaaagaggtgaggctgaacgctttgtaatcggtgtcgttgataagaatttcccccgaacttggatcataaaaacgtaccagaagattgaccaatgaacttttacctgcaccactatcaccgaccagtgcgatagaatctccctttttagcctggagagtaatactcttcagggcagggataggaccgtaatcaagagaaacattttctaaagtgatacttttgatggtatctgtaagctcttgttgccctgataggatagtcgggtgcgtgtcaagcagttcatgcatacgtgtattggcagtgatggcatcttgagctttgttgtaaagagaagagagacgttttaccggatcatacagcataaaaagggccgtggcaaaggcaaaaaacgaccctacggtcatgtgcccgtctatcacctctttccctccgacataaatgacgataccgatagccactgcacccagtgtttccatgaccggtgaagtcaaggcattggtttttacctgcttcataaggaacctaaagacactttgattgtctttttcaaaacgtacccgttcatagttctggctggagtgggacttgatcacttcaatgttggaaagtatttcattgagcctggtggtcatgtctgccgtactttcctgagagagcttggagtatttgcgcattttgttggcaagttttgtgagcgggaatatcgccaatggcatgatgactaaaaaataaaaggcaagtttggggttttgataaatgacatacccggtcaatgcaataatgatcattgtctctcgaataagatcaggaatgatattggcgacgactatttggatacgtgcgatatcattggtaacacgggaaagtatctctccggagtgcgtttttttaaaaaatgccatatcgagataggtgagatgcgataccagttgatcacgcagttttcgcaccacatcctgaccgatataagaggtatagtaggtctgtatgtattttcctatgcctttgagcgcaaagacgccgaccaggaaaaaaggcatcagcaacagcatttctttatctttattgataaatacatcatccagcacgggcttaatgagctgtgctgttcccgcagtaccgatcgcaacagcgatcatccccagtatggcaaagaaaaactgtcttttgtagcctacaaggtaggggaggtactgtttgagaagctctttcattacgctttttcccaaagtgtgccgtcaggagtatccataatggagatccccaaagcggtgagctcatcacggatggcatcagaacgttcaaagtttttctcttttttggcttcactacgctcaagaataagcgcttctatttgttttttcagggtttcatccacaccgatctggaaataagaaaaaggttctttaccaccaaaaccaagcagcgtatcgataaactctatgtttgccaaagtctcttttttaagggccttgtttttcggatctgtatcaagagcatcattggtggttgctaccatttcatctatcagggcaagtgcgatcgagatattgaggtcatcagacatcgcatcaagcagcgcttttttgaatgttttattcacggcagaagctttccccggactgacacgtttcttcagcctgtagagcttgtccaatctttttttggcagtgagcagatcctcttcattaaaattgaaatcatttctgtaatgtacagagttgaggtagtagcgcaggacttccccgtcataaactttaagtgcatctttgagaaagaaactattgcctaacgatttgctcatcttttcaccgtcgatctgtacaaacccgttatgcatccaatactttgccagttcatgtccagtggcacagcggctctgggctgcttcattctcatggtgagggaaaagcaggtcggccccgcctgcatgaatatctatactgtactcctgcgtaccgtgtgtatgggcaaagtgtttttcgatcatggcagaacattcgatatgccagcccggacggcccgaagagaaaggggcatcaaagcagatgtcttcgtctcctttgcatgctttccatagtgcaaagtctttggggtttcttttttcagtagtgtgcgttacgcggctctggttctcctcatcttcacctacccggtgtgatatctcaccatagtgtgcatctttactcgtatcaaagtagacatcgcctgtggagatgacatacgctatgtccttgtcgatgagtgtctgtatcatgttttctatcgcctgtagagactccgtagctttgggctcgatgtcaggacgctgtatgccaagtgctgccatctcttcaaggtagcggtcaatgtaaaaagaggtgagcgcttccatagtttgcccggtcttttccacctttttgatgatcttgtcatcaatgtcggtaaagttcttgcccagtgtgactttgtagttaagggctttgagcgtacgtgaaagaaggtcaaaagagaggctgcttcgtgcgtggcctaagtgtgcatcatcataaacagtagggccgcaaacatagatacttgcttctcctttacggatgggttcaaaaggaagttttgttttttgtacgctgtcataaatgtgcatgataatcgctaggcctttgttttatgtagtgttgtgattatagctaaaagttaattagaagagattaccgacaagagtagttgatgaaatggagaacatacaatagatcattttacggtttttgatcttttaacataaaggttaacacataattaacacaacatctataaacttttgtcattcaatataaaagggaagatatgaaaatgaaatattcgctgatagcagttatagcaattgcttcaaccatacatgcagcagaagatctaggagtgatcactgttgaatcatcaacgatagctgacagatttgagtcaaagaaaacagaagtgtctaatatttcagaaatcagtggagaagaagttgatgcagagcatgctgtaaatatacaacaggttttacaatctattcccggtatcactaccgaggttacgacaggggattctttaaagatccacttaagaggtgtagaaaatcaaatgtatatgggagaaaaacccggagttgctgttgtaattgatggtgtacctgtatttgaaagaacagggagagtaaatattgaccttgacaatatagaaagtattaaagtgataaaaggcggtgcttcctatttgttcggtgatgatgcattatctggtgctgtaattattacaacaaaaagaggtgcaaaatacaataataattttgcatctgtggaaaaaggaagttttgggtttcaaaagttattggcaagaactggatatgcaaacaatgatttcagttttcatgttcaagccagtgaaagaaaagctgatggatatcatgaagattctgattataaaagcaaatatctcaatggtaagtttgaatactatctagatgatacatcggatatcacatttggtgctgaactatctgataggaaaaaagattctcatggtactgtgggaggtgaaacagaagcaaaaacgaatcctgaatctatctatgatggtaatcaagagagtagggattatacaagaaaatatgatgttcagctatcaaaattctttgcaacgtattctaaagattttgataatagctcaaacttcatgttcaatggatatgtttatactgatgatactgagtttatatcatctcctcaaacgaaagatgacaacaatactgcacaagactattatgatgatgaagattatgtttacaataattattatgaacagatacaaagaggtatcaaaagtgaatacagaacttcatctgcatcctatgcgacacttttaggtttagacctaagagcaaatgaatataaaaataaatccacatacagagtggctcaggcacttgtaacgtatggaccatttggcggtgttgatcaaggctattttcaacctggtgactttaaaagtgatagtaatacggatgaaaatgtttatgctatctatggtgaatataaacgagctatcagtaagaacttaagtgtgaccacaaaccttaggtatgattggattaaattagattacagtgattataaagataataattttaaagaagattttaaagtttggtcatacagaattggtgcaaattatcaattagatgaagattctacgatttataccaatttttctacaggattcagagctcctactgtagaacaactctatgcggaagatgtaagtacttggggtagtacacttaataatcctgatctggatccagaacaatcatttaactatgagataggttatagaaccactaaaaatggtctaaactatgatatctcaattttccaacttgacagaaaagactttattatgaaaacttcaggtaattatggagataccgagagtgatgatatgtgggacaatataggtggagcaagacatagaggtttagaacttgctgtaaacggtactatcagaaaagatctctattttaatttggcatatacctatttagacgctacctatactgattacaagaattatggtatgacagtaggagcagacacttggagtgcaccggcacctgtttattattatgatgtaaccggaaacactattcccagaacttccaaacatcaactgaatgtaatcactaattatcaagccacagatgatttaaaactcacagccgaagtcaatgcaagatcccattattatgccgatgatctaaatgcacttgagatcgaagggcatgcgactcttaatttaggtgttgattataaagctgtcataaataagcatgatctgaatatgtttgtaagagtcgataatgtgtttgataaacagtattataatgcagcaagatcaagtagtgacagaaacgaagatggcgtatatgatcatgaagatttatcaattacggtaaatcctggaagagttatcaatgctggtttaagtatgaaattttaaaggatgatctatggtagaatttaaagaaactagagaccggaatgatatatacggtatgcccgtattaggatttttatttaaaaaccaaacattcttgatgatgctaaaagtagttgttctggcactcttcatctatggtgtatatatggggtttgctgatcctggagcagaaaacatctttaccaggcatctcttttggggactcttctggtctctttttatcgtagtcacattgactacctttggtagaattttttgcggtatctgccctcacggatttttaggaaaatatatcaccaaattcggtcttaaaaaagagatgccaaattttttgaaaaatagatttatcggtatattcattctcttttttggatggtggggtatttattatatggcaccagggttttggaaagtcccacttgctaccgcttggctttttactggtattacagtggttgcttttgtcatgtattatctttataaagatatgagctattgtaagtatatctgtcctatcgggactttgacaaaagcgtatgcaaaagtgtcatttacagagttgggtacctataaagaagattgtaacagttgtaaaacattagattgttctgtggcatgttcctataatctaaatccattctcgtttgacaataaaaactccatggatgactgtacactttgcatggattgtagcagcgcatgtgattctgtggcatttaggttcactaagccttcaagaacattgtttgaaaaattcaaattcaataaagcagaagtatgggcatttatactcatcactgcagctatttctcttacgatgagttttcaccatggtcttaatcgttcagctattgcagatgaattcatctggtcaagaagtgcagcatttgcacaacagtatatagattttggaagtttagatgcagtggggctttttgcatttatttatgcttcattatttgcgatcggtattgtctatatcggaatgtttgtggcttcaaaagttttaaaagcgccttttgaaaagacgttctatactttggggtacgcatttgctccactgttcatcattggcggattggcgcacttgatacatagtttctttacccataactatgcagatatagccaatggatttatttatggatttggtttggaggccggtccggttgaaaatctggctacaagaagagatgcctggttacatatcttcgatgtgattccttatattgcagtactatgggggtatctgatcctggcaaaaagaatgaagtcttttaaagcaacaaagatgaagaagagtatagcgtttgtctttgcttcttctctgatcacactctatctgtcaacaaacctctatagtgcttatgtgtttaaaacatatggtgtggcaaaaagaggtcatcatggaagtcatggaaatcatgctgcaactacacctgaaaaatcagaaacaccggtgatgaaatgtacagctggtaaatgcggggctgctatgaaaaagcagtaggagagtgtagtaagaaaaaataaaagctaaatattcttttttagcttggtagttgttaacgtatatatccaagtaaaaagagattaacctcatacaataaaatggagaataccaacaagcctataagccagtaaagagatcttcttgatcgaatgatctctaaaaacctatcagttcctacctctcttactgtgaggataaaaagcacccaccccccgatactccccgccaatgccagtcctgaagcaccaagagggtgcatgagtatcagtgatgacgttacagaggctacaagagaataaacagcgatcttggcggccttaaggtgtctatgtgaagcatagaggaaaagagaaaagagttttgccagtccaaacggaagcagtcctatcatatacatttgaagtacccttacggtttcaagtgtttgaatttctgtgaatttccctctttcaaaaagcagccatacgatgggttctgcgagtaaaatacctccgaccatcgcagcgcccaacaaaaatgcaagcagccaaaaggcctggttgaggttttggtaggctgctgtttcatttttgttcttcagcgctttggaaacagcagggaaaagaacagtagctgtggctatggcaatgatggcaagcggaagctgaaaaacacggttggcataaaaaaggtaagagacagaacctgtcatcaaaaaggttgccaaaagcgtgtctatgaacgcagagatctgaggtgtggagtttccgagtatcccgggtaaaaagagagactggaaatgtttcttctcttcctccacatctttgctttttctatatttccatccacccacaaggagcctatgcagatttagattatgcaaagtaagcaggtgggctatgacttgaagccctccaccgatgagtacagcaaagctgagcgcataggctacggttttgggatcctctttcatatagaggtaaagtgcagcgatcatggaaatgttgagcagggcggtggacatggctgtggtagcaaaatggttcttgtattgtaagagtgtggctaagaaagtgacgataaagatgagatccagataccaaaagtttatcgcggtcataggagccgttttgtctatcagttcgcttccccatcccaaagccagaagtttggtgatgggttcagggaaaaaggtgatcagcagggaaaaagccatcaaaaagagcaaaaagcgtaaaaatatcgccgttgcaaagacccctttgtgtttggaagctacaaacgaaggcataaaggcctgagtgaaggcaccttcggcaaagatacgacgaaaaagattaggcagtttgaaggcaacaaagaacatatctgaccacatagaagcacccagagcagaagccataagcacatcacgtcccagccccgtgatacgtgacactaagataccgaagctgttggtgaagatagatttaagtttcattaatagcgttctcctttgccgcaagcaaagcttgtaacaaattcctctcactaaagcattgcctttggcaagaagttattattttataagtttcaggtattttagcgtaagtaggtataatctttcatggcttacttcaaacagaaactgcccattcaaagattacttcatattgtcaaacgtctttatgctttggaaaaattggaaagtaaggtgctttcctgtgattatgatgtatcttccagaacgatttacagggatatgcagaagatatcggagatactacccatacgtagtgcttcaggaatttggcaactcgacattgaaaatacattggatggaaacaatgattttcatcagacacttttaggttcatttgcacgtaatcttgagatagatatcaaatgtttcgaaaaatcaaatatcaataaagaaaatgtagcttacgctgttgaatataagcatttacccaaaaaattgggtgaacagatacttcattgtatacagtccgaggagcagtgtacctttagctatataaaggatagatcgattactcagagaaagatagatcctatcaagatatatactgaaaacagccgatggtatgtgatagccagagactataaagatgataaggtcaaatacttcaatcttgccaagataaaaaattttaaacatttaaaaggagaaccctccacccttacccaaaatatgatagaagaagcagataaaatgaaaagcatatggtcttctaccggaggagaggaaatgacggtaaaactttatgtgaaacctgaaatatctcagtatataaaggatattaagctgcacaagtctcaaatactatttgatgaacatcacgatgggggtctagaagtacactgtaccattacccataagctggagctattgccacaattaaagtattggttgccgaggattcatatactcaagccaaaatggttacgggaggaacttatgaatgatttagaattttatagagatgaagataataggtttggttagttgtgacatgtaagtgtcaatgggttgtgataacataacaaaatgatatgttatttagttattagggttgtgatttgaaagaagtgaagtttttaaggatgacaactaaatgtcagttcaaccttactcggaacttcttaaccgattattatagcactttcgtgtccccacacaaataagctatgcagtataataatatacaaaactttaagggaagataaaatggttcaaagaattttaggtttagatatagggatatcatctattgggtgggcagtaataaattatgataaagaagatgctactcaaaacaaaatcataaaaagtggtgtacgtattttcacacaagcggaaaatcctaaagatggtaaatccttggcagaacctagaagattggcacgtgctgcaagacgaaccttaaagcgtaaacgtcaaagaatgaaagcaattaaaaagctcttgatggagactttattattgcctcataaagatttatttattggggacatagatgagactatttatagtaaaaaagaacgtacagacatttggcaactaagaagcgaagtcgtaaaaagagctttaaatgcagaagaatttgcaagaattttaacacatattgcaaagcgtagaggatataaatcaaaccgtaaagtagacgaaaaaggcgacagtgaagggaaaaaagtcttaggggcaatagaaaataatcaaaatcttttaaccaaatatgaaaccataggtcaagcgatatatgagaccaccaaagatacaggtatacgaagaaataaaaaagatgactatttacatagtgtctcaagagagatgctgttagatgaggtcaataagatatttgagaaacagcaattatttcaaaatacaatggcaacggataagttgaaagacgattttataaccatagcattttctcaaagagattttgcttcagttgatggcatggtgggcaaatgtacttttgaaaaaaatgagccaaggatcgctaaaagaacgtatagtgccgaagaatttgtgacactaacaaagcttatcaacacaaaggttgttttggaagatggaagtgaacgaggtttcactaaagaggaacttgaaacgataatcctcctatgtaaacagagtgaaagacctagttatattaaaataaaagaggctataggcctagaaaaaacatcagtgcttaagaatatagaggactatgagatagataaagaaacaggcgaatttttaaagaataaaacaaccaaatttgtaagtgcattcaaaggattccatgagttgcgcaaagttgtagaaaagacactttcaaagacacattggcacaatatatctcaagataccaagctattagatgaattaggaactatattttcgatacataaaagtgataagaagataagtgaaactttagacacattaaattttggaatgctttcagatgatgaaacaattaagctaaaagaagccctaatagcctctataagttttgatcagttcatttacctaagtttaaaagcacttgataaattgttgccatatatgagagaaggtaaacgctatgatgaagcagtatctttggcaggttataaaaaagagacaggcaccaagcagaagtttttaagagcactcaacaaacaagaacaagaccagttaaccaaccctgtagttaaaagagccatagcacagacacgaaaagtcatcaatgcactcataagggagtatgggcagtttgactctgtgcatatagagcttacacgggagatcaagaaaagccataaagatagaaatgaaattaaaaaaggtcaagagaaatatagattatataaagaagagacagtagaagattttatcaaactttttagtagagagcctaagggtgcagagttacttaaatttagactatggaaagatcaggatggttactgcgcatacagcggatttatgggagaaaaagcgtatataaaaccagaaaaactcatagacgatgtaaagtatgccgagatagaccacatactaccctacagtagaagccttgatgacagcatgaacaataaagtactttgtctagccaaagaaaaccaggataagaaaaacatgacaccatttgagtattttgaaaatataggtagagattggaatagttatgaagtctatgtaaaaaatatgaaaaatattagaaaagccaaacgtgacaggcttttaaaaaagaattttgatgaaaattctgaaaaagagtttagagaacgtaacatccgagatactgcttatatggctagatatattaaaaactttatagaagaaaatcttgaacttagaagtattggcaagaaaaaagtagtaactattaacggtacattgacaaatatgttacgtcataactggggagtgggtaataaaagtagagatactcatttacatcatgctgtagatgcgatacttatcgcatttgcaacagacagtgaagtacagaggctttctacattatctgcaaaaaatgaaggttttaattatacttccagcgaagccaagtctaaaaaattcagattttctcctcctatggaaaattttagagacgaggtgcaaaaaagtatagatgagatttttgtttccaatgctcctagacgtaaagtaacaggcgcagcacacaaggagacaatccgctctaaaaaattggaaaaagttaaaggaagttttgaagttaatggtggccttgcagaaaatggagaagtaaaaagagtagatgtatttaaaaaggatgacaagtatcattttatttacctttatacggcagattttgaaaaagaaaaacttccaaatactactattaagaatgtagatatagatgatgcttttacgtttcaatttgctatatttaaagatgaacttattgaaataaagcagaaaaataaagatgcctttagggggtattttaagttttctgaaagtgatggtagatttaacatgcaatttcatactgacagtgaatatgataagaaaactggtagattttctacgggatctttagaatacataaaaaaatatcaagtagatgtcttgggtaacattcaagaagttaaaaaagagacacgtgttgctaccaaaaaagtattgaagaaaaataaacataatagtattaaaaataaaacaaggtaatagtatggggtggagaacagttgtcataacccaaccttctaagatctccatagaaaatgatcagctaaagtatgcacccaaagatgccgaagtgataaaagtacccatagatgatatctctgttatcatcttggaagtgcatcaggtgactatcacttcagcattgatgtcgagactaacagagtccaacattgtactatttacttgcgacaaaacacatactcccaatggtgtgttcattccctttcatcagcacagcagatacacacaagtagcacataaacagatggtatggtcggaaccatttaaaaagcgtatatggaaacagatcatctctgctaaagtgctcaatcagtctcagactttagcctatatgggaaaagacaaagtttctcaattaaaaaattttgcaaaaaatgtaaaatcaggtgatacatcgatggtagaaagttctgcagcacgtgtttattttacggcattgtttggtaggtttaacaggcgtgatgatagtgactggcgtaatgctgctttaaactatggatatgcacttatacgcggagctatctccagaagtttggcagcgcatgggtttttaccagcttttgggctgtttcatcataatacacttaatgcgtttaatctttctgatgacatcattgagccttacagggcatttgtagatgtggtagtgtcagaacactatgaagcgtttatagaactacc

SEQ ID NO: 3476 - DNA, 4793 bp, synthetic construct
  source 1..4793: mol_type = other DNA
  misc_feature 1..4793: note = Synthetic
cagtctaacgaaaaattattctactcagaccttaaaactagattgcaacgtgatcgacgtgaagagagattgtatataagacttacaaagaatgaaaaagaacgtctccgccaattcgccgggaaagtgggtatgccgctgggagaatttgttttaaatattggactggcgtatagcgagcaatacgaaagaatggctgaggagggaataggtcactgcaacaattagagcatcaggttgctcgattgataaggaaagcattttagagcaaataaagagccccctccaaagagggggccaaggcttcaatcgaaattgaaggagcctgggaaaaaattctttatcatgagaagcttcccgagcctaggtctgttacacctgtacccactttatcatttcattatgttttgatcaatgggataatgaaacaccctatacacgattcgaggcaccaaagtgagctatctcctcggtttggatttgggttctaattccattggatgggcctgcattgaccccgcggaagagaaggtaattgccgtgggatcaagggttttccaggaaggtgtcaatcgtgataagggcaaagaggtatcgaaaaatgagacccgccgcattgcgcgccagtcaagaagacagtatttcaggcgtgcggatcgaaagcaaaagttaaaagcaatcctgcaacaggcaggaatgttccccaccgccccaccagaagtttctgaatttctcaacaatcagaagatctacgatccctatgcgctccgaaaaaaggggcttgatgaaaaactgtccaagctggagtttggccgggcgctataccacctcaatcaacgccgcgggtttaaaagcagcaggaaatcaggtgactccaaggaggacggtgtggtcgcgcaggcaacgacccagcttcaggacaaaatcgattcttccggttgccgcacgttgggagaatacttttcgggactggatcccatgagcacaccgatccgcgggcactacaccttgcggaaaatgtatgaacaggaattcgacctgctgtgggaaaaacaagccacgtttcaccccgaattaaatgacaccctgaaggaagaagtaaaagatcagacaattttctaccaacgtccccttaaatcagttgcccacctgattggaaaatgctccctggagccccaaaaaaggcgctgtgctaaacacgcgtttgaagcacaatcctatcgaatattagagcaggtcaaccggttggagtttatagacgatgacggagttgtttacaaattcagccgggctatcgatgaaaactttacagagaacattcaggaactgcgcgacaagctcatagaagctctacaaaataaaaaggagatcaagtttgaaggaaagaaggggatcaaagcgcttcttggttttagccccactacaacctgtaacttggagaaaacagacaaaaagctaatcggggatcgcacttcgcatcaactccgctccttcttcaaaaagaaatgggactccttttcccaggaggagagggaaaaaattcaccaggtcatagcgcaagctcaggatcccgaatggctggaagcttatgccgtaaaaaactgggagcttgctggggaggttgcggcaaaacttggcaaagctaatttagagccgggttacttcaattactccagtaaggcaataaaaaaactgattccgttcctgcaggagggtttttcgcttgcagatgcgaaagaaaaggcggggtatgtagaaaatccggaaacccgctcaatcgaggaacgactccaaaacctacgcaacccgatcgtgtcccatgcactttatgaacttctaaggcttcacaggattattgttaaggagtttggcgaaccggagaaaatacagatcgaattggcccgcgaactgaagttgccggcatcaagacgccgagaaatccattttaaaaaccaggaacttagagagatcaacgacaatgcgcgggaagaaattttgaagatgggccataggcctaccggcgatgccctgctgcgctacaaactgtgggatgagtgcggccaaacctgtccctacactgggaggaaaatatcccaaagcaaacttttcaatgacaacgaatttcagattgaacatattatcccatacagtcgtagcctcgacgactcatacatgaataaaactctttgttgtacgaaagagaacgcaaaaaaattgaaccaaactccttatgagttctacaacggaaacccagagtacgacaaggtaataaagcgcatcaaaaacctgccttacgccaagcagaaaaaattcaagcaaaaagaaattgacgatgatttcgttgcccggcaactgaatgatacttcttatatcagccgcgaggccaggggcctgttccagcaaatgggatataccgtcttggtcgccaaggggactgccacgtctgaattaagatatctgtggggattaaataccgtcctgcgtgacacaaatcaaaacatgaaaaacagggaggatcacaggcaccacgccatcgacgctgccgttgttgcaatgaccgccacagcccccttgagaaaactcagtcagtacaacaagtaccggcgcgaagctacccggaaggcgttcccccagccatgggactctttccgttcagacgtggagttggctgttggtaacgtgctggtttcgcatcaagttcataaacgggcccgcgggaaacttcatgaggaatccatattcagtgctctcagcaaaaacgatgacaagggtattcccatgttcgccatccgcaaatctctgaccaagctcgattctttttcccagattcgccaaatcgcagatcctgcagttaaaaacatcatagttagacatttaaacaaccagggagttgacgttgaaaatgggacaggaaggctgccttctaattgcttcagggacgcagagctgttcttagattccagcgcgggcaaaagaattcccataaagaaagtccgactgcatagaccttccaagcatatgatcctgcttcccaagcacaacaacaaggctggagtagagcccggcagcaaccatcatattatcctgtaccgctgtcaggattcgaatggaaactggagacaaaaaggaaaggtttgcacgctgtttgaggctacaagacgcgtgaaagcaggtttgcctttaattgacaaaaaactcgaaggggggcaagagtttatttgctcacttgccataaacgagatggtgcttttcggcgcggcggaagttgatattgattgggaaattcccgaccataaactacttacccccaacttgtaccgggttcagaaaatatcggacagtattacgttaagacaccatctagtatccgtgctaaaaaatgaagaaggtgaagaagttgggcgcgttataaaaacgcccggcagttttgatggaattaaatgctatgtagaccgcctcggtaacatctgcagggcaaatgattaagcgcactattgccatagataatccatcccgactgagcgttaaaaattctcaactgatcattgaacaaaatggtgaggttgcgggcaaggtgcccacagaggatataggcatccttatcatagatcatcccgcagttctttatacccatgtttctataactgcgttattggaaaacaatactgccgtagttctctgtggggaaaaccatcaccccaaggggcttctcctgcctcttgatactaatagtgttcaatctgaaagatttcgatgccagattgaatcaggctcgccacttaaaaagcgactctggaagcaaactgtgcaagccaaaattagaaaccaagccaatctcctgacaaatcgcggtgtcgaaaccgcgaggctcagtatccttgcgaataaggtgaaatctggtgacccgcaaaatatagaggcccaggcgtctcgtttctattggccgcggatttttgataaaaactttcggcgtgaacgaacagggccgccgccaaacaactttttaaactatggttatatgatcctacgtgccgcagtcgcacgctctcttgtttcttcaggtcttcttcctacgctgggtatacatcaccgtaaccgctacaatgcctactgcttggctgacgatgttatggagccctttcgccccattgttgatctaacggtgttgaaagtattggaagaatttggtgaaattgaagagctaacttcaaatgttaaaaaggtattgttaggtgtacttacgcacaccgtttcttataaggatcaggcgcgacccctgatggtagggttacaccaaactaccgcttctctctatcgttgtttttctggagaacaaaaatccattgattaccctgtgctgtgagccctatcaacgcctacagagcgatgtggttgtttgttctatttgatctacctacctcaactgaagaggcacgtaagagctatgcgcggtttcggaaggggctgcttaaagctggtttcgatatgatgcaatactctgtttacacacggcattgtgctagtcgggaaaacgccgaagtccatattaaaagagtaaaaggtgcattgccaggggaggggatggttagtattattagtgtgactgacaagcaatttggcgatatccagaccttctggggcaagaaaagaaagaaagctcctccaccacccagacaactggaaatgttctaaaaaaaatgccttccaaccctctattgagagagatcgaaagacacttttccccgttaaaagagcaaaccatcctttatatttggaggtttaccacacatcta

SEQ ID NO: 3477 - DNA, 23396 bp, synthetic construct
  misc_feature 1..23396: note = Synthetic
  source 1..23396: mol_type = other DNA
ggcgtgcgcgccgccgccgacctgctggcgcagggcgaactggtcgccatcccgaccgagacggtctacgggctggccggcgacgcccgcaatccgcgcgccgtggcccgcatctacgaggccaaggggcggcccagcttcaacccgctgatcgtgcatctgccggacctggcggcggccgagcgcatcgccgtcttcgacgatgccgcgctggcgctggcgcgggccttctggccgggggcgttgaccatggtgctgccgctgcggcccgaggccggcatcgcctcgctggtgacggcggggctggatacggtggcgatccgcgtgccggcccatccggcggcgcaggcggtgctgcgcgcctttggcgggccgctggcggcgccctcggccaatccctcggggcggatcagcccgaccacggcggcgcatgtcgccgaccccgaaagcgggctgggcgggcgcatcgcggcggtcctggatgcgggcgcctgtccggtgggggtggaatcgaccatcgtcggctgggtccggggccggcccgccctgctgcgccccggcggcgtcgcggccgaggccatcgaatccgtgctgggccagccgttggcccgacccgaaggcaatgccgaggcgccgacctcgccggggcagctgaccagccattacgcgccgcgcgccagcctgcggctgaacgccggggatgcgcggccgggcgagttgctgatcggcttcggccccgtcgcgggcgagatgacgctgagccagacgggcgatctggccgaggccgcggcgcggctgttcgacctgctgcaccgcgccgatgccgaggggcggcccatcgccgtcgcgccggtgccggacgcgggcctgggcgccgcgatcaacgaccggctgcgccgtgctgccgcgccgcgctagggctcaggcgtggcccgcgctgggcgacagcatcagggggtcgatgcccagcgatttcagcgccgcgcgccatttgccgggattgtcggtgccgaagatgatctcgtcgccgcgctccgaggtcagccagccgttgtcgcggatttccgaatccagctgccccggcccccagccggcatagccaagcgccagcacggcgggctgcgggccctggccgcgcgcgaaatcttccaggatgtcgcgggtggtggacatggcgaggtcgtcggtgatgcgcatccggttctcgcccaggtcgatgtcgcggggggcgcgatgcagcacgaagccgcgccccggctcgaccgggccgccgaagcggacggggatgtccagcgcattcgtgccggcctggatgccaagctgcgccagcaggtcggaaaagccgatctcgggcagcgggcggttgaccaccagccccatggcgccgtcctcggaatgggcgcagaccaggatcacggattgctcgaagcgcgggtcgcgcatgccgggcatggcgatcagcatcttgccggtcaggttgctcgactggtccatgatctgctccgtccttttcctcaagatcggccctgtcggctgttttcgcaagggattgccgctaatgtgacttcaccccgagggggcgggacgactagaacggcagcatgaagacccttgccctgctattcatgaccgccgcgccggcactggcgcaggatctgccgcccggactggcatccgccgaactgctgcccggctggaccacggccgaaggccaccgcatgaccgcgctgcacctgcggctcgagccgggctggaagacctattggcgcagccccggcgatgccggcgtgccgccgcgcttcgactggggcgcctcgcgcaacctggcccaggtgcggctgctctggccgcgccccgaggtgatcgaatcgggcggggagcgcacgctgggctatcacggtgaactggtcctgccgatcgagatcaccccggccagccccgccgcgccggtcgagcccagggcggtggtggatttcggcatctgccaggacatctgcgtgccggtgcgggtggaattgcaggccggcccccccggcccggcgccggatccgctgatcgaggcggccatcgcccgccagcccgagacctcggaccgccagcccgaatgccgcatcgccccgatccaggacggcatgcaggtgacggccaccctgcccgcggcggacagcgcccgcggcgacgaggtggcgatggaactggccgatgacgagatctgggtctcggccccggaaacgcatgcagccggcggccggctggcggcgcaggcggatttcgtcgcggcctcgggcaagccctttccgctggatccgcaggcgctgcgggtgacgctgatcggccccgacgacgcggtcgagttccgcggttgccgcgaggcggcggactagccgccccgcctagccctccagccgggccgccaccgacagcaggtcggcccaggcctcgcgcttggccagcggcgtgcgcagcagataggccggatgcgccatcggcagcgccggcaggccgaaggccgtcgtccaattgccgcgcagcttcaggatgccctgctggttcagcgccgcgatgcagggcgtgttgcccatcagcaccagcagttgcggctgcgccagctcgacatgccgggccaggaagggcagcatcatcgcgatctcggccggctcggggcggcggttgccgggcggccgccaggtcagcacgttggtgatatagagcgcgtgttccgcatccaccgccttgcgcgacaggccgatggcgccgaacatctggtccagaagctggccggcgcggccgacgaaggggcggccctgacggtcctcttcctcgcccggcgcctcgccgatgatcatcacccgcgccgccggattgccgtcgcagaagcagaagttgcgcgcgcccttcttcagctcgatgccgtcgaaggcttcctgcgcctcggccagttcggccaggctggtcgcggcggcggccatggcctcggcgcgggcgaccacatcctcggcctcgtcgcgcggctgcgccacgaccggcgcggcctggacggccggggcagggggcggttcggcacggtcgggcgcggcatagcggtcgagcggcgcgtcgaggcatggctcgtccgcgcccagctcggcttgccattgcaaaagcgccagcgccgtctcggcgtccagcgcgaatcccctgtaggtcggttcggcggtcatggccgcaggctagggcgcggcgcgggcgcgggcaagatgcgacgcacagctgcgattgcgcgagcggcacgatgccttgcccccggtcgcgcgacgccagcgttactgcgattgcgtcagcggcgtggtgccgccgcccatgccgaccagccgctggatcagcggccttgccgtcggcccgatgcggtcgcaggcgcccggatcgtccagcagcttgaaggctggcccgtaataggtgcggtcataggccgcggcgtccagccccagcttcgccgccagaagatcgcccgtgccggtgatcagcgtccattccccgtcggtgatcgcgtaatcggggcagttcgaggtgatgacgttcacattcgccagttccgcgatcagcgatttcgcctgtgggtcggacaggcccgagacatcgggaagcttcacggtgatgcccccgtccgccagcgccgcgccggtccccaggaccaatgcgccggccagagccgcgagtgctttcatggattgcccccttgcttgttctggacgttcggtttcgcgcgcccatcccgcccgatccgccggtcccgtgcaacccaattcgccgtgaacttgacgcagcacaggcgcaaggatacgcgattgccaacagccagaagcatagaggatgcctgcgatgacgacctattcccttctgatcctgcccggcgacggcatcggccccgaggtcatggccgaggtgcgcaaggtcatcggctggttccagcagaaccgcggcctgtccttcgacgtcagcgaggatctggtcggcggcgcggcctatgacaaacatggcaagcccctggcggacgagaccatggccaaggcgcaggcggtcgatgcggtgctgctgggcgccgtcggcgggccgaaatacgacgacctggatttctcggtcaagcccgagcgcggcctgctgcgcctgcgcaaggagatggacctgttcgccaacctgcgtcccgcgcaatgcttcgacgcgctggccgatttcagctcgctcaagcgcgaggtggtggccggcctcgacatcctgatcgtgcgcgaactgacctcgggcgtctatttcggcgagccgcgcggcatttccgccgacgacacccccggcaacgagggcggccgcgtcggcgtcaacacccagcgctatacctcgggcgagattcgccgcgtcgcccgctcggccttcgaactggcccgcaagcgcggcaaccgcgtctgctcgatggaaaaggccaacgtcatggaatccggcatcctctggcgcgaagaggtgcaatgggtccacgacaacgaatatcccgacgtggagctgtcgcacatgtatgccgacaacggcgccatgcagctggtgcgcaatccgcgccagttcgacgtgatcgtgaccgacaacctgttcggcgacatcctgtcggatgcggcggcgatgctgaccggcagcctgggcatgctgccctcggccagcctgggcgcgccgatggagaacggccggcccaaggcgctttacgagccggtgcatggctcggcccccgacatcgccgggcagggcaaggccaacccgatcgcctgcatcctcagcttcgccatgtgcctgcgctattccttcggcctgggcgccgaggccgacctgctggaaaaggcggtcgagaaggtgctggccgacggcgtgcgcaccggcgacctgatgggggccgagggcggcaagccggtctcgaccgccgagatgggcgaccacatcgtcgcggcgctttcggcgctgtgaccggcaggtcgcgcccgcatcgccgggcgcggcccaacctgcgaaccgtcggggaggggcatgacggcgggcaacatcaagggcgcgctgctcgccctgctggccatggggctctattcgacccatgacgtgatcatcaaggttctgggcgccacctatccggcgctgcagatcctgttcttctcggcgctgctgtcctttccgccgctggcggtgctgctgctgcgcgacccgacgcatggcacgctgctgccgcgcaacccgttctgggtcgggctgcgctcgctttgcatcgtcatctcggggatcggcgggttctatgccttttcggtgctgccgctggcgcaggtctattccatcctcttcgccgcgccgctgatcgtcaccgtgctgtcggtgcctctcttgggcgaaaaggtcgggctgcatcgctggctggcggtctgcgccgggctttgcggcgtgctggtcgtgctgcgccccggcgtgacgcccttggggctggggcacctggcggcgctgatgggggcgacggccacggcgctttccgccatcgccgtgcgacgcctgggccggtccgagcggacggtgatcctgctgctttggccgatgatcgggaatttcctgctgaccggcgcctcgctgggcttcgcctatcgcccgatggagctgggcgacctcgcgctgaccggggtgatcgcggccttggggctggcggcgggcttcctgctgatcctggcctatcaggccggcgaggcggccaatgtggcgccgatgcaatattcgcagatgctctgggcggtgggttacggctggttcctgttcggcgaaagcccggacgggccgacggtgctgggggcgggtctgatcatggcctcggggctctacatcctgatgcgcgagcggctgggcgcctcgcgcctgcgcccggcgacgcgggcgcgcctgggcgccgaggcggtgacggccccgcgctggagcctgttgcagcgcctgctgcgcgcgcggggctgacgcggaaggcttcctgcattcggaaaccgcgctgatgcgcctgctacgcgcacggggctgacgcggcactcgcccggcaccggcaggcgagatctccgcgcttgctgtgcgcggggctgacgctgttttctgcggctgtcccgcaagattcccccttgcattccgccgccccaggggctacctgccccttcacggtcggagcgtagcgcagcctggtagcgcacctgcttcgggagcagggggtcggaggttcgaatcctctcgctccgaccatggaattcttgataaggggcaggtagttttgcctttttgatcatgagaattgcctctcccagccactgatttctcgtcaacgcactgatttcgtgtggctaaaggtgctcgggagcgagtccgccactaatagtgatggtcgcacacgaggggagcgactggattcgcctttccgtcaaacgccggacgctgctgctcaccgccttacatatcatagccaccgtgcaccatgttgcgcgatctgatcgacgcgttgggcggaaagcagactgacggctgacgccggaccgcagcagctggttctcggcctgcaacaattcgatcaggcggtcggcgctgatctcgtgcatctgcggctcgccaccgggcagttcatagcggccctggctgcgcaacgccggcagcacctcggccgtcacccatttgcggaaccgcttagctgccggcttccggctggtcaggatcagcgcgtagaggccgctttcgttgatgatggtggcgttcgggttgccgcgaataccctcactactgtttagggtattcagattgaccgtctggatctcgtcagcctcaaggcggctgatcgcaacagtcgggttcgaatgctccagcacccggcacacatctgcggcgacgaaccagggcgcgtcgtcgcgcatcaccacgcggacggcctgttcctcaaaatcgaaggggatgatcgcggcggtcatcacgcggcgccccgcttgcgctgtgccgcgcggatctgatcggcgtgatccagcaggcgccgctcgtagacctgacgaacgaaatctggccccgccgcctcgatcaggcgggcaaggatgtcctgcccgttctcgcctcgcgactgaccgaaggtggcctgacgcgccaccgtttcgatgacgccgttctctcggcaccatgcactgaaattggtgccgttcgcgcgcagcccgccgatgaccgcctcatggaggacggcgccgggctggaaaatcatatcctgccgtgtcatgtctgtctcacttgcctgtcgcggagcgggtgccgcatggttaaaagtgagattaggtttacaaacgtataccgtcaagaggaaggtttacgaatgtcgtctttttctgaccggctgcgggaggaacggttgcggctgaatatggtccaaccgcagctggccgaaattggcggtgtgggtaagcaatcgcagatcaactatgagagcgggaaacgtcagccagacgcctcctatctagccgccatcgcggcggcgggtgcggacgtactctacatcctgacaggcgagcgccgctctggacttccggcgcccacggccaatcagcttcccccgcgtctgcgcgaacggctggccaccgccatcgaggcgatcgaggaagggctggctgccacgaacagaaccgcgccgcccgccgtcaaggcccagttagcgctggccgcgtatgacattcttgccagccagggcgaatcggcctcggctgaaatcattcgtttggtaaaaaccgcttgaggtaacgatgtcggaagaccccaaggacaagatcgtccagcttttcaaggaaggaaccaagccgaagcgcaggcgcccacagtccagggctggaaatgcggtcagcgtcaacggtaacggaaacgtggtcgcgggcggcgacgttcactatcatctgccctcgccgcccgctgcccgtccaaaagtgcggcccggcatcgagcatattacggcagagcagcgggcaatcctgcggaaactcgtggaggaggtggccgagaccgaggcgcgactgaagagaagccccagagggttcagcagtgtctattcggcacttttcaaccagttcgacgaggtgaaaaagctggagcagatcccgcttgatggcttcgagcaggcgcgctcttatctctaccagcgtcgcggccagttgaacgggatgcggtcagcaccgatcaagaacgccgaccaatggcgtaagacgcgctacgcctacatcaaggtgaactccaaggcgcccgaggatgcggaggcgctggacaggtatatccgcaagaacttcaatgcgggtagcctgacagagcttgccaacgatgaactggaaagagcgtatcgctacatcgccgggcggcgcaacaagcggtgatgaggaacagatcgtgaaactattcgaaaagccgcaaccaccgcagtcgaagctgcaagaatttcgcgacgggatgatcggcctgctcatcgttgttggcctggtggtctggggatggaactggctgaccggtgacgccgagccagtgacagccgcgcaagtcgaactatcccctgaagaggctgcggcggctacagaagcggcagcacgaaaggccgtggccgaaaaggccgaagccgagcgtctggccgccgaggcagaggctgaagccaaggccgccgcagaagccacgaaagtcgaagctgcggcaaaggccaaagagaaggcgcatgaaaaacgctatggcttccactgcctcagtggatgggatggcagccatcgcggcctggtgacgcaggtcaaggaaaggctgcatgaccctcacagctttgagcatgacaagacgcagacatggcccgtgcagccagacggccgcaaccagatcctgatgacataccgcgccaagaacggctttggtgcgctcatgctcggcaaggcagttggcagctttgacaacgaaacatgcgacgtcaccgttgacctcgtagagtaagccgcccggcaaaattcatttgcatgttcatcgacgccgctggctcttcgcccgcggcgtacttccttgtatttcaacggtttttgcaaacatgcaaatggcagatcgaacttgcgggccgatttgcatgttcggagcctactgcagcacgggcccaacgcccgctccgcctcgcaatctcctgcaaatgctgatatctttggcctcgacggcctcacaccgccacgggccttcacaaccccgttgaagcccttttgaagccttagtccaggacatattcgcccgtccctcgacttcggcctccaagacccctcacagccttattttgctgggccttcgccgatcttcgcagatcttcgggcctcttcgcagatcagtccagatattcgtgtcaaacaacaacggcagtgcagcgtagcatctgcagcaggcctaggaaagcagccgttcctgctgacagcatcgccaaccgacggtctaccatcagagatggagatcatcggaaaatccccgaacacccatgccgtcatggggatcggttttcacatgcggcttgacgagccccggagtagagatgatggctggccgtccagtagcgaccatatatcgggtctggccaaacagcgaattttgctcgcgattggggtagaaatcaaaggggtagcagtggaccgtccgtgagcacgcataagaaaaggcagggccgcagccctgcccttatttggtgcagtcaagctgcttgttaacagccagcctgcggtttctgaaccttgaacttcccatcaggcgcgccgggagtcaatcgccatgtgggcggctcatacggaaacggcttccggaagagcggtgatggacatggcgcggacgcacatcggcgagcaaatccccatcggacggcgcggggctgtccgatggagaggctcagaaccgcggaccgaccgcaacgaggcgctaccgtattcgccacatctgaaaaggtgtgggcctaaatacgcgccctgctgtgaaggcaggacgctgccgccacattggcatttgccaagttccaattttgcaagtctgtccggttccggggttggacctggccgggcagaaaaccgtctgcggtagatgtatctcgccatgctcgacagcgcatgcaaaggtggcgcctgcgggatgggagaatgtcatgaccactacactcggcattgatcttggcacgtcgtcgttgggctggtgtctcatcgaagacgaacaccgcatcctcgatctcggcgtgatcatcttcagcgccgccgccggtgccgggcgcgacccgcaatcgggcgcacccctcgccgaagcgcggcgcgaggcccgttcggcgcggcggcggcgggacaggttcatcggtcgccgctcggctcttctggacaagctgatcgcgctcggcctgctgcccggagacccgcccgcgggccatgggcggcggcgcaaccaggcgctgccgaatgccgagacgaaggcgctggccgacaccgatccccatgtcctgcgccgccgggctttgtcggagccactttcgccgcacgagatcggccgggcgatcttccacctcaacacccggcgcggcttcaagtcgaaccgtaaggccgaccggggccgaaacgagcccgaaaccggcaagatcgccaccgccggccaggcgctggacgcggccttgggcaagcgcaccctcggccaatttctggccgaccggatcgacgccgggcaaccggcgcgggtgcggatgggtggcgagaaccaggcctatgatttctatccccagcgcagccatctcgaggcggagttcgcggcgatctgggaggcgcaggaacaccaccaccccgagttgctgaccgacacggcccggaccgcgatccatcgcatcctgttctttcagcgcccgctgaaaacgcccgaggtgggtttttgcaccttcgccggcatgagcggtgtgcctcacgacgagcgccggctgccaaaggcgcatccgctgttccaggaacggcggctctacgaggaggtgaacaacctcaaggtagtcgccgccggagccgctgcgcgcgacctgacgctggatgaacgggaccggctgatcctcaagttgcgcgacaacaagaaagtcaccttcgccactttggccaagaaggtgctgaaactggccgagggcgagcggttcaacaaggaaagcgaagcccgcaaggacctggcgggcgacgaggtccgggccgagatggcggacaagaagcgcttcggcaatcgctggacgcatttcccgctggagcggcagttgcagatcatcgaccgtgtgcagaacgaggaaaatcccgatatcctgctggcctggctgcaatccgactgcgggctggacaaggcggcggcggtcgcggtggccaggacgaacctgcccgaggggcacggccgcttcggcgagaccgcgacccggcggctgatcgcggctctaaaggccgaggtcgttacctatgacaaggccgcgctggcggcagggttccaccatagcgatcaccggacgggcgaggtttacgacctcctgccctattacggcgaggtcctgacccgtgagatcgcgcccggcaaggcggagtacggcgatccgctcgaacgccaatatggcaaggtcaccaatcccaccgtccatattggcctgcgccagttgcaaaagctggtgaatgcggtgatcgcccggcatggcaggcccgaccggatcgtcatcgaactcgcccgcgaactgaagctcaatgacaagcagaaggacgagcatcagcgacggatcaggcgggataccgaggcggcgatccgcaggggcgagaagcttgttgaggcgggtattgccgataccggcgccaaccgcgccctgatgcggcaatgggaggagctgaacccgtcgaaccccctcgaccgtcgctgcccctactgcggcgagccgattggcatggcgcagattttcaatagcctagcggatatcgaccatatcatcccctattccaggtcgctcgacgacagcccggcgaacaaagttttggtccatcgcaactgcaaccgccagaagggcaacaagacgccctgggatcggtggcacgaggacgaggcgaaatgggaaatcatctcggcccaggttgcgcggatgcacccttcgaaacaatggcgctttggccccgacgcgatggagcggctggaacgcgacggcggcttcgccgcccgccaactgactgatacccagtatctggcgcggatcgcggacaaatacctgcgcggcctttatccgactgctgatgagggccgggtcgatgtcatccccgggcgcatgaccgcgatgctgcgccgggtctggggcctgaacagcctgctgcccgaccataacttcgtcgagaacgaacattccagcgcaccgaagaaccggctggatcaccgccaccatgcgattgacgccacggtcgcggcggtgacatctctgtcccggatgcagcagatcgcagccgcagcggcccggtcggaggaaaaggaattggagcgcctgttcgacgatctgccgcatccttgggacggcttccgcgaggacctgggcgcgtgccttgcccgcacagtcgccacgcacaagcccgatcatggacgcagcgcgaaaccctcgcgccaccgcgatgtgacggcgggcaagctgcacaacgacaccgcctatggcctgaccggcctgaagaccaccgatggcaagacccctatcgtcgtgcaccgcgttctcctggcctcgctgaagcccacgcagatcgccgaccccgactgtattcccgacgaaaccctccgcaacgccctgtggctcgccacccgggactgttccggcaaggccttcgatcaggccctagcgcgcttcgccaaggagcatccggtgttcaagggcatccgccgggtgaggatacgcgagccgctgaacgtcatcccgatccacgacagggaaggaaaaccttacaaaagctatgccggggcgtccaacgaccgatacaatgtctggcggatgcccgacgcttcctggcggcatgatgttgtgtccaccttcaacgcgcaccggagcgattatcgcgaccttcgcccgcacccagcggcgaaaaaggttttatcgctacgccagaacgatatgatcgcggtggagcgtaatggtgggcttcgggagattatgcgggtcgttaagttcaaccaagccgggcggctgactctttgtccgccgaacgagggcggcaagcttcagaaccgggacgcggcaccgaacgacgccgatccgttcaaatacacttatctttctcccagctccctaaaaaacgccaaggcccgtcaggtccgcatcgatccactcggtcgcgtcttcgatcccggcccacgcgaatagcgggcgagggatggaccggatcgtcgatatagccaccgacggcctgcatctctcgctccaccgcggtttcctcatggtcgaaaaggaccgggccgaggtcggccgcgtggcgctcgacgatatccacgccctgatcgtccatgcccatggcgtcacttggaccggcaatatcgtcgcggccttggccgagcggggggcgcccatcgtcttttgcaacgcctcgcacgcccccgtcgccgtaaccctgccgctggacggccatcacgcccagaacgcccggatgcaggcacagatcggggcctcaaccccgctgatgaaacagctctggcgccgtatcgtctcggccaagatactgatgcagggagcgctgctcgcagcgcgcggagcccctggggccgaggcctttcctttcatggcccgtcgtgtgacttcgggcgacaaggagaacctcgaggcgcaggccgcgcggcgctattggccgctgctgatgggccccgatttccgccgcaaccgcgacgccggcgatgttaacgcgctgctgaactacggttatgccgtgatgcgggccagttgcgcccgcgccatcgtcgcggcgggcctgcatccgacgctgggcatccagcattccaaccgcggcaatgcctttgcgctggccgacgacctgatcgagccgttccggccgctggtggatgcattggccaagtcgatgatgcgcgagggcatcacccgcctcgatcccgcacaaaagcggcgtttcgcccgcctgatcgccttcgatctgggcattgccggcgagacctcgcccgtctccatcgccgctgttcggatggcgcaatcgcttggcaaggccttcgagaccggccgccccgatctcctgctgttcgacccgcccggcgcgctcgactgggccgcgctcggccgcggcgagggggacggcgcgtgaagaaggacccgtcatatctgagcggatacaggctgatgtggattttcgtgatgttcgacctgccggtgggcagcaagaaggagatgcgggacgccacgaagttccgagagtttctgctggatcagggtttcgagatgagccagttctcgatctacgcccggttctgcaacggcaaggacagctatgagtcgcatctgaagcggatcgagggtaacctgccggagaaaggcgagatccatgtgctcacgttcaccgacaagcagtatgagggaatcgtccgattctccagccagcgccgccgcaagccccgcgaaaacccggatcagttggcgctgttctagttatgtccaggatttggcatcgcctggatgtgccgactccttgtttttaatcaacaagttgccaacacatccaggttagcgcttcagaaaccgcaggccaaccgcaacaggcggtcgcctacatccggacgcgcgtcaaggttagcgcttcagaaaccgcaggccaaccgcaacttgggacgcccggcctttttgccgtcaaagaggttagcgcttcagaaaccgcaggccaaccgcaacggcctcgatgcgggcggcgttggatttcgcaggttagcgcttcagaaaccgcaggccaaccgcaactggccggtcgatccgaccacctcgcgctcgaggttagcgcttcagaaaccgcaggccaaccgcaacagataccgactgcgttccagcgatgaagcaaggttagcgcttcagaaaccgcaggccaaccgcaactgatacccgctttcagtttgcgaatgacgaatgtccgctttggcgaatactgttttgcagcacaacggtaccacgaccggctagtattgggccggaagcgacgtcgtaacccacagcaaactctttacagaatgcccgttttgtaaagagtggatagagtcaggaccagaaatcgcagggcaaaatcagatgacccgatagcgcaccgaccagcattttgttaagagtgacggcagcgcgccggtggatgcgcatcggcgccgccgagattacctgacccccgatgaggtcaagcgcctactggctgcggccaggtccggccggcacggcgcgcgcgatcatctcatgctgttgctgatgtaccggcacgggctgcgggtcagcgagctgatcgccctgcggcggacggatctcgatctggcctcgggccggctctgggtgcagcggctgaagcatgggctgtccaccagccagccgctggcgggggatgagattcgggcattgcggcgctatctggctggtcgtggtgatccgctgccctggctgtttctgtcggagcgtggcgggccactgacccggcaggcggtgaactatctcctgacctgcatcgcggcgcgagccgggctcggcgcggtgcacccacatatattgcgccattcctgcggtcacgccctggcccatgccgggcgcgacctgcggctgatccaggactatctcggccatcgcgatccgcgccataccgcacgctatacccgcacggcggcggtgcggtttcagaatatctggcgctgaccggccgggaacccgagcaggtcagcgcgctgtcgcgggccggcagggcggaacggtgatatcaagggctcgttggccttgcgtcaaggatacaccacgtcttctgcgcggcagttcctgaatgtcgcagagtatggtatcgttacctcatggaaagcgaccgcgtccaaggaaccgacagcgactctccgcccgccaaggcggatcttgcggaacgtgtgcgcaagatccaggagcaggctgcacggatgggttttcaatcggggtctacggacactgtcgaggcgaataaggccttcatggacgacatgtggggcgaggactgatagctcggtgccggtgcagcctgtcggcaggctgattgcggtcagccgggtggattggctgttacagcaaatgcaggggccgccactaccggatcatcggccatggacgctgttcgtttccccaaatgctgcacgtcgcccgcacaggacgacccgctgtcgcgccgcttgccgaggtcgagactcgcacaggcggcatcacataaccgacgcttcagtccgcctttaaaggaggcacctctttgccccttttggcgcgatgcccccgctccatcaatgccagaatatgggcaatgccgtcgagcctcagagcaagtttcttgtgcatgtcttgcatctcccggcgcatgtccagaagcaggcgagcggtctcattttccgtggtttcagccatcgtcagcaccgtttggctcgtgaggtggttcggctgagtcggtacggagcccccataggcccctattcctggaggattcgccgtgccgtcgaccaatgaaaccaaccggtggttggtcgaccgatcgctcggggcgcgtggacctgtaattcaggcctgttctcgctgacgccgatagaagtcggttcatcgatcagcaactgggcaaagactggcgtgccgtttccgctccggacccgaagatggatgcaggtttccgccttttctcggtccaagcgtcatgccgtaaaagagcagcacgcgccatggcccaagcaaccccggccgctatggctgccttgttgaccgaatatgtctcctcataggttttgacgatgagcgcttcatcggatcgccgattgccgttgcgcgggttgacgatccggcccgttttccggatccatctggcgacagtgtctcgaccgatgccatggcgacgactcagctccttgacggaaatgccgcgatcccagtctcgcgccacctcttcccagatgttgataccggcatctcgcagcgcctggtgggtttgcgcgtgccccatcgaataggtgttcgcgaggccgccgaacgattttaccaggccgaaggtgtcgatgatggcctcgcggggcggcggcgtcggcgggtagagcagtcgcgagagagacgatgaccgggagcatctctttgaagcaggctttggaaagtcctgccgaggcgaggcattagccgacagggttgcggctacagatgatcggggcgtccgccttcgcgcgcgaatagcctctgattcagcgtcgaaaattttcctttcgagacgatcgacgatactctgggcgttctgcacagccgccctggctgccacaagtgccgcagtctcctcgtcggtcaatccgaacatgcagttctcctcgacacgccgccaaagagctccagatatggcgggctgatcagagcgtaccataaaatagtgcatgctttacgaactcttctcagtttggctgccattattaccggtcaattgaagcaaaaatgagaagtggtcatcaatcttgttgcgccaatcgtggtttttcgaatctctgattcgcagagtaactctgcagaccaaggacttatatcagcccatgaaggtcgatcttgaaaaccatgagctcctcaagttccggctccggttggcgggatcatccatggcaaagatcgcccggtcgctcggcatctcgcaaagcagcgtgaccgtggtgagccaaggctaccgtcggtcgcaccgcgtgcagcgcgagatcgcggaccagcttgggaccacgccgcagcagttctttcccgatcgttacgaggcagaggagggtatgaaaaccggacacagctgacaacgggatatgaaaaggggcccctgctgacacaggcgccccttttggttgtcgtttggtcgcgacacctcattcatcccccgagtcgaacaaaaagtcaacctgccggtcgcggtgaccagcagggctgttcaacacatccaaaagggggagatcgccccgtcatcgccgatgacgcggtggcgggcgcactccaaacatcatgaaccagaacctgatctatcgcgggccagaaccgagccacgcgacccgcaccatatcgcgccgatcccgggccagtcttcgcggcgcgatggttgtcaagttgcctggctttagcagtccccgcattctccagttcgaaagcgcgctggaatatgccttcctgtgcctgaccctggtgcgtgacgatatccagcacatctgggaccagccgccagccgtgcattatgctggctgtgatggccggacggccaagcatatcttcgattttctcgtgacgaaaacggacggagaacgcatcgccgtggcggtgaagccgatgcagcgcgtcatcgcgcgcaactttctgtccgagctggagagggtggccgcagcgacaccgaagcaatttgccgaccgggtgatactgattaccgatcggcatcttgatcgtgccgccgctgcggcggcggcacgccagctagcccggacccgtccggcgttgacagaggtggcggcatgacgatccggttccgtttctccaaatccgatctgatcaccacggcgggcgttgcgatgcgcccgctgaagatcgacgacaagggtgggctgttcgagcgtctaggccaacccgggatcaccgaacggcattcgcatgaagagctggccgccctcctgcgccggccggacacgacctatgtcgcaggctatttcgatcgcacggcgcaagaaatccgcggccgtaaatccgttgatgtcgttaacgaactgcgcgaggccgtgcgtcggttggtgatctggcgcaaggccttctgcgacgcgttcctgtacctggaatcgctcggcttcatcaaccgcacccataaaggatatgtgaaagggcgcgagaggctggcagccgaaatccagcggcgcgtcggggaggggccggccagcggcagggccgttcgaccaggcgccgacatcatcacccgccagcttccgggcagccgcaccgctttcgaatgggtgcggagctatgagcgggccggatattcagcggtggcgctgatcccggaaacccatcgctgtggcaatcgcagacctcgttggtgtcatcgtgctgaggccttgatgaaccaggtcatcgaaatctatgccgacgcgcaacgccccagcagaacacaggccgttgccgaaacgctggagcttttttgccgcgaaaaccgacggcgggctgaggctggcttgtccgaactggttgtgccgtcgcgccaaaccatcaatcgccgtcttgcccaggccgatccatactatgtgcatgccaagcgattcggcaccgcggcggcaaatgcccacttcacgctctacgagaacggccctgacgtctggcagccactggaacgcgtcgaaatggacgagaaccgtctcgatgtcgtttcgcttctgattttgaccggcatctgggatcatcttccgcccgacagacaggagcggttcgaggctgggcgccggtggctatacgtcgccatcgattgcgcgacccggtgtattctctccatgcgtctggccgagacgccaaactcgggtgatgcgatcaaggcgctgcgggatattttcgtcgacaagacgccgatcgcgcaggcagcaggatgcgaaagcacctggcaccatcatggtggtatcgggacattggtgacggaccagggcggcgccttcgtttccgacgaatttcagggcactgtgtcttcgctcggcatcaccgcgcatcttccgcctgctggcctgccttggctgcgcggtcatatcgaaaccttcttccgaacctatgggcaccagctcatgcccctgctggtcggccggaccttcttcgataccgtcgagcgcggcgattatccgtcggagcagctggcctgtctctgcgacgatgatctgatcacggtcctgctgacctatgtcgtcgacatctatcacaatcagccccacggatcgctgggtggagagacgcccaatcaggcgtggtcgcgcctggtcgccgaacacggcacgcccccggttcccgatggtctggccttgcgcaaggctttcggcaggccattgcagcgcgctttacgcggcgacggcgtcctgtttgcgggcctgacctacagctgcggggcattgcgcgaagcatttctgcacgcgccggaacgaaatgtcgaaatccgcgccgatctgcgggatatgggttggatcgccgtcaaggtgggcgcgacctggcatcctgccatggccaatcagagcggcttcgacggtgtcagctatgacgaacttcaggaagccacccggacgctccgcatcaaacaccggcgagacgctgaactggatgcgcccacggtccgccgggcgatccaacggatttcagaaatcaatcgccgtgctttcgccctgcgtgagctgacaccattccatgtcaccgatctggacgtggagcgcaatcgatccgcgctgcatttccccttacgctccgatgccgagcgcctcgggcatgcccgaccgtcttccgaccctctctctgacggcatccagatcgtgccgtgtgcaggtggaccatccgagaaccccactgaccaccatgaccaatcaccgcccgcgcgtgaacgccggaaccgctggagattcgacgatgagcaatgacattatccacaaaaccgccgagaaagtggccgcgctgcgggaccatttcatccaccacgagcgattcgagctgctggaggcacgcttcgccatgctggttgccaagcgcctgtccgatctggacgcaggccggtcaagcgaagcccacgggctcgccttgtcgggcccgtcggggaccgggaaaagcgcggcgatgcaccacctgcttgccggtgttggccagcagctgtcaacgacccgccattgggatgcgccgatcatcagccttcgcgtgccatcgccggcgacgttgaaattcgtcggctacaccttgctgcgcgctttgggctatcagatcagctcagaacggcaggcctggtacatctgggatttggtccggcatcacctgaaagagcgacaggtgctgttcgttcatctggacgaggcgcaggatcttgcctcgcgcggcacgaagcacgagttgaatgccgtggcctcgatgctgaaaaccctgatgaccgatcccgactggccagtcgggatcatcctgtctgggacgccggagttggaggacatcctgaaccacgatccacaactggcgcggcggatgcagacggtgcatttcaacagcctgtctcccgtcgcgcatggcaatgacgtgctggatctcgtggagaactacagcaagcgcgcgggactgccgccagcccccggcattgtcgaactggcacatggcgaacggctgatccacgcggcagccaatcagttcggtctggtcatcgaattgacgctggcggccatcgaacaggcgtttctcaacggggcccgccaactggcatcgcgggattttgcctgcgcctatcacctgcggaccgcctgcgacgactcgttcaatcccttcattatacccgatttttaccgggtcgatgcgcggcaggtcttctcacgggagaaacgctgatgttcacggcgacaaaaccactaccactgacggtccccacgattgtgggggaatccgcgacatccttcgcctcccgcctggctcgacggaacggggtgccccggatgatcgccttctgctcggatgtggggatcgactacttcgcgcttgtgaacggcgatccggtcgaaatccagaggttggcagttctgggcgatatcgaccctgtccctctgcaagcggcaacaccttctctgattgagccgggttggtttcggcttgggaacgaacgcattaaattcaccgcattcgcgcggaccacgctcaggatctgtccgatgtgcgctcagaatccagatgacaggacggggatcgtccatcatgggatatggcaactcgcagcaatccgaagttgtgaacggcatggctgtcatctcgtcgcagtcccacggcctgcgaatgcaaacgactgcttcgaccatatccccatggttgaccattttcagcccgcaggcatcgtgatggtgaaacccaaccatctggaactcgaaaactacctgatcaatcgaatccaaaacggccccggagggacatggttggatcagtcccccctccatgtcgccgcgcaggcctgcgagatgctgggattgttgttgactatcggtccgaaagcaaagcgctccgagaccagggatccgcagtgggcagtggccgggagcgcgggtctccaggtgttgcaggaaggccccaacagtctgcggaaaaagctcagagcaatacgtgatgcccatcccattgaggaaaagttacaccggtatcactacggcgtgttctttgaatggctacgttatcgcgatgatgacaaagatttcgatattttccgaaatatcgtccgggatttcatattcaagaacttcccgatagcgaccggagcaattgtatttggaaagccctgtcccgaacagcagctccattctttccagacagctgagaaggctttcgggatcccgcacattcgacttggccggaagctggctgagatgggaatcgcaaggcccgagtccggcggtaggttctacaaactgaataagtacatccccacagcggttcttaatggtgtctgctcagagttggctgctctggttggcaccaaggaagccgctaaaagcattggaataaattatacattgtttgaaaggctggccgatcagggtctaatcaaacgctactacgagagcgatcagggaagctcatactacagtaagagagatgttgaggattttatcgatagtcttagacagctcctgcgccaccctggttccgaaattgaaacggtagacatttcaaccgccgcccgtcttcgagggataatgacagcgcatgtaactgatcatatcctgacgcaccgaattaccctttatgccgctagcactcatcccgtgagctttcgggagtttcgattgcaactgaatgatttgggtcgactgaaggggcgccgccgcgaaaagattgtctcttcggccgaggtggcaagagcactgaaggttagtcggccgactgtttatcgcctacgtgaagaaggtcaccttcaggttgcaaccgaacgcaaaggtgaatgggt

SEQ ID NO: 3478 - DNA, 23279 bp, synthetic construct
  source 1..23279: mol_type = other DNA
  misc_feature 1..23279: note = Synthetic
gtatagcgcagcgggcgcagcgcgttacggtccatgcccgccacggcccagcggccgtcggtcatcgccaaggcggccgggccgtcccaaggctccatcacgctggcgagatactggtacatggaggcatgcgccgggggcacatcctcctcgccgacctgccacgcctccggcaccagcatcagcttggcggtcggcgcatcgcggccggagcggcagatcgcctcgaacgtcgcatcgagcgcggcggtatcgctcgcgcccgcggggatcaccggcttgatatcctcggaatgctcgccgaacgcgatcgatgccatgcggatctcgtggctgagcatccagttcttgttgccgcggatcgtgttgatctcgccgttatgcgccaaacagcggaacggctgcgccagccaccattgcgggaacgtgttggtggaataacgctggtggaagatcgcgacgcggctctcgaagcgcttgtcgacaaggtccgggtagaaaaccgacaggctttcggcaaggaacaggcccttgtagatgatcgatcggcaggagagcgagcagatgtagaagccctggatctgcgccgcgatcacgcgcttctcgatccgccggcggatgagatagaggttcttctcgaactcggcggcatccacgtcgtcgggcatcgggccggcgatcatgatctgctcgatctcgggccgcgtctcctgcgccttgcgcccgatcaccgacacatcgaccggcacctgccgccagccatagatcgtgtagcccgcttcgatgatcgcgctttccacgatcgtgcggcacgtttcctgcgccccgagatcggtgcgcggaaggaagatcatccccaccgccagccggttcggctgcaccttgtgcccgcccgccgcgatcgcatcgtcgaaaaagcggatcggcagatcgacatgcaaccccgcgccgtctccggtcttgccgtcggcatccaccgcgccgcgatgccacaccgccttgagcgcatcgatcgccgactgcacgacgcggcgcgacggccgcccgtcagtggcggcgacgagccccacgccgcacgcgtcggattcgaactccgggcgatacatcccatgggtggcgagataggtgcgctggtcggtcatgagttcttgttccggtcttcgggcaacatttcctggcggatgcgttcgaaggcgtgcttgccggcatcggccccggccacgccgcccaattcccggccggcggcgcccatcctggcctggatttccggcatcagcctgagcgctttcgcgcccgcgccgctagcatagaacgccgcgatcgcgttgagctcgtcggtggtgaacgccgccgcatattcggtggccgcccgcgccatataggcggggtactgtcgtttgatcgcgaccatgaactcctgcgacaggatcgcgatcatccggtcgtgattctcgggcgcgcgggaattgagcgtgtcgatgatgcccttgctggccggattgctggccatttcgccgatcacggccttcgcgaaaatcggcgcgagctggatgaacgttcgatccagcgtcgcctcgacgcccatctgcttcaacagccgctccgcagcggcctgacgcgcgggatccggcgcggcgaccggcgtcgcggcgggctgcgccgccgcaatcgcgggcacgccagccactgcgagcgcgagcagtgcgcgcaacatcatgccgccaccttttcgcgcgcggccttcgccttcagccacttgtgcatattggccgagacatcgcggccatcgcggatcgcccagaccacaaggcttgcgccccgcacgatgtccccggccgcgaatacgccgtcgaggctggtcatcagcgtctttccgtccaccagcacggtgccccagcgcgtcacgcccagctcgggcgcgccccacagccgcggcagttcctccgcgtcgaagcccagcgccttgatgacgagatcggccggaaacgacatctcaccgcccggatcgatctccggcgcgcgccgcccgctggcatccgccgcgcccagccgcatccggctggcgcgcacgctcgtcacccgctcgccatcgaacgccagcggcgcggagagccatacgaattccacgccctcctcttcggcgttggccacctcgcgctggctgccgggcatattggcgcgatcgcggcgatacaggcatttgacgctcttcgcgccctgccggatcgcggttcgcacgcaatccatcgcggtatcgccgccgccgaccaccaccacatgcttgcccgccgcatcgaggctgccgtcgtcgaacgcgggcacgacatctccgaagctcttgcggttcgacgcggtgagatagtcgagcgcctccagcacgccgcccgcgccgctgcccggcacatcgatcgcgcgcgcgcggtacacgccggtcgcgatcaggatggcgtcatgccgcttgcgcagatcgtcgagcgtcgcatcgcggcccacctcgaacccctgatgaaagacgatgccgcccgcgcgcagccgttcgacgcggcgcatcacgaccggtttctccagcttgaagccgggaatgccgtaagtcagcagaccgccggcgcgatcatagcgatcgtagacatgcacctcatagccatagccgcgcagatattccgccgccgccagacccgcaggccccgcgccgatcacgcccaccgactggccgcgcgccggcccgggcttcagcggctcgacccagccctcctcccaggcggtgtcggtgatgaatttctcgaccgatccgatcgtcaccgcgccatggccggagaattcgatcacgcaattgccctcgcacagccgatcctgcggacagatgcggccgcagatttccggcatggtcgaggtgctgttgctcagttcataggcttccttgagccggccttcagcggtcaggcgcagccaatctggaatgtgattgtgaagtgggcagtgcaccgaacaataaggcacgccgcattgcgagcagcgcgacgcctgatcttccgccgtgggcacggcatagcgatccgcgatctcgcgaaagtccgccgcgcgcgcctccgcgtcgcgcttgccaggataggattgcgccgtcccgacgaatcgaagcatcttttccgctgccataaatcctccgccacatgcgttctcacacgcacgccaggacaacaaggcagcattactgacttaaacggtaaattgtcgcacccgcggctccacgcctcgtagaaattgcggcgttttagtcccgtatcggtactatcgtagcgaaagcgcggccaatgccacgacaccggcaattatccgataccaggcgaacggctgaaaaccatgtttcgtcaccaccgacatgaaccaccgcaccacgacgatcgcgaccagaaacgacacgacaaagccgatcgcgatcgatccgagatgatcggcgctcagttcatgccgcgccttccacagcgtcagcgtcgtcgcgccgagcatcgtcgggatcgccaggaagaagctgtattccgccgctatctcccggctcactcccatcgcgcgcgcgcccatgatcgtcgcgcccgagcggctgacccccgggatcatcgccaagcattgcaacaccccgatggccagcgccgtgcgccatgacatcgcttctaccgacccggtccgcacgggcggcgcgacacgctcgatgaagaggatcgcgataccgcccacgatcagcgcaatcgccaccacgagcggcgcgatcaccggcgcctccagcaccgccttgatcgccttgtaggcgatcgcacccaccacggcggccggcagaaagcctagcgccacgttgcgggtgaaggcgatggcggccggatcacgccgcgccagcccatgcgcgacgttgacgaaacggcgccagaacagcaccaccacggcgagaatcgcgccaagctggataacgatgtcgaacaccgcgtccgcctccggcagccccagcagcgagccggcgaggataaggtgccccgtcgaggatacgggcagaaattcggtcacaccctcgacgatccccagcaggatcacgatcagcaggtcgttcatgagcaatccttgggtccgcccgtgaacgggcgcgggtggatcaggctttggcgatcgcggcgaatcgcccggcgcggcgataacgcaccagccacgcgggagcgaccgccgccagcggggtgggcgtcacgcccagcgcggccagcccctcggcatccggcgcaaccaccgtatcgtgctgcaacagcttccactgatccatcgtgatcggcgcgccgggcaggaagccgagcgacgcgagcgcctggccggcaatatcgggcagcgccggcagcgcgcgatcgcgcccgatttcccgcgcgatccagcggtgcagttcggccatggtgagcacatcggggccgccgagttcatatgtccgcccgccgaacgtggccggggcgcctaacgcggccaccaccgccgtcgccacatcgccgacgaataccggctggaagcgcacgccagcgcgcagcaccggaacgatcggcagcgcggcgatcaatccggcgaaccggttgatgaactgatcctcgcggccgaacactgtcgccgggcgcaagatcgtcgccgccgggaacgccgcgcgcaccgccgcttccgcctcgcccttggtgctcgcgtagcgcgacgacgccccggcatccgcgccgatcgccgagatatgcaccagcgagaccgcgccggccttcgccgccgcctccgccaccgcccgcgcaccatcgacatgaatccgcctgagatcgcccgtgaagctgccgacgagattcacgacatgatccgcgccggcgatcgcgcgcattatcgtatcggacctggtcacgtcggccgcgacaaactgcgtctgccccaatccgccgaggggcttgagaaaccaggcgtcgcggggatcgcgcccggccacgcgaacgcgtgcgcccgccgccagcagcgcctgcgcgacgtagcggccaatgaagcctccgccgccaacgagcgtgaccaatctgtccttcatgcgcgagccgtccaatgcgattgttcgatcatccgcgcctacctccctcgcgcacccgttgacaaggccacgcggtctcccctagaggcgccggcctaccccgtgcccagatggcggaattggtagacgcaccagcttcaggtgctggcgctcgcaagggcgtggaggttcgagtcctcttctgggcaccacttccggtcaaagatgggcaccgcgccctcgaggcgcgggacgccgctggtgacgccgttcgccaacgccgctcgcggaccatagatgagaatcttgtccgtcgcgacggtgacgtcggataccagcattcgcaggtaagcggtccgcaaggtcggatcgtcgtcaacggccctaccgaggcgttcaatcactttgcgcaggacgcgaacttcaaccgcggcggctatcgcctgctcgaggacgagtgggcgagggacaagcgtgctggaagagctgtgacggtgaagatcgttccacaagtcagcagcgcttccgtgcggccatcgacgattaatgtttggtggaccgtcgatggcaagacaaagagcctaagatttcccaacgaacgaccggagaagcgccgtggcggaaactgaatcggagcgtctgctgaacgagattggtcgattactgatggaggatagcgactatccctcggaacccacgctactctatgcgcaacttgatcataacatgattggcgaatcgatcttcaaggaactcggcaatcagctgctctatcggtggcccgcaaacgagcgcttgccctacgcgcttctcgaattgtgggaagcacaggacgggcgggatcggtggtcggaactggaatatgtgatgcgcgacggtctattcgaagtggcgtatttctatccggacgaaatcgatccccgggaagatgtgatcgaacgccgggaacgtgcgctgcggcggcatttcggaaagaagcagatcgtctacccgcccctgcccttggaggacgaagctcaaaactacgaagtataggtcatgtcctgtcgggcgttcggcgcggaattgatattctccaatgatttgagtgcccagctttgtcccctgtggggcaccacactcatgtaggcgagcctcatagcggacagagctgggcacgcgggccttgtgaggacgccccagctccgcttgacttgttgtaaaatgttgctcaaatgttctagccgcaatggtagcggggcggcatgaacgaggcatcacgcgataggaaatcgagcgctttttcatggtggctgcgaacaggaaagctaccaccagcggtcaatcctgacgatatcgaactcaaattcaacccatggcacgatccggccgacggtcggttcacctttgctggtgcgggacgccattatggtgccggcgggactgatacggccagcggggcgagcagtcgcacgtccgcccgcgccggcgccacgcctgcttcagtgggccgcagcaagtcgcagaccgcgacacggtcgaaaccggaaacatcgcgtgccaggccaccggcgagtgacgcccacaggccagtgaggcccatgtcatcccctgtgcaacccagaggtattgaaggaggacggccgggtaaccagccgaaccccgttaccgaattcgtcggtggcgtaggtgaaggccttcacgaagtcggaagagaagcggtggcgggagtccgcgctgcgctgacgacgaatccggtgaccaccgttcgcaacaccggtcgcggtatagcggctatgatcgatgctgcgattgctgccgaggatacccccgcccgtatacaggtttcgcgtgcggcaagcgcagtcgccgacgcctcggcgcgggatctcggtcgtgccaccgcgacggtcgccgggaacgttgcgctgacggcagcgccaggggcggcgctctcgaaagcagccgcattgcgccgacttcgcatggcgaggccgcgaacgaccttcgatccgccgcagatcggctgggtgaaggagacgaccaggtcgcaaaagccttggaaggcttacaacgatgctgcgacgggcgcccaacccggtcgggcgccgacgttgatgcggacgatggcggacggatcgaagcggccggtcaagttcgatggaatccaaggcgattatgtgatcgaccggaagtggtcggtcgttgatagggctagggcgcgagctcagatcttgcggcagtcgcaggtgttggcagaacaccgcctgattggaacgtgggaggtccccacgcctgtcgagaagctcaaggcactgaagctgctcaagaagatgaacataacgaatatccacgtaaaggtcgtcaagccatgattgccatgcagattgcgagcattattgcggaatatgtcgtgtttctcgaactcaccgatgaggaggaattgaacctcgacaccgccgtgaagatgatggaggctctcggcagccatctcgaggagctggacaaggaatttcttcgcgaactggtggatgcgtttcctgttatagcggaggaatacagcggcgaggcgcaggaggtcgtgcgcaatatcgcatacagcttctaccttgaggaggcgctcgcagccgacgatcctgtcaggttagccgaattggaggcactgcgcgacgcgagggactgaacgccggctggaattttaaaaaccgcgtgatcatggcttcgtctatctctttcatcggcgactgatcgaaattctccaatgatctgagcgcccagctttgtcccccgtagggcaccatttctcctgcgctaagcggttgagattgatcgaaacgtgggcgatatattcgccgatcatccggtgggccatcggttcaacaatgcgagtgacctcttctttggctacttcctcagccttttccctcgtcagcccgcgtaaagcccaaaagccgtataaggccgcaatagcgaacattgtttggaaaacggttagaaaaaccgcaatgtggtcgtagttaggtgcgccacgctctctccacaatatgagcaggcccgctgaccttagacgcggaagctccctcctcgccaacacgcacgacggcctaacaacgctacaccgataactccgcccgctcgtggtctgcaagcacgcgcgaagcctacctacctgctcgccagtgtagaggctgtctccacctacaagctgttccccattcatcggcggcgactcgaagcactgatttacaaggtgttcgcacccgcgcaaatcgatctcatcatcaccgatcgcttcggcatcccgtcaagccgggcgagtggttcctcgcgccttcggcgtgaccccgcgtgccgagcacgatcgctgttctccatgtagcacgacaaggtgacctcttcgaagtgatgctgtcggccgctgccaacctgatgatggggggcagcctcgacgagaacggcgagctgacatgccgcgcgtgccggaaacctgcccgtctttgcgcgctcgaacgccccggttttccgccgatccggcaccgcgcttccgatcgtttcagaaccagttggttgggaaggggaccttaaccgccgaggcggtaatctgaggagcgatagcaggagccccggccagcatgtggaatgacgacaatgccatctacgacgatggcgaatggatcacttggaccgagatcaactcccacctcgaacggttagagttcgaagcccgcttcccggacctcgaagccgatctggtgccgatcttccagagcctgctttccacggcgcaggattactacgaactgaccgggcggcaccttcaggtctatggcgatatcggcgagctatacggcgtcatcacgcacgggctgaagctgcaccgcaattacgcccaagggtcggacgggaagatcggcaaccacttcgtcgaggtgaagaccatcacgccgttcaagagcaacgatgtcgtcgccctcaacctcaagcgcaacttcagcaaggtgctggtcgtgaagatcggcgccgacttcgaggtcagggggaagctcatcgaccggaaggcgttgcccaaggccaagggcgaccggcttaagatatcgtgggatcagttcgagcaggccgacaccgcctgaacgtcaccgcgctcggtcgatcggcaactacaattggttgcccttccagatgggaatgcggttggcattcaagatcggtgtgcgtgccatgttgcctccgtgggtgaggacacgggggtggtgccagatcaaaattatcacactcactgaactactcgacccgttccgaaacctaagcgagtcctccgggaatgaccagcgcatcgcccgctacccccgcgactcgcaagacagccagaccaccgcgaaccagcgtcgagaactcatggtcgtcgccgagcggcttggtcaccgaccccggtatcagcagcttgaacggacgtgacaggcgccccggctacgatgcgctgatgaaggctgtggcgcggcgcgagctcgacatggtggcaagcagggccgtggaccggcgcgggcgctacctccagaacctcgtcaccccctcaccgcgatcaacgccaagggggggggacctctatctcaccagcaggcgctcgacaccagcacgcccagcggacgcgccatgttcggcatgctgtcggtgttcgccggcttcgagcgatccacagatccacaaatgaagacaggggccgcagcccccgtctcgatttggtgcaattcagattgcttgttaacaaccagacctgcgatttctgagccacaaatctttcagaaatcacaggcggtgtcaaccagctcagaaatcgaccggtctggtcgcaacataatgcgattgcggcagcttgcttcctcatagcaacggctttcctgttttacgatgtaaaaataatcgctttataggaattgattttagccctggcccccggcaacctgatgatgcgaaatggattggttcggtttcgctggaggcccgatctggagcctggacgggcgtatgcttgcccaggctccagatcggcagggagggaatacaatggcgacgcggcttggcctggacatcggcaccaacagcatcggctggtgcctcttccttcttgatgaacatggcaatccaaagggcatccaagacatcggtgtccgcattttctcggacgggcgcgatcccaagtcaggggcatcgctcgcggttgaccggcgcaatgcgcgggcgatgaggcggcggcgtgatcgctacgttcggcgccggtcggcgttgctgcaagccctcgtcgataccggcctgatgcccaccgatgctcaggatgccaaggcgctggtcgggtgcgacccttatgctctgcgcgcggcagcactggatgaagcattgaatccccaccagttgggccgagcactgttccatctcaaccaaaggcgaggtttcaaatcgaaccgtaaggcggagcgcaaagcgggggatgataaggagggcggcaagattgcgagcggtgcgaaggcgctcgatcaggcgatgcatgatgcaggcgcgcgcacttatggagagtttctggctggcagggatgcgaaacgtgttcggattcgcacggatggagacggctacgacttttaccccgaacgccgccatctggaagctgagttcgatgcaatctgggcagcacaggccacacatcatcccgcgctgctgaccgatgctgtgcgcgaccggttacggcgcatcatctttttccagcgcccactgaaggcgccgaaggtgggcaactgcacctttttccacgaggaagagcgcctgcccaaggcccatccgctatttcaggaaaggcggctgtatgaagaggtcaatcaactcgaaattaccaaagccggcgcaccatcgcgcaagctgtcgcttgatcagcgtgacaagatcattctcaaactcaaatcggcaaagacgacaagcttttcaggcctggccaaactgctgaagctcgccgatgatgagagtttcaacaaggctagcgaaaaccgcactggccttgtcggcgatgaaatctttgcctcgttcagtgataaaaaatgctttggcgatcgctgggcgcatctcgagccgggtgtgcaatggtcgatcgtcaaagccgtagcagaagaggaagaccctgttcgcctgcacgattggttgatgtccacgcatggtgtcaccgttgaacaggccgaagccatcggccgcgtacgcttgcccgaagggcatgggcggctgggcgaaactgccagtcggaagattctcgctgagctcaaaaaggaagtcgtcacattcgaccaggcggcgaagcttgggatcgaccgcaagcacagcaatttcgacacaggcgaagtcttgctccatctgccctattatggcgaaattctctcgcgcgagattccgcccgggacgctaaattcggatgacatcgacgaaattcgctggggcaagatcactaatcctaccgtgcatatcggactaggccagcttcgccgcttgctcaatgctatcatcaatgtgcatggccgccccgatcaaatcgtcgtcgaactggcgcgcgaactgaagcttagtgaaaaagacaaggccgaacacaataagcgcattggtgcgaacacgcgtgcggcggaagcccggtcgaggaaactgctggaaagcaatcagcgcgatagtggttccaaccgggcgctcctgaagctgtgggaagatctcaatccgaacaatccgctcgaccggtgctgcccattttgcggacgtcacatcgggcaactggcgctgttctcggaggaaaccgagattgaacacatcataccctattcccgctcctttgatgacagcgtcgcaaacaaagtcatcgcccatcgcagttgcaaccgcgaaaagggcaacaagaccccgtgggaagcatgggggcataccgatcagtgggcgatcatcgccgagcaagtggcccggctccacaaatcgaagcagtggcgctttgctcctgacgcaatgaagcgcttcgatcaagagggcgactttattgcgcgtcaactgaccgacacgcaatatctgtcgcggatggcacggacctacctttcgagcctttatcccaacaatgccggtgtttatgtaatacccggtcggatgaccgcgatgctgagacggctgtggggattgaacgagttgctgcccgaccacaattacgtcgagaatcctcatagtggtgcgcccaaaaatcgcctcgatcatcgccatcatgcgattgatgcggccgtggttggggttacgacacgcggcctgttgaacgaaatttcgaaggcggccggccgcgcagaagatcagaatctcgacaagctttttgtcgacctgccaaaaccgtgggcatcatttcgcgaagacctgcgtgactcgcttgcgcgcgtagttgtcagccacaaggccgatcatggccgcaagggcgttcccgcgaagagcagggatgccactgccgcgcgcctgcacaacgacactgcatatgggctgacaggcctgaccagcgacagcggcttgccgattgtcgtacaccgcgtgcccctgctcagcctcaagccggcagacctcaccgatcccattcgcatcccggacgcggccttgcagcgggcactgtgggaagcgacggaaggcaagtcgggcaaagagtttgaggcggcgcttgtcaggttttcaaagtcagatcctgtattcaagggtatccggcatgtgagagtgcgggaggcgttgaagatcatcccgatccgtgacgcttccggcaatgcttttaaggcttataagggcgatgccaatgcccgatatgatgtgtggcgcatgcctgacgggaagtgggtatcaagctggaaggacagggacggcaaatcgcattctggaattgtatcaatgtttgacgcgcaccagagcatccagcccgaacagcgcccccacccggcggcgaagagagttttaagtctgcgccaaaacgacttgattgcggttgaaccgcaaggtcagccgcgcaagattatgcgggtggtgaaattttccggtggagggcagattacatttgcagaacatcaggaagcaggaccattgaaagcgcgagacgcaacttctccggctactgatcctttcaaatatttctattcttctgctggcggcttgcaaaaagccaaagcccggcagattcgtatcgacgaacttggtcgtatctttgatccaggaccgcggtaaccgttcattatccatgatatgtcagtcttaattttcgaaggactggccatggatcgtattgtcgatattgctaccgatgatttgcacctgtccgcgtatcgcggatttctggttgtcagccttggtcgtcgggaacagggccgcgtagcgctcgacgatattcaagccatcatcgttcatgcccatggcgtaacctggacgacaagtttggtggtggccctcgccgaacgcggcgcgattatggtgatgtgcgcggccaatcattctccggtggccatcatttctcccgttgacggtcaccatgcacaggcagcccggatgcgagcgcaatgggaagcgccacgccccatgttcaagcagctctggcaaaagatcatcgtgggaaagatcacgatgcaagcgtcgctgttaacggctcaaggcaaagctgaagccaatgcgctaatgcttatggcacggcgcgtccgctctggcgatacgaacaatcttgaagctcaggctgcgcgcaaatactggcctgcgctgatgggtaaagaatttcgccgcgatcaaaacgctgacggtgccaacgccctgctgaattatggctacaccgtcatgcgatcatgcgttgcacggtcgatcatcgggtccgggctgcaccctgcaattggcctgcatcaccacaatcggcttaacggcttcgcgctggctgacgatcttgtggaaccgtttcgccccctggttgacgggctggtccggcggatgatcgacgaaggtatcgaagccgtcactcccgaagcaaaacagcggctagcccggctgatcgggcatgatttgcggctgggcggggctatttcgcctgtgtctgtggcgacccaacgcctcgctcaatcgcttgcgaggagtttcgaagaacgcaaatcggcactcgccctgttcgatccgcctgacgcccttgactgggcgtcgcttgggcagccggtcgggattgaagcatgaacctgagtggataccggctaatgtggatattcgtcatgttcgacctgcccgtggacacaaaggaacatgcgcgggaagcgaccaaatttcgtgagtttttgctcgacgaaggctttgagatgagccagttttcgatctatgcccgattttgcaatggcaaagaacattatgagacttaccttcggcgaatcgaggcgcatcttcccgaacgcggggagattcatgtgctcaattttaccgacaaacagtatgaaaacatcatccggttttcgagtcagagccgccaacggcaacgaaaaaatccggatcagctcgccatgttctgacgattcatcgcgtttttgcgatgacagatggggcttcttccagtctcaattcaactggttaggcacccatcggtcatagcatttcagaaatcgcggtccagctgcaacgttgcagccgtgctgatcgtgcaggctgcggtcatagcatttcagaaatcgcggtccagctgcaactagacccacgtgtcgccgaagacccacgtggtcatagcatttcagaaatcgcggtccagctgcaacctcgcgcgctgcaccctgcatttcccggcgtcatagcatttcagaaatcgcggtccagctgcaaccgtgatcgcgcgcggcgcggacacgacaacggtcatagcatttcagaaatcgcggtccagctgcaaccgaagcagggctgggcgcgtcggaaggggagtcatagcatttcagaaatcgcggtccagctgcaacgctacccccgtcaggccgattgctttcgagtcatagcatttcagaaatcgcggtccagctgcaactgtgtcccatgcttatgctataacaggcgcgtcatagcatttcagaaatcgcggtccagctgcaacgcgattgctggctgtgctgatgctggggggggtcatagcatttcagaaatcgcggtccagctgcaacaccgtagcgaactgcccgcccagctcgcccgtcatagcatttcagaaatcgcggtccagctgcaacgatgccagccatgtcgcgatcgacgtggacgtcatagcatttcagaaatcgcggtccagctgcaacgccagagcacctcaaacgatttgtaggttcgtcatagcatttcagaaatcgcggtccagctgcaacccgcgacagaataacccctcgccggaaattgtcatagcatttcagaaatcgcggtccagctgcaactacacgcggcttgcagagtttctcgccacgtcatagcatttcagaaatcgcggtccagctgcaactgctaacacagggcgcgctttccggcgcccgtcatagcatttcagaaatcgcggtccagctgcaacgctaccttgactttgtggccgaccagctcgtcatagcatttcagaaatcgcggtccagctgcaacccaggcgcgacctcggtcgtgatgcgcacggtcatagcatttcagaaatcgcggtccagctgcaaccatctttatccgctcaatctttcttccggtgtcatagcatttcagaaatcgcggtccagctgcaactgaacagcaatgttgcgctccacggcgtgggtcatagcatttcagaaagcgcggtccagctgcaactgcccggtcagcggtgtcgtctcgctgttcgccaccgtggcgcgaagcgcatccaggcggtcgctccaccacatttccattcgcgtcttccgttaactcgcccggtgcaggtcgcgctgatcgcgttctgatcctggtgccgagcgcacactagatgacgtcgggcgcctaccgctcgctcccgtcccgtggcgagctggccgtcgagctggatagccgttgggaaccgataatgataagaactatgggtaatccaggctaagggtggtcatgaaaatcagcgcgcgcaatcagatctccggcacgatagtttcggtcacgccgggggccgtcaacggctcgatcaaggtcgatatcggaggcggcaccatcgtcaccgcgagcatcaccgaggaagcgatcgccgaactcggcctggcgcccggcgagatcgtcaccgtcatcatcaaggccagcgacgtgatgatcggcaagtagatgaagctcggccccctctggctgaagatccagatcgcggctggcgatgccctggcgatggggccagggaaggccgacctgctggaggcgatcatcgccgaaggttcgatcagcggcgccggtcgtgcgctcgggatgagctatcgtcgcgcctggctgctggtcgacgagatgaaccggtgcttcgagccggtcctggtcgagacgctcaagggcggcggtcgggagcgcggggcaaaagtcagcgcgaccggcctcgcggttctcgaagcctatcgcgagatggagcgcgaggccgcagctatcgcccaacgccctgcctatagccgcctgctcggacatctccgtgacggtccagttgccaaaaactgagcgcgatccgatcggaaggccagcgccaaatctctatatacggccaaatacgacctcgatatacgcccaaacataatgcggccgcagggaccgcgaacaggggtgttcatcgatgtcgaagcggttctcaatgctgctctgcgccacagtcgtgcctgcgttcagcgctccggcgctcgctcagaccggcccgacggaggtggcgccatccgcctccgataaagcagccgccgccggccttcccgaagtcatcgtcacggcgcgacgccgggcggaggatgcgcagcgcgtgcccgcagccctgtcggtggtgggcggcgcgctcatcgaccagagttatacggtcaacacgcagggcctgacggcgctgatcccgacgctgaactacagctcggccaacccgcgcaacaccgcgtttacgatccgcggcctcggttcgagcgtcgtcgcggtcagtcaggcgaacgacgggctggagccgggcgtcggcttctatgtcgatcaggtctaccatgcccgccccgcgaccgccgcgttcgactttgccgatatcgagcaagtcgaggaattgcgcggaccgcagggaacgctgttcggcaagaacacgaccgccggcgcgcttaacatcaccacccgtgcgccgagctttacgcgcgaaggcttcgccgagctatcctatggcaattataattacgtccaggcgaagggatgggcatcgggaccgatcaccgacaccatcgcctatcgcatctccggtgtgtcgacccggcgagacggcgtgctagacaatgtccgcaccggccgtgcggccaatacgctgggcacacaggcggcgcgcgggcaattgctgttcaagcccgacgacacgatccagatgcgcgtcatcgccgacttcaccaattttcaggcctattgctgtacgcaggtctatctgcgcaccggcacgtcgttgcgcgcgccctcgcgccagttcggcggaccggccggccttgcggcgcagttcggttacgcgccgcccagcaccaatccttacgaccgcaagaccgatatcgacgggccgctcggcgtcgacaccaacgagggcggggtcagcgcgatcaccgactggaacctcgggccggtgaccctgacgtcggtgacggcgtggcgcttctggaactgggatgcggagaacgaccgcgactataccggcttgcccgtccagctgtcgcagcacatcccgtcacggcaggatcagtatagtcaggagctgcggctcgcgtcgaacggcgcggggccgctgtcctatgtcgtcggcctctacggcttccgtcagcggctcaccgggcgaccgatcagcatctatggcccggctgccgcccgctatctgatcggcactaccgtcgtcaccggtaccgcgccgaaccaggtgacgacggcggtgccgtccaacttgctcgacggctacggacaggacggccgcaccgactttcgcagcctcagctacgcggcgttcggcgaggtcaattaccgcttcctcgaccgcctgaccgcgactgtcggcctgcgctacacgcaggaggagaaggacggctattacgatacgaccgtctcaggtggtccggcgacgaccaacgccgcgctcatcaacgcgcgtctcggcgtgctgcgcccgcaaagctatgaggcgcataacagcgacggaagcttgtcggggcgcggcaacttggcctggcaggtcagcgacacgacgatggcctatgcgagctatgcgcgcgggttcaaatcgggcgggatcaacatgtcgggcctgccgctcgacagcaacaatcagcccgcgctggcgaccgccgtggtgcggcccgagcgcaacgaaacctatgagatcgggctgaagaacaccttgttcgacaaccggctgatcttcaacatcgacggcttctacaccaaggtccacgacttccaggcgaccgtagtggagaactcgctgacccagacggtgcagctgcgcggttatctctccaacatcccggaggtgacggtgaaggggattgaggcagacgtgaccgcactgatcctgccggggctcagcgtgcgaaccaacttcgcctattctgatgggaaatatacaaactatcccgctggcccgtgcccgctggaggtgcagaccgccgcgaccacccgttgcagcctgacggggcgcagtctcgcgtcactaccgcgcttcgcgatcaccgcggggctggattaccagcggccgctgggcagcgggcaggtgttcgtccacatcgacaccgcctcgcgcagcggcttcaacggcgatcccagcctgtcgcgcttcacctatatccgcgcctacaacctgaccaacgccaatatcggctaccgattcgccgatgggttggaactgatcgtctgggcacgcaatctgctcgacgccgattacatccagaacctgacgatccaggccggcaattccggcctgatcgtcggcacaccaagcgatccgcgcaccatcggcggaacgatccgcttccgcatgtgatgtgcagccctcgcccatcacgaaaaccgatcatgccaccggattcgccacatcatccgatgccggtgaaggccgtagcggctcgggcgccctccggcaccatttttgccgtccggcagcgttcacgaacgtccgataatcgactaatataaaatcgtttttctaatttgtccggcgaggcttgggttggttcgcccgcagacagcccacatctgtgtcttgggttcatcacgggggcgaccgttggtatcggtgacggcgtggcacctcatgcgcggtgtccgcgacaggtggcggacgagcgccgagccggcgaccagataagtcggcgcgcgggaccatcaaatggtttgccgcattggcatttcacctcatcgaaacgggcccccgttgccacgagagagcgattttgctagcgccgcgcccggtgatattgagttccgccacatccacacggcaatacctatgtctcgtcacaaactcttttcaatcgctttatgcgacgcgcaggcgaacatgggataatagtggaataatagaacgtgtcatttagagtatcgacgatgagtaaatcgttctattcagccttgtcttcccgcagaattgcgtaggattggctcgtgaattttaccttcattcaaggaccgggcagtcggtttttgcgtctgcgctatcagctcgcgggcgctttcatcgcgatatttattccctatcttctgatcgtgctgaccagctcgccagagtctgtgagtatctatctgctgactaaaacccttttcttcagtatgttagccacaattctgggagtcattctctttcgcagccttagccaatatcccggcgtggaagcgaatgcctatacgctgccttccttcggaatttctttcgggttactgcttgcgattctgatcctggcgcggtttccctacagccgaatgctgctgtttagcagtttcggcctaatcattatctggttcatgttcgtcaatactattgcgaaccgccggagaattctgactattggtgtcgtgcccggcggcgatcatgaacttatactgggcgtggagggcgttcgctggattctgctcgatgcgccggagctggataccgccgccatccacgcggtcacagcagacctcaggatcgatctggcgcccgaatgggacaggtggctcgcggattgcgcattgctgggtataccggtctaccataccaaacacttagcggaatcgcttaccgggatggtccagttggagcatctgtctgaaaacagcttcggcacgctcgcccctgtctcggcgttcatgacgataaagcatctgatggactggttggtcgcggcgatcgccatgctcttcctcctgccgctcatggcagccctttgcatcgcggttcggctggattcgcccgggcccgcgatcttccgccagacacgcatgggatatcgaggcgtaccattcacggtatacaagtttcgcacgatgcacgccgcgccgacgggtgcatccacactccatgcagctaaaacgcaatcggaagattcccggatcactcgcattggaagcttcctgcgccgcagccgaatcgatgagctaccgcagatcgtgaatatcctgaagggcgagatgagctggatcggtccccgcccggaggcacgaattctctctgaatggtatgagggagaaattccgttctatcgttatcgtcatatcgtccgccccgggattacggggtgggctcaggtcaatcaggggcatgttgcggaggtcgatgaggttagaaacaagctttttttcgatttctattatatcaagaactattcgccgtggatcgatctcctgatcgtctcgaagacggttcagaccgtattgaccggcttcggcgccaagtgagcaggcgctccgacatcccccaacggcccggccgccagtgataccggcttggcgaacatgggtggaaccaggcgtgccgcccctggcgagaaacctcatttgggaaacattcttcgtccatgccaaaaggggggtcgatttcgaggcgcatcttccatggcatgcggccccctcaacccgttccgtcctcctttcagacgcgcgcggcaacctggtcgcgacggcgatcgtacgtccggcgcgacagaccggcgttgcaatggtcggcttcgtctgtgtggacgaaccattccggggcggcggcaccggccgcgatctcatcgcggcggtcaatgccttcaccgacgcggcggactatcgggcgtcgctgttatggaccggattcccgggaatctatacgcgaagcggatatgacgtgatcggccgggatgcgttcgttcggatttcccgtcgtgggatcggggaagactttgcgcacacccacgccagttcgaaatggcccgggccctgtgacggcgaaggtctgcccgccttcgcggtgtcggcgcatcggttgtgtaccgaaagagcgaaactgatcgtagcggaaggtccgcgcggcgtgacgctcctagactggcagggctctccagcggaggttctggcaatcatggaggcggagggccatgccgtctggaacgtcaatctttctgcccccgaccactttctggaagcgatcccggcggatcgatacgctatcgaatgtcgtgagggggccgccaccatggcacgcttcacagaagccgtgtttccgattgattatgtgcccatagccgaacgcatctaaaggaacgctctatgtcgggacccctcctgccgatcgtgaaggtccgcatgccgccggctgatcggctcgtgccaatgcttgaggacgttctttacggcggcatgctggcggaaggcgagcatgtgtacgagttcgagcggcgttttgccgcgcatttcggactgccagagattctcgggttcagcagtggtacggccgccctgcatgtcgcgcttctgagttgcggcgtcgagccgggagatgaagtcgttacgacatcgatgaccgcagaaccgactaatacgaccatcctgcaaaccggggcaatccccgtctttgccgatgtcgaaccggacagcggcaatctcgatccccgatccgtcgaagcctgtatcgggccgcgcacgcgtgcgattctggtggttcattatgcgggctatccagcccggttgaacgcattacgcgagattgccgatcggcacgacgtcgcattaatcgaggactgcgcccacgcgctcggcgcgcgctatgccggccaggcgatcggcacgatcggcgatgccgcgatcttctcgttccaggcgatcaagcacatgacgacggtagatgggggggcgctggtgcttcgcgatcctagccggatccgcgacgcgcgcaaactgcgctggttcggcctggaaaagggtgtgccgcgcaccgaggtcgatatcacgcgcgcgggctacaagtacaacatgacaaacgtggcgggcgcgatcggcctgcgccagcttgacagtatcgacgccgccatagaccggcataaggagaatggccgcttcttcgacacggcggtcgctggcgtgcctggccttgcctgcgtcgggattgaacaggccagcgagccgagctattggatctacacgctcttggccgaagactccgacgcggtcgaacgccggttggccgaaatcggcgttgccgcatccaagctgcatcgcccgaaccatctgcattcggtgttcgcaccctatcgacgtccgttgccgggactagaggaattctatcgccggctggtacacatcccatgcggctggtgggtcaccgacgaggatcgggcccgcattgctgatgccttgcgccaggtatagaccatgacgatcgcgctcttcgattgtcgcgtggacgatgtagctgcccgcgcccttgatccactgtggcgcagtgggcggctggcatcgggccccgcagtgccggccctcgagcaacggctcggcgcctatgtcggcgatcgagccgtcgctgcgatgagcgacatgacccaggcactagcaatggcgctgcgcctgg

SEQ ID NO: 3479 - DNA, 23276 bp, synthetic construct
  source 1..23276: mol_type = other DNA
  misc_feature 1..23276: note = Synthetic
ccgtgctccacctccacgcgcgcaacctggccgacgggagccccagccccaaggcagaggacttcttggcattcctgccccgcatcaaacaggggacggacgcggtgatcaacatctcgaccggcggcagcgcgacgatgaccctcgacgcccggctcgaaggcgctcatgccgcgaaaccggagctgtgcagcctcaacatggggccactgatcttcgacttctcgggggccgggaaacgcgttgcagaatggcagtacggctgggagcgcgagtacgtcgagagcagccgtggccggatcatgtacaacgacaacgcgttcatcgaacgcatcatggtcgaggtcggccaggcttacggcacgaaattcgagttcgaatgctacgacaccggccatctctacaccctcgcccacttcgtcgaccggaagctcgtcgaaccgccgttcctgatccaggcggtggtcggcatcctcggcggtatcgggcctgacccgcgcaacctggcgcacatgacgacggtggccgacagcctgttcggcgacgactacattctctcggcgttcgccgccgggcgccaccagatggacttctgcacccagtcggtgcttctcggcggccacgcgcgggtcgggctggaagacagcctgttcatcggcaagggagagctcgccacgagcaacgcgcagcaagtcgcgcgcatccgctcgatcgtcgaggcgctcggccgcgaggtcgccaccccggccgaggcgcgcctaatgctcggcctcaagggaggagaccgcgtcgcattctgacaatccggtaaaacagaggcccgacgcgaaagcgccgggccccagggaggaaggattgcggcacgccgcaatcgaaccgcggcgtctcgcagaagcgccgcggcggattcgtctcagaagcgcttgctgaccgtcaggtgccattcgcgcggttgcgccggctgggcgtctgtctgcggatagccgagcccctgataatcgaacacgttcacgtagtagaatttgtcgaacaggttcgtgacgcccagcgcgacgctgaaatcgtagggatcgttctggtaagtgatccggccgttgaacagcgccttcgcgggcatcaggtcgttatatttcgtcgaagtgccgctgacgatctgattcgattcgtacgtcatatcgatccgcggagtgatcgagccttcgatggacgggtgttcgatcgtgtactgaatgcccgcgctagcggtccagaacggattgttctgtcggcggttcacggtccgcgcggcgatgtccggcgccttgagtttcgaccagccaagtgagccgttgatcagcagaccgtcgatcgggtttgccgtcaactccgcttcgaagccccggatcgtcgctggctggttgcggaagtaggtgcggccgagacagacaatgcctgtgccgggagcgacacgcgtcgtgctgcattgagttgatccgggagggcccccggggagcgggatcagctgctggtcgccgacttgcggttgcccctgatcgttaagcagcgcttcggcgccgccgatcccggtcgggcgattgttgaaatccgtgtagaatccggccaggttcatccgaagccgccggtcgaacatgtccatcttcgcgccgagttcgtaggcgatgtcctcgttgccgtcgaactgcgccacctgggtgtattgcagcggacgcggattgtagccgggcagcgtgtagccggtcgaagctgaggcgtagagcaacatgttgtcgttcggctggaagttcgcgccggccttccagctgaacttcttctgcttgggcaccacggtgaacttgatgtccgagctggtgacagccgggctgaggtccgatacattcgagaagttcacgaccttcttatcgtcggcataacggccgccgaggacgataccgaagcgctcgccgaagggccgcaccgttgcgttggcgaacaccgccttgctggttggagtgtagaacgtgtgcagtgaacgctgcagacccgaactaccctggatcagtgatgcgaactgctcgcccttcgccttgaagtagaacaggccgccgacccagtcgaccaggtcggacttgcccgataggcgcaactcggcgtggtcgtagctctggatcaggtgattgataacgtgttcgaccacgagcggcatgccgtcggtgtcgaatgtgtgcgtctcatcggtcttgcggtgtgcgacgaccgcgctcagctccatgcctccgccgaagctccagttgaacttgcccgacgctccccagttagtgaagtcgttgtggttggggatgacgtagccgccccgcgtgcactcacccgtgatgggcgacttgctgccgttgtagtaagtattgcccgggatgaccgtgcacgccgcgatgcggtcggtgtacgtaacgtaagtggagtacggatcgccggtcatgaagcggcggtcgattgtcaggccgaagtacgccgcctggctccgcatgttgccgttcgcgcgggccggatcgatatcgacgatcgagtctgccgggttatccgacaggtcgcgaatgtaatcgccggtgacggtgaccttgagatcactcgacggctcccacatcaggctgccacgcgcgccgcgcacatcggtgccgccgtagtggccgatcacacagctccccggggcattcgaaaaggttccttgtagcggactggtgacggggaacgagccggcgagttgcggcgtgccacggcggttcatctcgcaggtgaagtcgagctctttctggtaaccggtctgcttcttcgacagcccggagacgagcagcgcagcggtgttgccaagcggcaggttgaacccggcgcgcaagtccacccgattgaacgaacccgtcgtcacgtctgcatagcccgacacctcgtgcaacttcggttgtcgggcgacgatgttgatcgcgcccgcaagtgtattgcgaccgaacagcgtgccttggggtccgcgcagaacttcgatgtgatcgatgtcgagcaggtcgaagttggccccgaggaggatcggatagtaaacatcgtccacatagaaggcgaccgggttctcggcgccgaggccggtgtcggtcgagccgatgccgcggatgaacgccgagatgccgggaccgaaggcgccctgcacgcgccggaactgagcattggggacgaccgaagtcaggtcgcccatattggtgatgccgcgcgcctccagcgcctcggccgtgacagcggtgatcgcaatcggggtatcctgcaggttggtcgcctgccgcgtagcggtaacgagaatctcgtcgataccggctttagcgttctcggcgtccttggaatcgacaggtgccggggcggccgtgtcctgtgcgcaggccacgccaggcattgcagcagcgagcgccagcgcgcctgcggacaaggagtatgccacttgcccggcccgagcgcgatgtttcgaactgttccctgcgatcctcatggtagctcctcctgcctcttgtcgtcatggctgcatttggcgccacgttcgcgcgcgttctgccggctcggagggttgaccgcttgccccgtaaggctctggcctatgctgtatttgacatcgacaactggcgaaggagtgtcagtcgatcgtgaatatgctgcgttcaatatggcggaccccgccattggcctggatgggatcgtccttgctgttgaaatagtacagcgtgcccacggtgttcccgtcaatcagccacgagttcggatagccgaggtcccagctgccgccatcgtcgcgaacgatgatttcgggtccccaacttttgccgccgtcttcgcttaccgtcgcgcgtatgccggcgggcatcaggcgataaccgtacacacagacgatgcgcccgtctggcatgaccaccaggttgcccggcgcgccgtagtcgttcacgcgactgagaaagccccaggtttcacccccatcgtcagagtagaacacctctgaccacatcacgccggtgggatcgcgctggcagcgggtgatacacaggatccgcccgctcgggagcatatagccgcgtggataaaaccagcgatgaccgacgaaggcaacgctcgggtctgcgtaattgccgtcggcattgccgaaggggtcctcgtagggtgtcacgtaggatatgaagtggaattcgcggccttcgttagtgctgccatagaccagcgggtggcgatgggtgttgtccttgtcgacggagaacatgaacaccaacaggcgcccgtccggccgaaccagcgtcgattggacgccggtcatcgaagcgatgccttcgagcgcaaggaggatcgttggcccccaggtcttgccgccatcgcgcgacagtcgcgcggtgccttgcgtgccggcggtggcgaagccgcccatgctcccgctcgacaccagcacgttctggtcgaggtagttcaccggctcggcgaaggccgccggcatattctcgcgcttcatcccgcgaccttccccgccaggcccggccatcatgtcgtactgcgggccgctccaggaccggcctcggtcgttcgagcgcacggtgacggtccgcgggttggagctgttcttcccgagaacgtcgtggcggatttttgaaccgtcatcgtaagccacggtgcgggtcgcaaaattggcgatcagcgtgccgtcgccggtctgccagaagccgctagtgaaaggccacgagcagaactcgtcctcacgccgatagacgaccccgtgatcgacctggctgggccggcgtggcggagcgaacttcatcggcgtgccctgcgatcgcgcgctcaggccgggcgcccgccgggaataaagacccgggtagcggtatcgtggaacagggccttctgctccgcctgagacaggcccgaacccgaatcgagagcgtattgcacccagccgaacatcgacccgggggtgttcccgacgtcgctcccccagaccattttgtccgccgagaaggtcttgaccatgtattcgaggaacggcttgggatccacaccctgggtgtggaactgctcgatcagcagcgtggtgtatttgtagtagacgttgggcagctttgcgagcgcgatgtgctccggcgtcaggccttgcgtggccggcagatctttcggccgcggaaagccgatgtggtcgagcacgatgttcacgcgcggatacttcacggcgaactgcgccaccgtggccatggcattcgccatattgccgccaatcggcatcagcaccactgcgagacccagcgaattcgccgcttcccacgatgcggttgcggcgtcgctaaggaagacgtagctgccgctcttgtccgggctgcttgtccaacgcacgccggaaatccggttgtccctggtgaacttttcaagcagcgcagggccatcctttgccacaggatcggtgatcaccaccgggacaatccggtcgggatggtctttcgcgatgtcgagcaaatagctgttatcggtctggtaggtgctgttgtactgcaccccgcagcccttctcgatcccgcactcgtcccagaacgcgaagatttccttcggtgtctgcggatagcgcatagccttggcaaccatgacttccggaccgtagcggcttcgggttgccttgaacgggtacttgtcaacatcgtttgtgtagaagtgtgcatgggtgtcgaacagcttgaacgacggttttatgacatgggcgaaggcggccttcggcagcaacgctacgccggctacggcgatacccgatccaatgagcatgcgacgatctatcatgtgctgaaacctttccccaggatctgctcggcgacgcgcaagcgaatcggtccatcttcatagggcaccctgctgccggcaacttgatgacggcggcgttgcgaacgaactggatcgtcctgttgttcaagttattgagctctccgacgcagttgtcggggagggcctaggccttgggacgcccagatcccggctgccatgttgtcgcggacgatcggcccagccttgcagcccgccagtccgctacttgcgcggatagtctgccgcgttgagcacccagcccggcatatccgagaaatcctcccgcggcggcgagaagatgtcgaccagaacgttgttctcgggatccgatggcgccgaggtgtggatcaccttgggagggatcacgcagaccgagggcgatgcgcagcgttcgtgctcgtcttgacgccagtcatgctggttggccgtccacggccagcgcaagtggtgcatgtaccagccttccagcgcgagtgagcattgctcaaaatcgtcgtggtggtgcggcgagagcttggtcacgtcgcgcgggccctgcggcggaaaaatgttgaccatgaaggtggtgcaacggaaaatcttgccgaaacgcccttcctggtccggcacgtcgagggaatagctgcgaatcttccagccgccggtcgggtcgggccagagctggaacggaggcacctgcggatgcggcccggcgtagttgccggcattgtcgaccttggctgtcacatcggccgattgcgccgtaatcaggcgcacgatgcgtccgccagctttgcaggtcacgcggctgtcgcccggcgggatcatcgtgatcgtgtagcccggcacctcgacggtttcgccgttcgcctccaccgtggcggccatgttctcgtcatggagcaggagcacgtattcgtcgacttggcccttgcgctcaaacaccgcgccggcttcgacctccgagtagcagacgacgaaattctgcccgcgggtgtaccagttgcgctgaccctcgcccgtctcttgcggcgcaccggcgtagaaccggccgtagctggacgcgccgaacgcggagatcggccccgtgccgccagccgcggttgacaggcgggagcgggggtcgtctgcttcgtacatcgtcattactccttaggcgctgcccgtgtggcgctcgccgcctcggcgacggctcggccgaacagcgtggtgtcattgctgaccatgaccagcgaaaagcccatctccaggtgctcacgcgcatcccgcggcgttgcgacggccacgcccgagaggatgcccgcctcccgggttgccttcaggacgcgggcagtcaggtccctcaccgccgggtcgctcgtcggcataccgctcgacaggaacaagtcgccatggccgatgaagatgccgttcacgtgatcgaggccggcaaactcggcggcgcgttcgagcgatggccagtcctcgagctggatcatccgcagggcttcatcgccggcgcgaagatagtccggcagcgccatcaggccccaccggcccgcccgcgaagtggcgcccaggccgcgctctcccttcggcgcaaagaccattcgccgggtgagcgcgtcggcgatggcggggctcgtgacccgcggcaccagcaacccgtcggcgccgccgtcgagtagcggctggatggtcgtgccggtatggtcgggcagtcgcaccagcgccgccatgcccatcgcctgggcggcgaacaccagctcgaccgcccgttgcagcgtgtgcggcgcgtgctccatgtcgatcacgacgaaatcgaacccggcgtggccgagcaattgcaccgtctccagcgacggtatcttcacccaggtcccgagcaggcctctgccgtcggcggcgcgaactcgggaaatgacgcttgccacgcccgccgctcctcagaagccgttcttctcgagccagacgaacagcagcctggcgacctgatcgttgttcatgtcggcaaacgggatgtgcgagttgccgtggagccctgcgtcggtgaggcgcagaatttcgacgcgcccgccacggtcgttgaccgccttggcgaacttcaggctgaggttgtagaaatcctgccagcctttcgaatcctcgatatggtctccccagaccagctggatcgggatcttcgtgagtctggcgaactccgcctccgatacatagaccgggccgaacggcccttccttcatcttcggctccgtcgtatcgggcaaaacgtagcctggatcctcgtaggcgacgattcccttgacgttgtcgctcttgagccgggtcaacagcgcgcggaagccgccggccgaattagtcagcaggaccgaagggccgattcggtccatcgccttggcagcggcgtcggtttcgagctgggcattcctgaccgtgtcgaattcgtcgtaacgcgcgcggttcgcctgttccagcgccgccggatcatccgacggaaactgctcgcccggccagaactcgccgaacttcggcccaaagcgccaggcgccgaaattgccttggtcgcggccgacttgcgctttgtaggtgtaatcctcacagccccaattggcgcggccgacccgcggtccgtcccacacgtaagtgggatagccggcacgcagaagcttggtctgataaccctcgccaccgtcccaccggcgttgccacacagcggcgctggagctgtgccacaggaatagcgctgtaggcctttcggcgaccggaatctcgtattcgacgtgcccgtggtcgcagacgagcgaggacttgtccggatcgccgagcactttgccgccagcttcaaacgatccttgccgcgcgatggcgacggcaccgttcggaagggcggcaccgctagccgtcgcgcagcccgccaggaaaatgaggccggcgcacgcgatggccgagcggaatcgcgcgatttcaagtccatgggtcatttgcgcgcgatcctctccgttctgtcccattgtgacggcaagcgcggttgcgtcttgctccaaagggctgcgagtcgtgcgttcaccgcacccccgacgacgcgatccgcatcgcggtcgcctccctttcacatggcaagcagtgcggaaatctccgccgccgccgtctgcagggcctggacaagctttttcggcggctccaccgggatgaactggatcgaatccatggctgataccatcgctaccagatcgccgcgatggtcgcgcaccggggcgcttacggcgttgatgccgagcacgacctcctctggtgcgtccgcccagccgagcgcctcgactttcgccagatcctgctggagtttgagcgggtcggcgatggtcaatggagtgaaacgggtgagctttccatgaggcaggctgccttctcgcctgatttgctcgaccagcagcagcttgccggcagccgtgcaatggagcgggatttcctggttgagctgaacggtgatccccacgagcgccttgcccggcatgctctcgacgatcgagacactgtcaccatagaccagtgagaggttgaagctgtggtcgaactcctggtgcaaccggcgcaatatcggccgcgagagttcgatgagaccatcatccgccgactggccgatcacccgcgtcagcgcgagcaaccgcggcccgcgggcatatcgatcgctcccgtggcgctggaccgcatatccaagggacacgagggtgcgcaggtgacgaaacacgcggggcttgctggtttcggtctcgcgcgcgatctcggacacgccgaggtcctcgcggctggccaagagctcgagcattcgcagtgccacgcgcgctgcacggaccccgtcacccgatgcgttgccgtcgggctcagacatcatccaccatcgggcggcaagcgaactgaaaggtcatcgtccgccacatgatcgccatcggcacgatgatcaaggtagatagagactcaggcggcggcgtgcgtgcggctcacgtcctcgcgaagagattttgcctaaaatgagattcgacgcgcaccggcgcatgaacccggtcccgtgatcagcctggcggccagtcgtggccggaagccgactgcctgcttcgaatgcagcttgtgctaaagcagacgatgcgcgtctcgccagttgactcgtagccagacgtgaaaggcggggccgtagccccgcccttatttggtgcagtcaagctgcttgttaacagctggctcgcgatttctgagcggtcataatactgaacttccatcacaaagtcaattgccggaacaccctccgcttgccacaatgccggcaggaggacgcatcatgagacgacttggcctcgatatcggcaccaacagcatcggttggtgcttgatcgaagatggcagccggattgtcgacgttggcgcgcgcatcttcagcgacggacgggaccccaagtctggcgcatcgctggcagtagatcgacgagatgcgcgggcaatgcggcgccgccgggaccgttatctcggaagacgcacagcttttttgaacgcgctaatcgtgcacaagttcatgcccgccaacgccgaccaggccaagttaattaccgagcgcgatccctatgacctgcgcaagcgcgcactaaacgagcggctcgagccttacgagatcggtcgcgcgctgttccaccttaaccagaggcgcggtttcaaatctaaccggaagaccgatcgcaaggggaagccgggcgaggaaggaaagatcgccagcggagccaaggcgcttgatcaggctatagccaaggtgggtgccgacacccttgggcaattcctcgcgaaccgcgaagccaagcgtgtgcggctcgacagcgagaaccaggaatacgatttctatccgcagcggcgtcatatcgaatacgagttcggtcgtatctgggaggagcaggcgaagcaccatcccgtgcttctcaccgatacggcacgggcggcgcttcatcgcatccttttcttccagcgcccgctgaaggagcaggaggtcggctattgcacgttcgcgggtttgagcggcgtaccagccgacgagcggcggttggccaaagcgcaccccctgttccagcaacggcggctttatgaagaggtcaaccagctccgcatcgtctcggccggcgcggccgaccggccactcacgcgcgatgagcgcgatgcgctgatcctcaaactccaggataagaagaaggtcagtttccagtcgctggccaaggtcatcgggctccatgaagacgagcgcttcaacaaggaaagcgagaatcgcaaggacttgatcggcgacgaagtgcgggctgagctcagcgacaggaagcgcttcgacacacgctggctgcatttcggcctcgacgagcagctgcgcgtactcgaccggctgcagaacgacgagagcccggaaacactgctcgcctggctcaaggcggaatacgggctcgacgacgcggccgccgagaccgtcgccaatgccgacttgccggagggttatgggcgcttcgggctcacggcaacaaggcgcctgctcgatgcactccgcgccgacgtcgtcacatacgacaaggcagccgaggcagccgggttccatcacagcgatcatcgtaccggggaggtactcgatcagctgccttactacggcgaaatcctcacccgcgagatcgcgcccggcaaggaagagtatggcgatccgctcgagcggcgctatggcaagatcacgaaccccaccgtgcatatcggccttcgccaattggagaagctggtcaacgccgtgatcgccgtccacggccgtccggaccagatcgtggtagagctggcgcgcgaattgaagctcaatgagaagcagaaagacgagcacaagaagcgcatcaaacaggagaccgatgcagccatcgcgcggggcaaaaagctcgcctcggaaggcttcctcgacaccggcgccaaccgaatgctgctccggctttgggaggacctcagtccagccaacccgctcgaccgccgctgcccctattgcggccagccaattggcatccgccagcttttctccggcgaagcggacgtcgaccacatcatcccctattcccgctcgctcgatgacagcgcaggcaacaaggtcgtcgcgcaccgcagctgcaatcgcgccaagggcaacaagacgccttgggaacgctggggccatgatgaggaccgctgggacaccatcagcgcccaagtcgcccgcctacacaagtcaaaacagtggcgcttcggacccgacgccctgcggcgactggagcgcgagggcggcttcctcgctcgccaactcaccgacacgcagtacctctcgcgcatcgcgggcaagtatctgcgcagtctctatccgacagcacaggacggccgcgtggatgtcattccgggtcgtatgaccgcgatgctgcggcggctatggggcctcaacagcctgttgcccgaccacaactacgtcgagaatgagcacagcaacgccccgaagaaccggctcgatcaccgtcaccatgccatcgacgcggcggtggcggcggtgacgacccttgatctcatgcaggaaatcgcccacgcggccagccgagcagaagataaggacctcgaccgcctgttcgagaacttgccgcagccgtgggaaggcttccgcgaggagctgggagaaaagctggcgcgcgtcaccgtcagccacaagccggatcacggacgtaagagtcgaccctcgaaggatcgcgacgtgacggcaggtcgcctgcacaacgaaaccgcttacggtttcaccggcgagttcgctgcggatcggaagacgcccattgtcgtccaccgcgtgccgctgatgagcctcaagccgggcgacttgacggacccaagccgcattcccgacgaaacgctgcgcaacgcgctccgcgccgcgacccatgatctttcaggtaaggacttcgaacaagcgctggctcgctttgctcaggagcaccctgtgttcaaaggagtccggcgcgtgcgggtgcgcgagccgctcacggtcattccggttcgcgaccggacgggccgggcctacaaagcctacaagggcgattcaaatgcgcgctacgacgtgtggcgcttgcccaatggaaaatgggtccacgacatcgtttcgatgttcgacgctcatcagcctgacgccgccgagcgtcgccctcaccccgccgccaagaaggtactcagccttcgccagagcgatttgctggctgtcgagcgccacggtggggcgattgaaatactgagggtcgtgaagttctcgaccaatggaagcctggcgctcgcggcggccaatgaggctggtgccctgaaagcccgcgatgccgccccggccgacacggacccgttcaagtacgtttacgccaccggtggcagcctcaagaaaatgaaagcccgccaggtccgtatcgatccgcttggccgcgtgtttgattccgggccgcgcgagtagctggagcgcgcgggatggaccggatcgtcgatatcgccactgacggccagcacctgtccatccatcgagggttcctgatcgtcgagcgcgagcgcgaggagatcggcagggtcgcgctcgatgacattcatgccgtcatcgtccacgcccgtggcgccacctgcagccaatctggtcgccggccttggcgaacgaggcgcgccaatcgtgttctgcggctcgaaccattcgccgatcgcggtgacgctgccgcttgaaggccaccatgcccagaacgcgcggatgcaggcccagctcgccgcttccagacctctagtaaaacagctctggcgccggatcgttggcgccaagatcgaaatgcaaggatcgctgctggccgcgcgcggcatcgccggcgccgaggcgttcccgttcatggcgcgccgggtcagctcgggcgacaaggagaatctggaggcccaagcggcacggcggtattggccgctgctgatgggcctggacttccggcgcgatcgtgacgcggacggcgtcaactcgcttcttaactacggctatgccatcatgcgcgcgacctgcacccgggccgttgtggccgcgggcctgcatcccaccctcggcatccagcattccaatcgcgggaatgccttcgccctcgccgacgatctggtccagccctttcgcccgctcgtcgatgcacttgcccggaacatggtatacgaaggaatcgaagcgctcgatccgccagccaagagccggttcgcgcggctgattgccttcgatctcagaattgcgggcgaagtttcgccggtatcggtcgccgcggcgcgcctcgcacaatcgctcgcccgcgcgttcgaaaccggccatgccgacctgatattattcgagccacccactcccatcgaatgggccgctgcaggccgtctcgatgacagcagcgagccatgatcgcgagcgatctggctcatttgagcggatatcggctgatgtggatcttcgtgatgttcgacctgcccgtgagcaccaagaagcagatgcgcgacgccgcaaagtttcgcgaattcctgctcgatgaaggtttcgagatgagccagttctcggtctatgctagattctgcaacggcaaggtcgcctacaagtcctacctcaagcggatcgagatgagactgccggaaaagggctaggtccatgtgctcacgttcaccgaccgacagtatgaaagcgtcgtccgattcgcgagccagcggcgcaagcagccgcgcaggaatcccgaccagctcgccatgttctaattatatctggcggaatgtgctggccggatgttccgatttcctgtttttcacagcaggttatcgggccatccggcctagcagttcagaaatcgcgggccaaccgcaactataaccacaggcatattcccggtgcctgtggcctagcagttcagaaatcgcgggccaaccgcaactgctccccgtcatcggtcgaagcggggtggggcctagcagttcagaaatcgcgggccaaccgcaacaagccatccgaggtcgacagcccatcgaggggcctagcagttcagaaatcgcgggccaaccgcaaccgcacaaggacaagcgaaatgacccgcgctggcctagcagttcagaaatcgcgggccaaccgcaactcgataagccgatgaaagcactggacctgcggcctagcagttcagaatcgcgggccaaccgcaactgacgttgggcttcctcgatgcgcttgcagggcctagcagttcagaaatcgcgggccaaccgcaactcatgccggtgtcggccttctacgcgctgtggcctagcagttcagaaatcgcgggccaaccgcaaccaatccctcaatcagccctcgacgccgcagggcctagcagttcagaaatcgcgggccaaccgcaacggcttgttgctgcatggctgcgcttgttcaggcctagcagttcagaaatcgcgggccaaccgcaaccggcatctatcgcatctacaggctgagtgcggcctagcagttcagaaatcgcgggccaaccgcaacgcgcatctcaagcagacacgccccatgacaggcctagcaattcagaagtcgcgggccaaccgtaactgtcggcgcagttgcaccgaatgcgttcaaggggagtttcgcatccgcctgtgccctccaccccgcctgtgcggagtccactcgaagcagacagtcggctcacaggctctacccagttactgacatgcggccgagattggcgcaaagcagccattcaacctttttcggcccaccaagccggccagcacaccttgtccggggtgcgagtgttcatccagacttctcgctgctcgtccttggagagggcccccgcgtccaacctgctcaaagctgcctcaactatccagggctcaagctcccagcggaccttttgcttgtcgagcgggtacttcttgacccccaggccaaggatccggagcgcgcttccgactccgaatgagcatatgatgatccgcgttatctcgaggtctttgtcaggctcgcgtttccctcgcgcttcctcgatcgccgccagggatgcacgcgctgccgcactgtctccggccaggcccttctgcgtcagctggagaatgaacgcttccgccgccgtgatgcgccgttcgcgcccatcctcgcggaccgtaaccatctgtccaagaacactgtcatagggaatctgccggtgccgggtccgaggccggcctttcggattgccggaccgacccttcttgaactgcgtggcaggaggtggccgcttgtaaccgacacgcggcccctcctcaggaatttgcggctcgctcatgccaaccgcccgcgcggccatttcaggcgctccggactgcaggtcagccgcttgatgtcttcaacatccttctcggtaagccgtcggcgccccgggcggctgagagcggcctgggtcgcccaggtggcaagacgcaggtgtgtgctccagtaaccgccggaatcttcggtcttgtcgagagtcgcgatccccagaatgcgcatggcttcgtcggcgttgtcagcatcgtgctcgacttccatcgtcagggcgcgggacttgggaggattgagcttagcgagcgccgcctctcgcttctcgatcatcttgaggacctggcggatcgccatccggctgcccttgagcgccgcctgataggtctgcaactgcagcgcctcgtcgatggtcagttcgcgctcaacacctccctgggtgacagtcagcgtcttgtcgaagatgatgtcgaacgccgagacgtgcggccggcgggcctttggccgacccttggggtttccagactggcccttcgagaacctggtgtggccgcccctgctcatgccgcggcctcctcgctcgcgcgatgaaccagctgcggctccttgccggtgatctccgaccagcgggtcatcgcgacgtcgacatacgccggatcgatatcgagcccgcggaagtggcggccgaccctctcggcagcgatcaggctggtgccggagccaaggaagatgtcgagcaccagctcaccctgacgggtgacgtcgcagatcgcatcggcgaccatggcaactggcttcacggtcggatgcagcgccagatcctcgcgtcgacttcccttgagcgagttgaccgaggcgtagtcccacacgttggtccggttgcgaccgtgcttgcccagctcgaccgcgttggtgtgcgaggcatccccgacgcggtagacgaacaccatctcgtgcttggagcgatacagggagcccatcccggcgttgctcttgttccacacgcagatgttgagcagctcgtcgtaggttccacccgctgcagcggtcacatcatccatgtgccgccagtccatgcacacgaagtggacggcgccgttgcgcgagacagaagcgcaagcgccgagggtgtcctcgagaaacttgcgaaactcgtccgtcgtcatctcgcctgaggccatggcgaactcgcggtggcggcccttggcgttgacgtggccgttgatcttcacattgtacgggggatcgaggaaggcggcatcgattcgggcgccttccccgatcacctcagccaggaacgttcgatcgcgcccgtcgccgcagccgatgcggtgttcgccgagctgccagatatcgccgggacgcacgcggggattggccggcaccgccggaatgacctcgtcatccggatccgggctgccggcgagcaccacatcgatctcgccgggactgaacccggtgagcgagaggtcgatgtcgatctcgggaagcgagagatcggcgagctcgagcttgaggatctcgacatcccacccggcattgagcgcgatcttgttgtccgcgagccgcagcgccttcttttgcgcctcgctgagacccgcgagttcgatcaccgggacttcggcgaggcccatctccttcgccgcgcgcagtcgtccgtggccggcgatcaggtttccttccggatcggcaaggatcgggttggtgaacccgaacgcgcggatcgaggcgacgatctgctcgacctgccgcttggggtgcgtgcgggcattgcgcgggtccggggtcaggctgtcgatcggcttgtagacgaccgtgagcgggcgagtggcagctccggctgccagggcgggaggtgtgtccattcgagaacaatagtggaccgcgacaccccgaataacccttagaccccccgcggcgggggaaaaacccgggacagcgcgattgcactggactgtcggccgacagcgagcattgctgttccacgcccggcgagccgggctcgcgccggtagcggcggccattccggcaccgcctgaaccggaagaaccacgatgacacaaaccaccacagcgaagcgcgctcgccgcatggcgcgcgagcccaagaccgacgcgcaaaatatttccagcaaggcatcggcgaagaagccgggtccctctcggctccatcagctcgaggctctgctcacgcgggaaaccggagctaccatcgccgagatggtcgaggccaccggctggcagccccattcggtgcgcggagcgatggcaggagcgctcaagaagcgcggcctcgcgatcacctcggaaaagctcgacggggtgcgccgctatcgcgggagccgggcggcatgagcggcgacagtatcgagcagctcgttgccgagatcggggcgatggacctcgagcaactgcgcgaactctggaggcggcgctacggcgcccctcccccgctgcgctcagtaccgatcatgcaaatgatgctcgcctggcgcgttcaggccgaagcattcggcgggctcgaccgggaaacccggcgcgcgctggtccgaacgggtgcgaccgaggccgagggcaagcacctcggccatggcgccatcctcagccgcacctggcaggggcgcaaggtcgaggtgatcgtcgaggagcaggggttccgctggcaggatcggctttatccgagcctgtcggcggcggcgaccgcgatcgcgggcagccgctggaacgggcctcgcttcttcggcctgagagacgccgcatgacggtcaagaccatccgctgcgcgatctatacgcgcaagagctccgacgaaggcttggaccagtcgttcaactcgctcgatgcccagcgcgaagccggtgaggcctacgtcaagagtcaggccagcgaaggctggaccgtgatccctgcgctctacgatgacggcgggttctcgggcgggaccatggagcgccccggtctgcagcgtctcctcgccgatatcgaggcggggctggtcgacgtcgtagtggtctacaagatcgaccgcctgacgcgctcgctgtcggacttttcgcgcatcgtcgaggtgttcgagaaggcgggggcgagcttcgtctcggtcacgcagtcgttcaacaccaccaactcgatgggccggctgatgctcaacgtgctgctctcgttcgcccagttcgagcgcgaggtcactggcgagcgcatccgtgacaagatcgctgcctcgaaggccaagggcatgtggatgggcgggacactgcctctcggctacgatcttccagcagcgggcacgcggacgctgcaagtgaacaagagcgaagcggcgacggtccggcatatcttcgctcgctatctcgagctcggctcggtccacgccctgcagcgcgaactcgccgatcagggtatccgtcccaagcagcgggtgaccgcgaacggcaaaaccctgggcggcgacgccttcagccgcggggcgctgttccaccttctgcggaaccgcatctaccttgggcagatcgtgcatcgcgaggcggtccaccagggcgagcacgaggccatcgtcgacgaggacctgttcaagcgcgtgcagcggatactggatggcaatgcccgtcggcatcgcgccgaggcagagcaccgcatcgccagggcgcctctcaccggcaagttgttcgacgccaccggcgaaccgatgtgcccgaccttctcgcgcggcaagtcggggcggagctatcgctattacgtctccgcttcgctgcagcaaggcgccgcttcatccgatggcggcgtgatccgacgcctttctgcgcaagccatcgagcgagtggtcaccgaggtcgccgaacgtttgctcgacaccagcgaacggcagctcgacaagatcatggccgtccggctcgtcagcgatgggctcgtagtcgatctccccggcggtcgcgctgccgatctcggtcttcgactcagcgatgaagagacaatcgttcacgccgccagcaaggtggtccgcatccatgtgccgcttgcgctgccgctccgcggaggacgaccgctggtactcactggtgcaacgagaagcgccaggcctgatccagccttgatcacggcgctgcgaaaggcgcatcggatgctcgaacgcgagggcggcatgccagtcgtgaagagttcaccgctctcgctttacgatcgccagatcttgcggctcgcctttcttgctcccgaactccagcgcgacatacttgccggtcggcagccgccgatgctcaatctggaaaagctcaaatcgattgccattccgctcgcctggaacgggcagaaagcggccctgggatggccgacatgatgagcctgttatggacgagaacagggcctgatatggcgattaaagcccctgttatgaccgattaaataccctgttatggcgaataacagggaaagacggtttttggcgcgtaacccacggtaaaaccgtgataaatctccggccaagtcggctgaatcggctgaaaacggcctgttttcggcctcagatttgcatttttccctgttcttgcctgaaatgcagggaaaccgaaccgatggcgaaaggccgagagacggcgcccgcgaagccggcctgaaatggccagagacgctcgaggattggacggccagtgacggcttcggctgcgcaaacccgcctgttccgcgcctttgcgcgggcccccagcaacaggagaatagtgctgggggtgcatggcggagcgggtgggattcgaacccacgatacgcttttggcgtatacacactttccaggcgtgcgccttcgaccactcggccaccgctccgcatctcctgggacggcgcggcctagcgatgcggcgggggtttcgcaagcgcgcgggcggtggcacaccggcgcacatgatcaccacacgcctcgccgccttcgctctggtgtttgccgcttcgccgctcggggcgcaggagaaggccgccgagccacccacgccggcctcggtcgtcgcggcttcccaggcgagcgagtggaaagcaatcgacccggcggagctgctggtcatggacctggcgcccgatgcaacaggggccaaacgccaggtcatcgtccagttgatgccgccaccgttcagccagggctgggttggcaacattcgaaccctcgccaaggcccactggtgggacgggacgagcgtctatcgcgtagtcgacaactgggtggcgcaatggggcgacggcgaggacgacccgaagaaggcaaagccgcttccggcgggaatcaccaaggttcccgaaagcgagtacaccgcgccggtgagttgcaaggtctatttgttcgagaagaaggtcatcaaggaggagtgcgacccgccgttcacggcgcttgagccgatcgacccctacgtcctgaaaggccaggccgggttcgccgccggttggcctgttgcggtggcactgcaaggcgagggcaatcgaacatggccggtgcattgctatggcggtgtcggcgttgcccgcgacctgtcgcccgacacaggcacgggggccgaactctacgcggtgatcggccacgcgccccgccagcttgatcgcaacatcgctgtcgtcggacgggtgatcgaggggatcgagaacctctccaccctcccgcgcggcaagggcgcacagggcgtatatgacgatccggcgctcagggtgccgatcgtgtcgctgcggctgggcaacgagttgcccgcagccgagcaaccgcgcttcgaatacctcgccagcgacagccggagcttcgccgactacattcacgtcaaggcgaaccgcaacgacgcgttctacaaggtctccgccggggggatcgacgtgtgcaacgtccaggtgccgatccggcgggcgaagaaatgagcgccgataccgtccgcttcaccgcgccgctgcaggcgatggtgatcgaggaagggtacgacccgatcggctgggttccgctcaccggcgaagcggccgatgccgttgctgggcacgaactggtccgccgcctcgagcgcggcaagcgccgcgggttcggctcagtgaaggtgacagtccaggtaggcgacagtcgctggcaaacctcgctgtttccgcagaagaccggcggctggttcctgccgatcaagaagccggtgcgtctggccgaagggcttgaggaaggcgagccggtcgaggtcttgctcgagcttcactgatcgaaccgctgcatcagctcgatcctgttgccgaacggatcggcgatgtcgccgcgcttgtatccggcgagcggacggcccgccgcgaagcccacaccggctgcttggagctggccgacgaacgcatcgaggtcgtcgacaagcaacgcgggatgcgccttgttcgtcggcgcgaacccctcctcgacgccgaggtggacgtgcgccgcgccgccgacgaaccagcagccgccgcgatcggtctcgggcttaggcacctcgatgaggccgagcacgccggcatagaatgcccgcgcccgctcctcctcgccccgcggcatggccagctggacgtgatcgagcccgatcacacccatcggctcagatccgctcggcctgcgcgaccgcctcgctggcacgcaacgcgctgacgatgcgggtcaggtgcgcaaggtcgttgacctcgagatcgacttcgtaagtgtggaaagggtcatcgcgctgggtcagctcgaggttgatcacattggcgcggttctgcgcgaagatcgtcgccatttcggcgagagtgccggggcggtgataaagcacgatcctgaggcgcccgatcgcgcctttcgagcgctcgccccacgacaggtcgacccagtcggcgtcgactccgttggccagcctgaggcagtcgatcgcatggacctccacgccgacccccggcttgcgcaagccgatgatcctgtcgccaggcagtggatggcagcacggcgccagcgtgaagcccatgccaggggtgagtccgcggatcgagatcgcccgctcctgagccggtagctcgggcaagtcggcggtactgccggggacaagcgcttccatcacttcgcggtcggtcagcttggccgagccgatcgcgtgcatcagcgcatcctcatcctcgagttcgaggcgctcgaccgcggccttgatcgccttgcggccgatcttggccggcacgcgtccggcgatgtc

SEQ ID NO: 3480 - DNA, 23264 bp, synthetic construct
  misc_feature 1..23264: note = Synthetic
  source 1..23264: mol_type = other DNA
gccgggaagctcggcatccccggccgcgctctggatatcctcaagttcctcgcgctcggccccgcgctgctggcgagcatgatcgttctcaccgattttcgtcgccgcaaccggcttgccgtcatgctcgacgtgatgatcgtcgccggcctgatcgccgcgatcctgcccgcgccgacctggcggcaatatctgctggtgatgattgtgccgctgttcgtccggctgtcgctgacgcccgccttgcagcgcccggcgaaagggctgcgcatcgccgcggcggtgttcgtcgtcgccggtctcgtcccgtcgacgatcgcgctggtcgaggcggtgcggacaagaccgccggtgttcgccgcgatcgcctatggccgtgcgctgcgatcgacgatggaccggctgcacgtcgccggcccggtcgcgaccctgtcgccgcagatgatcgcgccggcggggcgaccgatcgacccgcgattcgcaaccggcccgttcttctttcgcagcgacggtctcctgtcgccggacgacgagcggcgcttcgtactggtcagccgggcgaatgccgccgcgcagctctcgcgacgtccgcccgccgcgatcgtcaccggcggtgaagcaagctggacgagcggcgacgaccgactcgatgccaccctcgcggccgtcgcgcggcggcagggctggaccgccgtggcggtgccggcgacgccgttcaccttgttcctcccgccatcgcgaggccaggctctgtttcagcgaagccggaaacaactctgacaccgtcatccccctgtcgcgactgaggtgcagatgggtcgacgccgtctcacggtgaaggagacaccgcaatgtcgtcgaccgcctttcgttgcgacccccagccgatgccgcatgcgcccgctgatgaggtcgatgacggctatatgatgtgggtactcgcgctgctcgtcggcgtctatctgctggtcgcgatacccgcctggcgcctcgtcatcgtattgacggatcggacgcaccgccgccgggtcgggcgcgagccatccccccgtcccacgccggtcgacatggcaatcatgccgggcgacaatcgtgggatggcgacaatatcgcgtgcggacgctacacgaaccgggtgaaagccgaccccgaactacccagccttttcgagcatcaccgcgccgaactacttcggttcgtggcggcgcggaccggggacgtggccgaagccgaggacatcctgcaggagctttggctgcgcgcgagcgcggcccccgccgcgacggtcgagcattggcgcggctatctgttccgcgcagcgaacaacctggtcatcgaccgcgtgcgcgcccgccgccgccgcgagtgtcgcgaccgtgcctggaccgaaagcgtccacggcgcagcgctcggaacgggagaggttgccgacccggtcgacgcgcccgacctcgccctcgaagcggaccaggaggcgcagcgactggccagagcgatcgcggcgctgcccgacggcgcgcggcgcgtgttcgagctgcacaagatcgatggcttgagccacggcgcggtcgccgcgcgactcgggatcagcaagagcggggtcgaaaaacacatggcggtggcgatgaagcatcttcgtcgcgcgctggcggactgaggtgatggtggcacgagaacgtcctcagggcggggcaacgggatgatgatggaagaaagggacagcgaaatcgtcgaacgcgccatcgcctggcaacaggcgatcgcgggcgacgatatggattgggccgcgttcaccgcgtggctcgaagccgatccgcgccatcgcgacgccttcgacgacatcgcgctgatcaaccgcgcggtcgattcgcatcgcgatgccctgcgcatcttgctgcgccccgacgatagcaaagccgcggatgaggcggccgaacgtccttcgaccgggcgccgctggttcctcggtatcggaatcgccgccgcgctgacgctggcggtcgggctgccgctcatccagtcgcaggaagaccagtcgatcgcttatgccacggaccccggtgcgacgcgcaacgtggcgctcgacgacggctcacagctcgccctttccgccgataccgccgtcagcgtcgatcatcgtcagcatcgcgtgacgatcgggcatggggcagtctatttcgacgtgcggcacgatccggcccggcaactcgtcatcgaggcgaacggctaccacatcgccgatatcggcacccggttttcggtcgatctggccggcgaccacgtgtcgatcgcggtggcgcaaggctcgatcacggtcacgccgccggccggcgatccgtttcgcctcgacgccggcgacgcggtgagcggcggccaggacggcgctgtcgccagggcgaacgtcgcacccgatgcggtggcgagctggcggcgcgggcggctgacctacgacaatgcttcattggcgagggtggcgaacgacatcagccgctataccggcaagcgaatcgccatcgccacaaccgccggcgatcgccgcttttcgggagtgctcgtgattggcgacggctcgcatctggtttcggatttcgccgccgtcgcggaccttgctgttcagcacggccctgatcgcatcgtgctgtctccaaagcgcggttgaagcgcgcccgcttgccaatgccggcgaggcgcggcagcggttcgacattcccgccgggccgctgccggtcagcctcgcacgatggtcgagcatcaccggacagtcggtcggcgcgacgacggcgctgcctgcgatccgcacccgggcggtgcatggcctgctgacgccagccgacgcgctcaaccggatgttggtgggaaccgggttccgcgcgatcgcagtcgggcccggcttgttccggctcgagcgtagcccgatcgagccgcacacatcgtcatctcgccgccgtcgtacgattccgcgtatcagccgcgccccggtcgatatcgtcgtcaccgcaaccaagcggccggaggtgctcggcacgatcccgatctcggcctcggtcttcgcccccgaccggctggccaccggcaccgcctcgcccgacagcgcgacggtggcgagcgggatcgatgggctggctctcaccaatctcggccccggccgcaaccgcgccttcatccgcggtgtcgccgacagcccgttcaacggcccgactcagtcaaccgtcgcggtggtgctcgacgacagccggatcagctacgattcgcctgatcccgacctgctgctgctcgacgtcgcgcgggtcgaggtgctcaaggggccgcaggggccgctctacggatcgggggcgctgggcggcattttccgcatcgtcactaacccgcccgcgctcgacgcggcatcgggcgcggcgacattggtcggcgcggcgggagcgcatggcgggctgggcggtggcggcgacgcgctgatcaacctgccgctcgcaaaagatacgctcgcggtgcgggcgatcggctattatcgctcctatcccggctggctcgataccgaaggcggcgcgcgcgacgccaaccgatcgaccaccaagggcggccgcgtcgcgttgcgctgggcgcccgataccgactggacggtcgatctcggcggcgtggtgcaatcgatcgacgcgcgcgacagccaatatgtcacgggttcaccggacacgctggcccgcgttcacccgatcgccgagccggccgacaacgatttcgcgcaggcgcatctcgatgtggtcgggcatctcggcgggctgcggctcgtctccgccaccagctacgtgacgcagtcggtcgattatcgcctcgacgccagcgccgcggcagccgatttcggcgtgtcgacccccgcactgttcgccgacaaccggcaatattcgatcttcaaccaggaagtgcggctgtcgccgatcgcggcggggggcgtcggctgggtggcgggattggcctatctccatgcgtcgagcagtctcgacggaacgatcagcgtgcctggcgccagcccgttcgcggtcgaatcgatcgatcaggacgtcgccgaatttgccgccttcggcgaagcgacgctggcgctcggccggttcagcctgaccgccggcggccgcctgtcgctgaccgatgcggcggacgagcgcgccgagcgcatgggcgcgaccgaccggcgacgccgcaagctcggcttcgcgcccagcctgtcgctcgcctggcgccccgccgacgatcgctatttcttcctgcgctacgcgcgtgcgctgcgccccggggggctggcggcgggcgccggccaagcacagggacatttcgattccgacgagctcgaaagcctcgaaggtggcgcgcggctgacgctcgccgatggcgcgctggcgctcgcgtcgagcctgtatttcgatgactggcacgcgctccagtccgattacctgctcgataacgggctgatctcgacgcgcaatgccggccgggcgcggatcctgggcggcgatgccagcgtggattggacgctcggccgcggctggtcgctcagcgccgggctcaatgccgagagcgcggagttggtatcggcgaacggcgtccgcctcgaagatcggcggttgccggtcgtgcccaacgtcacgctgcgcggtctggtcggctatcgcttcgcgctcggcaactggacggtcaggctctcagggcaaggcaactatatcggcagcgcgaggctgagcttcgatcccacgctcgatcggcacatgggcgactatgccctgttcgccgccggcgccagcgcgaccgcgggccgctggagcctcgccctccggatcgacaacctgttcgacaccgccggcgacagcttcgcgttcggcaacccgttctctatccgcgacggaccgcaatataccccgcttacgccccgcacggttgtcacgtccctgcgcttcgactggtaaaaattttcgcgccaaccgactgcggcggcggggcttcggcgtcgtcgtcgggtcgggtgaccagttcggatcgattatgccagcaccgaccgccgataaaacggcctttgtcccgtcgctttcgtttcacccaccggcggcttccgatctgatgaccggcatgccgccggcgatcggccggcgctgggcggggatcggcagcacgctgatctcgttagcaattcttgcggcggcgctgtatcagctccacggcacgccggttgccgacatcctggcgctggtgccgcgcagcgcggtgttctggctggtgttcgtgatcgcctatctggtcacgccggcgtcggaatgggtgatctatcaccgcctgtggtcgatcccgccgtcgggcatgatcgccctgctgcgcaagcgcgtcgccaacgaaatcgtgctcggctatctcggtgaggtttatttctacgcctgggtccgccgcaccgggctgatcacgcgaacagcaccgttcggcgcgatcaaggacgtcgcgatcctttctgcgctgaccggcaacgcggtaacgctggcgatgctcgcggcggcgctgcccttcttcggcctgctacagctcgatctcggtggcaaggcggtgctcagttctttaggcgtgctcgccgtgacgtcattcgtaatgctgctcctgcgcaagcgtctgttcagcctgccgcggcacgaattgtggtggatcaccttcatccacctcgcgcgcatcgtcacgacgatcgggctcaccgcgctgatgtggcacctcgtcctgccgacagtggggctggtctggtggctgatcctcgcgaccctgcgccagctcctgtcgcgcctgccgttgatgcccaacaaggatctcgcctttgtcggcctcgcgatcttcattgtcgggcgcgatggcgacgttgcggcgatgatcgcgatgatcggcgggctgatcctgctcgcccatttgctggtcggctcgacactcggcgcggcggggctgatccgccgggaggcgacggcgtgatcgcgccgttgctcctgggcctcctcgcaggacaggcgtcgctgccctcgaaccccgatctcggcaaggcggcggcgcgctgccgcacgcccgagaccggcccgtcgttcctcgtcacggtcgaggggttgaaggaccggcgcggcctgctcaagctcgaaatctatccggacgataacgaggatttcctcgccgacgacaacaagctgatcgccgccggcaaggtattccgccgcgtcgaggtgccgacaccgccgaacggcgccgttcaactatgcatccgcgtgccgcatgccgggcgctatgccgtcagcctgctccacgatcgcgacggcaaccacaagttcggcctttcgagcgatggcatcggttttgccggcaatccgaagctcggctggtccaagcccgccgccgacaaggcaagcgccaatgccggcagcgggccgacgtcgatcaccatcgtgatgaactatcgccacggcctgttctcgttcagcccgctgaaggaggcacactgatgcgtatcgtcgacgtctgcgccttctacacgcccgccggcggcggagtgcgcacctatgtcgagcgcaagctgcgcgcgggcgcggatgcaggccacgagatcgtcatcctcgcgccggggacgcacgacgaggtgcggcatttcggccgcaacgtccggatcgtcacaatcgccgccgcccccttcccgctcgaccggacctatcattatttcgacgacgagccggcgctgcacgccgcgctggacgcactcgcgcccgacatggtcgaggtgtcgtcgccctggaccagcgcggcgatggtcgcgcgctggcgcggcgcggcgccgcgcgcgctgatcatgcattcggatccgctcgccgcctatgcctatcgctggttcggcgcgatcgcagaccgcgcgacgatcgaccggcggttcgactggttctggcgccacctgcgccgcatggacgccgcgattgacctgattgtctgcgccagccacgatctgtcgcggcgactaacggcgggcggcctcacccgcgtcgtcaccgagccgatgggggtcgagcccggcctgttcacgcccgccaaccgcgacgagacgctgcgcgccgagcttttgcggtgctgcaacctgccgccggacgccgtgttgctgatcggcgtcggccggttcgcgccggaaaagcgatggccgatggtcgtcgacgcggtcacgcgcgccggcctggcgcagccggtcggcctgatgctcatcggcgacggacgcgagcgggatcatatcgcgcgcgccgcgttcggcagcccgcacatccggctggtccagcccgtccgcgaccgcgcggcgctggcgcgcatcctcgcctcggccgacgcgctggtccacggctgcgaggccgagaccttctgcatgacggcggccgaggcgcgggccagcggcctgccggtgatcgtgcccgacagcggcggcgcccgcgaccattggcgcaaaggtcagggcgcgctctatcgcggcggcgacggcgcggcgctggcgcaggcgctgaccggatttctcgccgacgatccctccatgcaccgcgcccgcgccgccgatgccgcccgcgaggtgcgctcgatggacgatcatttcgccgcgctgttcgcgcgctacgcgcaactggcccgaggcgtcgccgatgccgcatgaccgccggctgctggtcgcgatccatgatgtcggcccgcgcttcgaaagccaggtcgatgcgctggtcgaccggctcgcgcgcctgctcgggcagatgcgtttcgcgatgctcgtcgtgcccaaccattggggcgaagcaccgctctccagcaatcgcgcctatcaggccaggctgcggcgttgggccgaagccggcgtcgagatgttcgtccacggctggttccaccgcgacgacagcgcgcacgacggcgcgatcgcccgcctgaaggcacggcacatgaccgcccgcgagggcgagttcctcggcctcggccacgccgaggcgttgcgtctgatgacggacggccgtcgattgatcgaggatgtagtcggcgcgccggccgcgggcttcgtggcgcccgcctggctctacggcgacggcgcacgcgccgccttggccgaagcgggtttcgccgtcgccgaggatcatatgcgcgtctggcaacccgcgaccgatcggaccatcgcacgcggccccgtcatcacctgggcgagccgcagccgaccgcggatcgccagctcgctggcggtggccgcgctcgcgcctggtctgctgcgcggtcagcgcgtggcgcgcgtggcagtccatcccggcgataccggcgtgccgaggctgcttgcgagcatcgaccgcaccctgagcgcgatggcgcgcgaccgaaccgtgtcgcgctacgccgatctcgtgccatgacggcgcggcacattctcaccttcgcccaatcgctcgatggcggcggcgttgagagcgcgcagttaaggctcgcggcggactggctggcggcgggccgccgcgtgaccctgatcctgggaacatcacgcggtcctctggccagtgaaatccctcccggcctgcgcgtaatcgagcgtggcgccgccgcttatctggcgatgttcgatctgcctcgatacgtcgccgcgctcgctcccgacgtgctgttctgccccggcaaccattataccagcgtcgcggcgggggcctggctcgaactgggcgcagcctgccccccggtcgtggccaaattgtcgaacaccgtagcgcgggccgatcacgctgcgttggtcgcgcgcggctaccgggcatgggcgcacttccacccgtgtttcatcgatcacctcgtcgcaatgacccgcggcatggccgacgaggcccggcgccttatgggctttcccgccgatcgcgtcagcgtcattcccaacccgcccgctcgtcatgtggtggacgagatgccgctgaaactacccgaggaccgcttcatccttggtatcggccgcctcgaacggcagaaaagatgggatcgcctgatcctggcgatgcgctcgattcgcgcagccgacgcaaagctcgtgatcctcggcgaaggcactctgcggccggctctggaacggctggccgcggagcatggcctggaggatcgcgtatcgctgcccggccataggctcgatccccgtccagccatgcgccgcgcctcggcggtggcgctggtttccgattacgagggcgtgcccggcgtcctgcgcgaagccctgtccttgggcaccccggtcgtcacgaccgattcaagcatcgccatccgcgaaattgtgacgtgcccctcgcagggcgacattgtttcccccgacgacccgtcggcgctcgccgccgcgctcgatcgccggctggatcccgcccgaccacgtccaatgccgaccgaagcggtccagacatgcgccgctggagactatctcgatctattcgaccagctcctgccacgtggcgcgtctcacaatcatgtttctcgaaggcatgggccgactggttgacgaccctcgatcggacgacgcccgcgccgcgcagatgagcctgctatgcggcgaatctcgattcctggcgaaggaaaagacggggccgtagccccgtccttatttggtgcagtcaagctgcttgttaacagctggcccgcgatctctgaggcggatagaatttcatccccacaagagactgtcaagggtcaaccgcaactagaatgctttggcataacccgaagatgatgcaccagtttctagggcgggaatgggtttggacctccgcttcctctgcactatggtcttcgcagcctgtcagccgctaggcgatggcggacgcagtttggaccccggtcgccatcgccatcgccagcagagtacatgagcgattaatcctctgaggagatctggcctgtcaatcccctagaatactttaagcaatggaagcgggtggcgccctgcgggtagggatgatgcagtttcggaggcagaacaacattgcccacgcagcacaagaagtgcaaaagtttcaaagggggatggaatatgcgcagactcgggctcgatatcggcaccaacagcatcggctggtgcctggtggaattcgacgaagaacatacgatcgggattcgcgttctcgacatcggcgtccgtatattcagcgatgggcgcgatcccaagaccggtgcaagtcttgcggtcgaccgccgaacagcgcgggcgatgcggcggcgtcgcgaccgttatcttcgtcggcgctcggtattcctcgatactttgatccaatatggactgatgcctgtcgatgcagatgaggctaggctgatcgcggcacgggatccctattcgatccgcgcccgcgcgctgaccgaacggctggagccgtatgcgatcggccgcgcgctcttccatctcaaccagcgtcgaggcttcctatccaaccgcaaggccgagcggcgcagcgaggacggcaagatcgccaacggcgccaaggcgctcgaccaggcaatggccgaagcgaaggcggacacgctcggccagttcctcgccggccgcgcggagaagcgcgtccggctcaacggcgagagccagggctacgatttctaccctcagcgccggcatatcgaatatgagttccagcgcatctgggaggagcagactgggtatcatccgactctgctcaccgaagaggcacgcgcggcgctccaccgcgtgctgttctatcagcgcccgctcaaggagcccgaagtcggcgtgtgcctgttcgcgggacgatatggcatagcacgcgacgagcgccggcttcctaaggcgcatccgctgtttcaggagcgacgtctctacgaggaggtcaaccagcttgagatcaccacgccgggcgaagcgcctcgcaagctgaccctcgaccagcgcgacaagctgatcctggcgttacgcgacaagcgcaaagtgtcgttcgcttccttggccaagacgctcaaactgcagccgggcgaaagcttcaacaaggcgaacgagacgcgcaccgacctgacgggtaacgaagtgcgcgcggtgcttggcgacaagaagcgtttcggcggcgattggcaccacaagacgcccgaagcgcagtgggagatcatcgaaaggctgatcgacgaggaagaccccgagacgctgcacgcgtatctgactgtcacttgcgggctggacgaggtgacggcagacgctgttgccaaggctccccttcccgaagggttcgggcggctgggcgagatcgcgacgcgacgcatcctcgaacaattgaagactcgcgaaataaacggcgcgccaatcacttacagtcaagcggtcgaagcctgcggctggcatcatagcgacgatcgcaccggagaggttctcgatcgtttgccctattatggcgagctgctgtcacgcgacattccgcccgggaccttcgatccccgcgatctggagggcggtcgccgcgagaaaaagatggagcgctattggggcaagataaccaatcccacggttcatatcgggctgcgtcagcttgagaagctcatcaacgcgatcatcaccgtccacggccggcccgaccagatcgtcgtcgagctcgcgcgcgaactgaacctcagcgaaaaagacaaggacgagcacaaccggcgcattcgcaagaatacggccgatgcgcaagcacggtccagaaagttgatcgaagaaggcatagacgatacgggcaccaatcgtgcgcggctcaagctttgggaagaactctccggcaacctcgttgatcggttttgtccttattgtggcgattctggaaaattgatcggttttcgcgcgctattttcggacgaggtcgatatcgatcacatcattccttactctcgttcgctcgacgatagtgctgccaataaggtcgtggctcatcgcaattgtaaccgtgccaagggcaataaaacgccatacgaacggtggggctctgatcccgagcgttgggatcggatcacggcgcaggtggcgcaccttcgtaaatcgaagcaatggcgcttcgggcccgaagcaatggcgcggttcgagaaggacggcggctttctcgcgcggcaattgaccgacacccagtatctctcgcgactggccggcaaatatctgcgcagcctctatccgacgaaggaggatggctgcgtctacgtggtgcccggccggatgaccgcgatgctgcggcgcaaatggggactcaacagcttgttgcccgatcataattacgtcgaaaacgaacatagcaacgcaccgaagaaccggctggatcaccgccatcatgccatcgatgcggcagttgtagccgtcacgacacgcgccacgctccagaagatcgcgcgcgcagcgggggaagccgaggatcgcgatctcgaccgcttgaccgtcgatatcgagcaaccgtggagcggctttcgtgaggaactgggcgagaagctcttgcgcgtcacggtcagccacaaggccgatcacgggcgcaagggccgcccctcgcgccatcgcgacgtgacggccgggcgcctgcacaacgacaccgcatatggccttaccggcgacgtggcggcggacggcaaaacaccgatcgtggtccaccgcgtgccgctcgccagtctcaagccgggcgatctgaccaatccggatcgcatccccgatcgggcactgcgcgacgcactgtacgaatggacgcgcgatctcaccgggaagtcgttcgaggcggcacttcagcgcttccgcgacacgcatcccgtcttcgggggcatccgccgcgttcgcgtgcgcgagccactgaacgtcattccgatccgtgatgcttcgggtcgcgcgtacaaggcctataagggcgatgcgaacgcgcgcttcgagttgtggcagctccctgacggcggcctaaagacgcgtgtcgtcaccatgttcgaagcgcatcagcacaagcaggacgatcgtccccatcccgctgcaaagcggttgcttaccctgcgccagaacgatcttcttgccgttgagcgtaatggagaaccacgcgagatcctgcgcgtggtcggctttaacgtccggggccgccttacgctcgctgccgcgcaggaggccggtaatctcaaggagcgggacggcctgtcgaacgaccgcgaccccttcaaatatgtctatctctcggggcgtagcattgtgaaggccaaggcccgccaggttcgtgtcgatcctctcggccgtctcttcgatcccggtcctcgaacatagcgaaaaggcgagggattccaccatggaccgcatcgtcgatatcgccacggacggtcgccatctctcgctctatcggggcttcctcgtcgtggaggagcagcgcgaggaagtaggccggatcgcgctcgacgatatctatgccgtgatcgttcacgcccacggcaccacctggagcgccaatctagtcgcggctctggccgagcgtggcgcgccggtcgtcttctgcggatcgaaccattcgccggtcgctgtcaccctgccgatcgaggggcatcacgcccagaacgcccgcttccgcgcccagtggggtgcgtcgaagccgctctgcaagcaactttggcgccggatcgtgacggccaagatcgcgatgcagggatcgctgctggccacacgcggcattgcgggcgcggaggcgtttcctttgatcgcgcggcgcgtcaagtcgggcgattcggacaatctcgaggcgcaagccgcgcgccgctattggcctttgctgatgggtgccgaattccggcgggaccgcaatagcccgggtgcgaacgcattgctcaactacggctatgcggtgatcagggcgaccgttgctcgggcagtgatcgccgccggcctccatccgacgatcggcatcaaccacgccaatcggggcaacgccttcgtgttggcggatgatctggtggagccgttccgtcctctggttgatgcgctcgtcgtcgctatgatcgcccgggggctcgataccctcgatccgaagctcaaacggcagttcgccaggctgatcgcgtttgatttgcggatcggcggcgaagcatcgcccgtttcgatcgcggccgtacgactcgcgcaatcgcttgcgcgcgcgttcgagactgggcgtccatcgcttgcgatattcgatcccccgacacccatcgaatgggcagcgctcgcccgaagcgatgaaagcgacgaggcgagcgagtgaccaacccctcctatctgagcggatatcggctgatgtggatcttcgtcatgttcgacctgccagtcggcaccaaaaaacagatgcgagacgcggccaagttccgagagttcctgcaagacgaaggttttgagatgagccaattttcggtctatgctcgattctgcaacggcaaggaaagcttcgactcgcacctctcgcgcatcgagcgcagcctgccggagaaaggcgatgtgcacatcctcaccttcactgacaggcaatatgagaacatcgtccgattctcgagccagcggcgcaagcgcccgcggaagaatccggaccagcttgtcatgttctgattcgcatgctcggaacaaggcttccggatgtgccaatttttcttacatgatcaataagttactggcgcatccggtttagcgcctcagagatcgggggccaaccacaacaaccaacggccaaggcgtgggggtgccggtggtttagcgcctcagagatcgggggccaaccacaacaccttgcgcgctcgccctgacgttcggatgggtttagcgcctcagagatcgggggccaaccacaaccatcgccttcgcgctcgcttccgccacgccggtttagcgcctcagagatcgggggccaaccacaaccctagcgcattcatcgccaaagacgacttgggtttagcgcctcagagatcgggggccaaccacaaccccaggaggtctatacgttcgccaaggcgaggtttagcgcctcagagatcgggggccaaccacaacgtgccgacgccggcgccgcgcaacaccggcggtttagcgcctcagagatcgggggccaaccacaacattcgctatccgctgttcgagcaggttgcgggtttagcgcctcagagatcgggggccaaccacaaccgaacggcaccgcgtccgctcggccatagcggtttagcgcctcagagatcgggggccaaccacaacgatatcgtccgccagctcgccgacgacggaggtttagcgcctcagagatcgggggccaaccacaacccaggactgcgccagctcgcggcggcgcggggtttagcgcctcagagatcgggggccaaccacaactcgacgtcggccgccgccggcatcgcgccgggtttagcgcctcagagatcgggggccaaccacaacgccacggcaatggcgcacctgtccacgatcggtttagcgcctcagagatcgggggccaaccacaaccgcaggctccagcggtgagggtggatcaggggtttagcgcctcagagatcgggggccaaccacaacatcacggtggacaagcagaagggtgttgatggtttagcgcctcagagatcgggggccaaccacaaccgttaatcgccgtgatataccatgcgtcaaggtttagcgcctcagagatcgggggccaaccacaacaccaaacgtaatccagtaaaatatccgccgggtttagcgcctcagagatcgggggccaaccacaactgatcgtgcggatcgccctgggatcgaaaggtttagcgcctcagagatcgggggccaaccgcaacaccgggcatcgcaccgggctggtgagggagggtttagcgcctcagagatcgggggccaaccgcaactaccgcgcttctcgacgcgcaggcgcggttggtttagcgcctcagagatcgggggccaaccgcaacgcataagccgcaggtcgcgcagcaggcagtggtttagcgcctcagagatcgggggccaaccgcaactggttgccgcgctggatgtaattggcgccgggtttagcgcctcaaagatcgggcgcgccttggcgcgggcggctgacggaccaggtcgccagcacggcgcccgtcgcggtattttcgatcagcacctcgtcgagcgagatcgcaacgacgcagatcgggcgctgctcgctgcccgccggctgaatgcagcggaccgcaccggcgccgggcacgcggtcgatacgtccgcgcaggcgaagccgcagcccttgcgacacgtcgaattcgtcgggcgtgacgcgctgcacggtatcgaagacacgctcgtcgtcgccggtgaattgcgccaccgccagcgtctgtcccggcagcaggacggtctcggtgccgctcgcccccgcctgggtccgccgcgggcaggcgtcgctcgtcgaccagggccgcggaatccagaaaccttcgatcgaggccgccgcctgttccttggccagcgcccaatcggcccccgaccattgcgtcggctcgacatggatacgcaacgcccggtcttgcgcatcgtatcgccagcgcagcggcgcatggctggtctcgtccgccggccctgaacagccgaacggaatgacgagatcgagccgctggccgaccgcctcgttcgccagatcgggaagcggcttgcccgaggtcagcgcatcgctcgcggcaacggcgaggtcgacgatctcgcttcgcccccacaccgacggcaaaaccggcgtgggtgatggccgcggcgcaggtgcctcgatcactacgggggtgatcggctcgggcgcgggataggtggcgcggccgagaaagaacccggcggcgccgatcgcgatcgtggcggccgcgccgcccgcgatcgccaaccggctggccctgacactcggttcccgcatgatcacctgatagcaaattcggccgcgcgctccagcccgaattgccgcgcgcggcgtctgacgcattgacaacccgcctctgcgtgcgtgaggcagggcggacatgacggtcgaccagatcctgaccttgttcgtcctcgccgcggtcgtcgcggcgctgatctgggacaagatacgcgccgacgtcgtcgcgctgtccggcgccgcggtgctgctgatcaccggcgcggtgcggccgatcgacatccagggcgccttcgccagccccgcgatcgtcgcgctcgcctcgctgttcgtgatcgcctacgcgctcgaactgtcgggcctgctcgatcgcgcgatcaccctcgcggtgcggatgtgccgccgatggggcaatgccggcatctggctgttgttgacgatgatcggcggggtatcgtgcttcctcaacagcacgccgatcgtcgtgctcggcgcgccggtggtgcgcgacgtcgcccgcgcgctcaagctctcgccgcagcgctacctgctgccgctgtcgtatatcgcggtgctgacggggtgctgcacgctggtgggcacctcgaccaacctgctggtcgacgatatggcgcggatcgccggccagccgcgtttcggcattttcgagatcacacccgtcgggctgccgatggcgctggtcggcgggctctacctctttctcgtcagcgggcggctgttcggccgcgacgacggcgtaagagaggtcaagcgcggcgtcccgacgatcgccgaaccgctgatcgaaagcgggcaggtcggcgatgcgcaattgttcgccgaacgacgcccgttggccccgctcaaggcggccgtcgcgctcgtgaccttcgccggggcgatcgcgctcgcggcattcaacgtggtgccgatcgccgcgtccgccttcaccggcgcggtgctgctgatcctgctgcgggtgatcagcgccgacgaggcctatagcggcctcaagcccgagatcctcgtgttgatcgccggcatggtggtgatcggcatcggcatggaacagagtgggctcgccaacaccgcctccaggctgctgatcggcagtgtcgacggcctcagcccgctcgcggtactgtgcctcctctatctgatcacgatggtgacgaccgaactgctctcgaacgccaccgtcgcagtgctgatgacgccgatcgccgtcgcgctcgcgcaaagcctcggcgtcagcccgcgcccgttcctggtcgcggtgatgatggcgggcagcgcggccttcgcgaccccgttcggctaccagaccaacgtgatcgtctatcagatggggggatatcgatatctcgatttcgtgcgcgtcggcctgccgctcaacctcatcaccttcgtcgtcgcggtcaccgcgatccacaccttcttcccgttttgaagagcgctcagagtcggcttgagaaatcgcggaagagcgatttccgtggcggcaccggcccgctcccccacccggccacccaatgcgattatcctatgggtggtcgggtggggaagcgggccggtgccgccatgcgccgaaaggcgcattctcaaacggactctcagagccgatcggcccgccgatgcgccgacaggaacgcccacatcgcgtcgttgtcgaccacccaggcatggccgccgccgacggtgatccgcgccgcgacgtcggccccgtcgcggcagccggtatagcgctcctcgtagacgccgtctgccgcccagcgcgtcgtcggcgcagcggtgcagccgttgagcgcggcccagcgctgctcggcggcgtgcatcgtatagtgccaatatcccgcgccgccgccctggatgggattggtcttgtcggcgtcgccggcaaaggcgatcaccggcatcggcgcggcgggcgcgcaggtcgcgggatcgggccgcgacgggtcgtcggcatcggggttgcccgcgcgcagacccaccaccggcgcgatcgccgcgaaccggtcggccgcgacacagcccagccatgacgtcatccgcccgccccccgacagcccggtgacataggcccgcgcatcgtccgcgcagccctcagccgccagccagtcgagcgcggtcgtcagataggccacgtcatcgggatcgtctttggtcgggatcgtccccgtcaccgtcggcacgccggggatgttccacacgaatcctcgccccacgggaattccggcatcgggcgcggcgagaatgaagccatgcgtgtccgcggtcgcctcaagccccgattcacgcagcatctcggcgcccgtcgccgtgctgccgtggagcaggaagacgatcggcagtgcctccccccgatcgtatccccggggcagatgcaccagcatcggccgcccgctatccccgatcggaatgcgcgcggtcgtcccgggcgcgccgatgtcgcagcgggtggcggcatgcgcggtcgaggcgatcgacaaagtgccggcggcggcgatgcaggcgagcagcggacggaacggaatcggccttctcccgatggtgttgtttcgccccttttcccctcgcgggcacgcgggagcaaggggtgccgtcggatggccccgctccccttccccaaccgcgcgcggcttgctaaggcgcccgcgagccccgcattcgcaagctgccggcgcccgcgcggaccttagtccgcgacgtacgcgttggctcgatacaagagaaagggaatacccgcatgaccgccattggccaggacacgctcggcacccgcgacacgctcgacgccgccggcaccacctacggcttctacagccttgccaaggcggccgagaagctcggtgacatcagccggctgcccttttcgatgaaggttctgctggaaaacctgctgcgcttcgaggacggcaagaccgtcacgaccgaggatctccaggcgatcgtcgattggcagaaggatcgccgctcggatcgcgagatccagtatcgcccggcgcgcgtgctgatgcaggatttcaccggcgtcccctgcgtggtcgatttggcggcaatgcgcgacgcgattcggaaactcggcggcgacgcgcagaagatcaacccgcaggtgcccgtccacctcgtcatcgatcactcggtgatggtcgacgaattcggcacccccaaggcattcgaggataacgtcgcgctcgaatatcagcgcaacatggagcgctacgaattcctcaaatggggttcgaaggcgctcgacaatttccaggtcgtgcctcccggcaccggcatctgtcaccaggtcaatctcgaatatatcggccaggcggtatggcattcgaaggggccggacgggcaaccggtcgcctatcccgatacgctggtgggcaccgacagccacacgacgatgatcaacggcctcggcgtgctcggctggggcgtcggcgggatcgaggccgaggccgcgatgctcggccagccggtgtcgatgctgatccccgaggtcgtcggcttcaagctgacgggatcgttgcgcgaaggcatcaccgcgaccgacctcgtcctcaccgtcacgcagatgctgcgccagaagggtgtggtcggccgcttcgtcgaattctacggctccggcctgcacacgctgacgctcgcggatcgcgcgacgatcggcaacatggcgcccgaatatggcgcgacctgcggcttcttcccggtcgatgccaagacgatcgattacatgcgcttcactggccgcagcgacgatcagatcgcgctcgtcgaggcctattgccgcgcgcagggcatgtggcacgacgagaatgccgccgatccgatcttcaccgacacgctcgaactcgacatgtcgaccgtccacgcctcgctcgccggccccaagcgcccgcaggaccgcatctcgctcaacaaggtcgacgaggtgttcaacggcgatctctccaaggtctatgacaagcagcgcccgacgcgcgtcgccgtcgatggcctcaaccacgatatcggcgacggcgatgtcgtcatcgccgcgatcacgagctgcaccaacacctcgaaccccagcgtgctgatcgccgccggcctcgtcgcccgcaaggcgcgcgcgaaggggctcaagcccaagccgtgggtcaagacctcgctcgcgccggggagccaggtcgtcaccgattatctcgacaaggccgggctgaccgacgatctcaacgcactcggcttcaacctcgtcggctatggctgcaccacctgcatcggcaattccgggccgctcgcgcccgcgatctcgaaggcgatcaacgagaacgacgtcgtcgccgcttcggtgctctcgggcaaccgcaatttcgagggccgcgtgtcgcccgatgtgcgcgccaacttcctcgcctcgcccccgctcgtcgtcgcttatgcgatcaagggcaccgtgaccgaggatatggaagcctccgcgctcggcacggacggcgacggcaacgacgtgttcttgcgagatatctggccgaccaatcaggaagtccgcgacctgatcgacgccaatatcgacaatgagatgttccgcgcccgctacggcaacgtctatgcgggcgacgagcggtggcgtgacatcgacgtcaccggctccgaaacctatcagtggcgcgccggctccacctatgtcgccaacccgccctatttcgagggcatggagatgacgccggcgcccgtcgccgacatcgtcgaggcgaagccgctcgcgatcctgggcgattcgatcaccaccgatcacatctcgcccgccggcagcatcaaggccgacagccccgccgggctctacctccaggatcatcaggtcaaccgtcaggatttcaattcctacggcagccgccgcggcaaccacgaggtgatgatgcgcggcaccttcgccaacatccgcatcaggaacgagatggttcccggcgtcgaaggcggcatgtcgaaatacgacggcgaggtgatgccgatctacgacgccgcgatgcgccacaaggccgacggcacgcctttggtggtggtcgcgggcaaggaatacggcaccggctcgtcgcgagactgggccgccaagggcacgatcctgctcggcgtccgcgcggtgatcgccgagagctttgagcgtatccaccgctcgaaccttgtcggcatgggtgtgctccccttgcagttcgcggacggcgtgacgcgccagacgctcaggctcgacggctcggagaccttcaccatccacggcgtcggcgacatccgcccgcggcaggatgtcgaggtcaccctcacccgcgccgacggcaagaccgaacgcttcgccacccgctgccggatcgataccgtcaacgagttggaatatttcctccacggcggcatcctccaatacgtgctgaggaacctcgccgcgaactgagccgcccccctttccctctcccctcgggagagggagggagccggcaaaggcggcggaagggtgaggccggcaacgcccagccgctccccaagcccgccaccccagccccagaccgtcaccccagcgaaggctggggtccatgtctgatgcgagaaataacggacggtggcccgataaccgaccgacatggatgccagcctgcgctggcatgacggaataaggcatttcctcgcccagcgcgtcgctccggcggacgctggactcccgatactcccgaaagccgcggccttcgatcgcgtgccgattgccgcgcgccgccgcccggcctaagtgcccgctcgatggcggcttattcctccccggcctatcaggcgtcgcgccgcggccgggggccggggctcgcgctcgcgatcgccgcgaacgtcctgctcgcgttgctcttcctgaccatgtcgtcctattcgcccctccagcgcatggcgccgacggggctgtcggtgttcaacgtctcgggctcgcgccccgccgccgaagcatccgaaaggaaggccgcgcccaagccgcgcccgaaacgcgccaccgcagcgcgagaggcacccgcaccacgcccgccgaagccgccggcacccgacgcctcggcgcccagcccgttcaagatgatcatcgtcagcaaagaggcgttcggcgcctcggacatcggcaagctgcccaaggacgcgcccgaaattgcctccggcggtggcgagggcaaggcggccgacagcgcctcgacctacggccccggcgaaggaccgggcggcgccacgctctacgccgccgactggtatcgcaagccgcgcgatgccgagcttgcctattacatgcccaaggtggtccgccccggcagttgggcggagatcgcctgccagacggccgagcgctatcgcgtcgagaattgccgcgcgcttgccgaatcaccgcccggctccggcctcgccaacgcg

SEQ ID NO: 3481 - DNA, 23264 bp, synthetic construct
  variation 16593..16818: note = note, n is a, c, g, or t
  misc_feature 1..23264: note = Synthetic
  source 1..23264: mol_type = other DNA
  variation 17845..19577: note = note, n is a, c, g, or t
  variation 14731..15317: note = note, n is a, c, g, or t
acatctgcgcctgaccatcatgctgaaaaagctgacgcccttatggcgtgaccggcttgaggcgacatcgctggtcgcggtggccgccttcctgatcgccctgctgccctcggccatcgaatacgcgatggaggaatggtatatcacctcggccgcgctgcatattccgaacacctggcgcgtttcggcgatccccttcggttttctgctgatgacgctgctggtgctgcaatatctgctgcgcaatcaccggctggccgatatcggctttggcatcgccattgtgggcggcatcggggccgcgatgtggctggcaagcccgctcctgatctcgatgggcgcgggatccttgctgatcttcctcttgctgctggtgccggcctgcctgctcggcggggttccgattgccttttgcttcggccttggcacgctgacctatctgctctttggcagccatgtgccggtctatgtgatgatgggccgcatggatgagggcatgtcctcgatcatcctcctgtcggtgccgatcttcgtgctgctcggctgtgtgctggatgcgaccggcatgggcaaggccattgtcgatttcctcggctcgctgatcggccatgtgaaggcaggcatgtcctatgtgctgctgggatcgctgttcatcgtttcggggatttccggctcaaaggtctcggatatggcgaccgtcgccccggcgctgttccccgagatgaaacggcgcggcaacaagccgcccgagatgatcgctctgctggccaccggggccgcgatggccgataccgtgccgccctcgatcgtgctgatcgtgctgggctcggtcgcgggtgtttccatcgcggggctcttcaccagcggtatcgtggtcgcggccgtgctgctggccgtgctgattggcctcgcgcgctggaaggcccgcaacgaggtggccggcagtttccgccgcgcgccttttgcgatgatgatgaagcttctggtgatcgccgctccggcgctggtgctcccgttcctgatccgctcatccgtggccagtggcatcgccaccgcgaccgaggtttcgaccatcgccgtcctctatgccatggccatcggtatggtgctttacggcggcatcagctggaagaagttctgcgacatgctactggaaacggcggcgctgaccggggcgatcctgatgatcctcggcaccgcgctggcgatggcctgggtgattacgcaagccggtgtcgcgcagtcgctggcgcagatgatgcagtcgctgcccggtggctggatcggcttcatgctggtcaccatcgtgatcttcctgatcctcggctgtgtgcttgaaggtctgcccgccatcgtgctgatggccccgctgatgttccccatcgcccgttccctgggcatccatgaaatccattatgcgatggtggtcgtggtcgcgatgaatatcggcctgatggccccccctatcggggtcggcttctacctcgcctgcaagatcggtgacgtgccgccggatgaggccttccgcgcgatctggccctatatcttcgcgctgatcggtgggcttctggtgatcgcggcggttccggccatctccatcgggttcctgtgatgagcacgggtttcccccaggcaggcgcacgctttaccggtaaacacgtcctcgtcttcggggccggtgcctcgggcgagggctggagcaacggcaaggccgccgccttcgcctatggccgcgaaggcgcgcgggtcgtctgcatcgacctgtcgcccgaggctgccgggaccacagccgaagccatccgcgaggccggaggcgaggcgctggccctgaccgccgatgtgaccgacagcgcctcggtcaaagctgcggtggaacaggcagtggcggcttacggcccgcctgcagtcttgcacaataatgtcggcgtcacccatatgggtggcccggtcgagctgagcgaaaaggatttcgaggcttcggtcgcgctgaaccttggctcggtctatcgcacctgtaaagcggtgatcccgcatttcgtgaccgcagggcgcggggtcatcatcaacatctcgtcgctggccgcgatccggtggtcgggctacccctatttcgcctattacgccaccaaagcggcggtcaatcaggccaccgtggcgctggcgatgcaatatgcgcgccagggcatccgcgccaattgcgtgctgcccggtgccatcgacacaccgctgatctaccgccagatcgccgggcaatatgcctcggtcgaagagatgcaggccgcccgcgcccgcatggtgccgcttggccgcatgggcaccgcctgggacattgccgaggcggcgctcttcctggcttcggatcaggcgcaattcatcaccggggtctctctgcccgtcgatggcggccagagctgcgccatgcagcccctgccctgaccgcagccccccctttccattccgcccctcaccgtatgacgggcacagacgatctgaagaggaaccgatgtcacagaccaacagactgcataattccgatctggccgagcgcgcctaccgcgtgcgccgcaatgcgctgatcatggccgaggtgcagggccagggctatatcgcacaggcgcttggcgtctcggatgtgctggccgtcacctatctgcacgccatgacccaccgccccgaacagcccgaatgggaagatcgcgaccgctttctcctgtcggtcggccattatggcatcgcccattacgccatcctgaccgaagcaggctacctgcccgaagaagagctggtgacttacggcatggatgacagccgtctgccgatgtcgggcatgtatcactacacccccggcgcagaaatgtcgggcggatcgatcgggcttggtctgccgatggccgtcggcatgggtctgggcctcaagcgcaaagaaaacccggctttcgtctatgccttcatgggggatggcgagctggccgagggcccgacctgggaggcggcgatttccgccgcgcattacaagctcgacaacatcatcgcgattgtcgatttcaaccgcatccaggccgatggcccctcgatgtcggtgatgtccaccgagccgctgatcgagaaattccaggccttcggcttccatgtccagcgggtgaacggcaatgacctgcccgcgctggtcgaggcgttcgataccgcgcgcaaccataccggcgcgcagccgcgcatcatcatctgcgacaccaaactgggcagcggggtcgatttcctcgagaaccgcgagaaaagccacttcgtccggatggatggcgatgactggaaacgtgcccatgcggcgctggatgcctggagggcagcatgaacgtcccgaccaacaaagccccggttgccgccgcaaccatcatgtcctcttcggtggatgagggctatccgacccgcatggcccccttcggtcacaagctggtcgaactggcccgccaccgccccgaaattctgggcatgagcgcggatctggcgaaatataccgatatccatatcttcgcccaggcctatcctgaccgcttctaccagatgggcatgtcggaacagctgatggcgaccgcagcgggcgggctggcgaaagaaggcttcatccccttcgccaccacctatgcgacattcgccgcccgtcgctgctatgacttcatcagccagggcgtggccgaacaggatgccaacgtcaaattcatcggtggcctgccgggtctgacaacgggctatggccccagccaccaggcgaccgatgacctcgcgatcttccgcgccatgccgaacctcacggtaatcgacccctgcgacgcggtggatgtggaacagatgaccgaggccgtcgccgatcacaaaggcccggtctatatgcggatcctgcgcggcgcagtgccggtggtgctggacgaatacaattaccgtttccagatcggcaaagcggcgctgttgcgcggcgggcgcgatgtgctggtgatctcgaccgggtttatgacgatgcgggcgctggatgcggcaaaggatctgcaaaaggacagcgtggatgtggcggtgctgcatgtgccgacgctgaaaccgctggacgaggtggcgatcatccgcgaggcgcagcgcccgggccgtctggtcgtggtggccgaaaaccattccgagatcggtggtttgggcgaggccgtcgcaggcagcctgatgcgcgcgggtgtgcatcccgcaggcttccgccagatcgcgctgcccgatgccttccttgacgcgggcagcctgccggtcctgcaggaccgctacggcatctcgcgccgcgtgatgggtgacagcatccggcgctggctctgatgcggatccgctttcccgcttgccttgcgcggcccccggctgcgaaggcatttacgggaagaggaggctgaaccatgtccgcacagatcatcggctgggcgcatacgcgctttggcaaaagcgaggcccccgacaccactgccctgatggcggaggtgatcgggccagccctgcaccatgccgggatcggcgcagaggatgtcgacggcatcttctgcggtgtgtggaacaacggctttcaggcgcaggattttcaggcggcgctggtcggcatggcttaccccgcgctggcacaggtgcctgcggtgcggctggaaaacgcttgcgccaccggctcggcggcactgttcgccgcgctcgacttcatcgcggccgggcgcgggcgtattgcgctcgtgctagggtctgagaagatgacagccatccccggcacccgcgccggggatatcctgctcgctgcctcctggatgcgcgaagaggctggccctgcggggtttgcgggcgtgttttcccggatcacacaagagtatttccaccgcaacggcgatcacagcagcgagatggcaatgatcgccgccaagaaccaccacaacgccatggccaaccccctggcgcatctgcacaaagatcttggcatagacttctgtgatgcggtttccgatctgaacccgcttgtcgccgcgtccctgcgccgcagcgattgcgcgccgctctcggacggggcggcggcgctggtgatcgctgacgccgggaccgccgccaccatgcaacgcgccatcgcctttcgcgcccgcgtccagaccaatgacgttctggccctgtcgcagcgcgatcccatcgcctttgacggcccccgccgcgcctgggccggggcgctgaaaaccgccgggctgacggcggttaccgacctcgatctggtcgagacccatgactgtttcaccatcgccgagatgatccaatatgaggcgatgggcctgaccccgcccggccagggctggagcgcgatcagcgaaggccgggttctgatgggggccgagctgccggtcaatccctcgggcggactgaaggcgcgcggccatccgatcggggccaccgggatttcgatgcaggtgatggcggcgcagcaactgatgggcgaggccggcggcatgcaggtgccgggcgccgctctggcgggggtgatgaacatggggggtgccgccgtcgccagctatgtctcggtgctggagcgcgtgaaatgagcgtgacccttgccagcgagcgggtgatgaaccttgccgaattcctcagccagacaagccgccgtgaccccgatggtctcgcactggtctggggcgaactgcggctgagctgggcggtgctcgacgcgcgcgtctcggcgatggcgctgcatctggcgcgggatcacggtgtgcagccgggtgaccgcctgttggtgcaatccccgaactgcaaccagcttttcgagctgatgttcgcctgtttccgcctcggcgcggtctatgtgccggtgaacttccgcctgatgccgcaggatgtggcaaagctcgcgaaaagctcaggcgcggtgggctttgtccatcacagcgatttcgcggaccatgccaccgcctgccgcgaggcctccgcgggccttaggttctgcactgaaatcaacattctcgaagccgggatcgccgcatatcaggatcagccctgcccgaatgcgccggtgctgcgcgacacaccctgctggctcttttacacctcaggcaccaccggactgccgaaaggggcgatcctgacgcatggccagatggcctttgtgatcaacaaccatctgtgcgacctgatgccgggcctgatgcatggcgaaaccgcgctggtggtcgcccccctcagccacggcgccggggtgcatcatctggcgatggtggcgcggggcgtgacctcggtgctgtctgacagcccgcgctttgatgcggcagagatctggcggctgatcgcccaatggcgcgtcgtcacgatgttcaccgtgccgaccatcctgaagatgatcgtcgaggccgaccccgaccgcacctttgacagcagcgcgctgcgctttgtgatctatgccggcgcgcccatgtaccgcgccgaccagatccgcgcgctcaatcgtctgggcccggtattggtgcaatattatggcctcggcgaagtcaccggggcgatcaccgtactgccgccgcatctccattccaccggccctgatttccgcaccggcacctgcggcctgccccgcaccggcatgctgatcgaggtgcaggatgcctcgggccaggcgctgcccccgggtgagaccggcgagatctgcgtgatcggccccgccgtggttgcaggctatcacgacaaccccaccgccacggctgcggccttccggggtggctggttccgcaccggcgatctggggcatatggatgccgggggctatctttacctgaccgaccgtgcctcggatatgttcatctcgggcggctccaacatctatccgcgcgagatcgaggagaagatcctcgccctcgatcatgtcgcggaatgcgctgttctgggcgtgccggatgcgcgatggggtgaggcgggctttgccatcgtggtgctgcgccccggcgtggtgccggatgaggcggccctgcgcgcgtccctcgcgggcagtctcgccagttacaaactcccccgccatatccggttcttcgaggctttgcccaagaccggctatggcaagatttccaaaaaagacctgcggcaggagctgcggcgacgcgggttcctgcccgaagatcagtgaaaggaatgcccatgcagggaaaagttgtcatcgtgaccggaggggcctccggcatcgggcgtgcagtggttgaccgcctctgcgccgagggcgcagtggccgccgtctttgacctgcccggcgcagcgatggacgcattggccgccgaaggccgggccggggtcgaaatcttccccctcgacatcaccgatgaggcggcggtgacagcggcggcggcggatctgcggcagcgtcacggcgcggtccatggcgtcgtgaattccgccgggatcgcgaccgtctgcccggcgatggaagtcgacacccagacctttcgccgcatcctcgatgtcaatgtgatcggctgtttcatcgtcacccgcgcggctgtggcgcagatggagggcgaaggcgcggtggtcaatatcgcctcggtctcgggcatccgcggcaatgaggggcggatggcctatggcgcctcgaaaggcgcggtgatcatgatggggaattcgctctcggtcgagctggccccgctggggatcagggtcaacacagtcgcgcccgggccggtcgatacgccgatggttctcgcccatcactcgcaggagatgcgggaaggctggctcaatgcattgtcgataaagcgctatgccctgccagaagagattgccgaagcgacgatcttccttctcgatagccgcagatccggcttcatcaccggacatacgcttgctgtcgacgggggattcttgtcgcgtggaacagtcaatccatgagggttccgtacggacagcctgacacaaattggatattcactgattgatggtgcgatcctttctctagagtagcaggatgcgctatgggtaaattcgcatcacagcgacatgagcacgcgcgctgatcgagaaaaggccaagcgtcatcgtgcagggcgatctcacccgaaccgaaggcgcctccctggcgcgaccatcggcattcccccggataagccggagcttatcgctggcgccggccaagacttcgatgccgcaagcttcgcggccggctttcgacacgcctccctcacaccgcacgtcgtgcagagatcgagattcggcgatcgacgggcaaacagaccaggcatcagggcgacgcgtggccccaggggcatcgcaaacgcatccggtagccttcggttggatcagaacggttggtggcattacccagtgttcatcgcggaccaacggtgtgtgccttcaggattgctgacgaacggcagggcttcaaactgtcaccttgaatgtcttcccgaaccagtcttcaagcagctgcttgtcataagcgaagcgctcggtgtcatttatggcgcccgggcgggacaggtagttcatgtcggagaggcgaacttcgtcctgcctgatgactttcccggcttcggtgagcgtatagcggaagcggatcctcggggcgtggtatcgcgcatgatgcggacatcgcgacagtcgaagttccaggactctaactcgccggcgagatcaatgtcgaggacttcgatcgtcaggtcctgccccaccgggaggtagcgatgcgccaggttcccgaactccgtgtcgaactccgtgtcgaactcggccagcaccgaggcacgggtacgctcctgccggaactcgcggtcgcggaacttttccgcggcgatataggtgacggtggcatcggccgccgccgtgccggtcgcgccgatcaacacaggcagcgcaagaactgcgaagaggaatagagccctgagcatgggaacccttggcatcatgggtctgcgggttcagtatggggagggcaagtgccggatgcccaggcgggcggtgggcggtttcagggtcgtccgggccaacggcggacgacatcagggcaatgtggccttgccgattttgcgctatggtttccgcgcaagtgcttccgatatgcttccgggcttcgggaagcccaatgcagagcgcctcccaaatcaggcttaaaactttgtaatataaagtataatctggtttcggggatgcagttccagaaattcttacttttgcatcaagccgaatggcacgatccggaaccccgtgctgcataagggatttccctttggatgcaaaccgcgcggaacgctgttcatcgacacgaaggggcctcggcgcagtcggagacctcgtccatatctccacccacaacgcgacacggctggcctataccgaggtgcaggccaaccatcgctggtggccttctgcgcgctccactggttccgcaatcatggcgacggaggccgacggacgatgaccggctcagcctgccgctctcaccgctgcgccaaggccagcccgataccgcccgcattcaggccctgccgatcccccgatcagacatgaccgcagaaatgaaaaagacagggccgtagccctgcccttatttggtgcagtcaaactgcttgttaacagccagcctgcggtttctgagccttcagtttcacagcagaaaacctgacagtcaatccttatttccggggggaggcacagcgcgatggcgagacagacctgccaccgggaagcagtgcaatccggtggaaggcttcagaaccgcaggcagaccgcaaccagacgccaacaaactctcgcttcatgcgaaacgctcaagaacggtcggtctaagtcacaccacggttgtggacgccgggtgctgccgctaggttagcttttgcgaagtggccacttcgctagcctgctcgtatccgggtgtggaccccggtcgagcaggcaaccgtctgcgatagctattgcgcgcatttgtagcgacacgattagagtatttcgttggcgtctgagggactaaaaatccgcacgccctgaaatgtttcattattataacatcaaggaccgcgtcatgcccaccacacttggaattgatctcgggacggcctccctgggctggagccttctggacgacgaccggcgcatcatcgacctcggggtgatcattttcagcgcagcggccggcgcggggcgggatccgcaatcgggggcgcccctggccgaaggacggcgcgaggcgcgctcggccagacgcaggcgcgacaggtatatcggtcgtcgctcggccctgctgggcaagctgatcgcccttggcctgttgccgggcgccccaccgccaaaggatcgcgaccgccgccgcaacgcgccggtcgtgaatgacgaaacccgggcgctggcggggcttgacccatatgatctccggcggcgggcgctgtcggaaccgcttgccccgcatgaaatcggtcgtgtgatctttgccctcaacacgcggcggggcttcaaatcgaaccgtaaggcggatcgcggccgcaacgaggccgacagcggcaagatcgcgcttgccggccaggccctgaatgccgccctcgacggacggacgctgggccagtttctggccgaacggatcgacgccgggcaaccggcccgtgtccgcatggggggcgagaaccaggcctatgatttctacccgcagcgcgaccatctcgaagacgaatttgcccgcatctgggaggcacaggcagccttcaaccctgcccttctgaccgaggccgcgcgggcggaaatccatcgcgtccttttctttcagcgcccgctgaaggagcctgtgatcgggccttgcaccttcgccggcatgaacggtgtgccgcaggacgaaaagcggctggccagggcgcatccgctgtttcaggaacggcgcctttatgaagaggtcaaccagttgcgcgttgtctcggccggagcagcggggcgcgaactgacactggatgagcgcaacgcactgatcatggccttgcgcgaaaagaagaagatcagctttgcgacattgggcggcaaagtcctgaaactggccgagggcgagcggttcaacaaggaaagcgagacccgcaaggagctgaccggggacgaggtcagggccgagatgtcggacaagaagcggttcggcaatcgctggctgcatttcccgctggagcggcagttgcagatcctcgaccgggtgcagaacgaggaaaaccccgaaacgctgctgtcatggctgcaagcggagtgcgggctggatgcggctgcggcgcaggcggtggcaaaagcgaacctgcccgaaggccatggccgctttggcgaaacggcaacgcgcgcgctgatcgctgcattgaaggccgaagtcatcacctatgacaaggcagctgccgtggcgggctttcaccacagcgaccatcgcagcggcgaagtgttcggcaccctgccctattatggccagatcctcacccgcgagattgcccccggcaagccggaatatggcgatgacctcgaacgccagttcggcaaggtgaccaacccgaccgtgcatatcggcctgcgccagttgcagaagctcgtgaatgcggtgatcgcccgccatggcaagccggaccggatcgtcatcgaactcgcgcgcgaactgaaactgaacgacaagcagaagaaagagcatcaggatcgcatccgcaaagacaccgccgccgcgcaaaggcgcagcgaagcgctgatcgaagccgaccgtcccgataccggcgccaaccgcgcgctgctgaagcaatgggaagaactgaaccctgccaatatgctcgaccggcgttgcccttattgcggcgagccgatcggcatggggcaggtctttaatggtgaggtcgatatcgaccatatcattccctactccatatcgctggatgacagcccctcgaacaaggtgctggcgcatcgcgcctgcaaccgcaggaagggcaatatgacgccctggcgcagatggggccatatcccggaggactgggaaaaggtctcgacacaggttgcgcggatgcatcggtcaaaacaatggcgctttggccccgatgccgaagaacggatggagcgtgatggcggtttcgcggcgcggcaactgaccgatacgcagtatctcgcacggattgccggaaaatatctgcgcgccctttaccccaccgccgaggatggccgcgtcgatgtcatccccggccgcatgaccgcgatgctgcgccgggtctgggggctggacagcctgctgcccgaccataactttgtggaaaacaagcattccaacgccccgaaaaaccggctcgaccatcgccaccatgcgattgacgccgcggttgccgccgtcaccagcctgtccctgatgcagggcatcgccacagcggccgcaagggccgaggcgcaggagctggatcggattttcgaggatctgccacaaccctggcatgggtttcgcgaagacctcggcgaaaggcttgcccgcaccgttgccatgcacaagcccgaccatgggcgcagcgccacgccttcacgccaccgcgatgtcacggccggcaagctgcacaatgataccgcctatgggctgacgggcctgaccacagccgatggcaagacgcccatcgtcgtgcatcgcgtcccgctgacctcgctcaagcctgcgcagatcgcggatccggccagcatcccggacgaggctctgcgcatggcgctttggctggcaacgcgggactgctccggcaaggccttcgaccaggcgctggcgaaatttgcggcggaacatccggtcttcaggggcatccgccgtgtgcgcctgcgcgagccgctgaatgtgatcccgatccgtgctgcctccgggcgcatctacaaggcctataagggggacgccaacgcccgctatgatgtctggcgactgccggatggcaaatggcaggcagatgtggtgccgatgttcgatgcgcattcccgcgacacaaccgaccggcgcccgcatcctgcagcaaaaaaggtgctcagtctgaaacagggcgatgtaatcgcggtcgagcgggactccggggctgcagacctcctgctgatcaagggcttcaaccagaacggccgcctgacgctcgctgcgccgaacgaggcaggcacattgaaggcgcgtgatgccctggccaatgaaatcgacccattcaaatatgtatatctctcgcccggatccctgaaaaaagcgcgcgcccgacaggtccgcattgatccccttggtcgggtcttcgaccccggcccccgcgaatagggaagcagagagatggatcgcatcgtcgatatcgccaccgatggcctccatctttcccttcatcgcggttttctgttggtggaaaaggaccgtagcgaggttggccgcgtcgcccttgacgacattcacgcgctgatcatccatgctcacggggtcacctggagcggcaccatcgtcgcggccctggccgagcggggcgcccccatcgtctggtgcaacgcagcccacagccccgtggccgtgaccctgcccctccagggccatcatgcacagaatgcgcggatgcaggcgcagatcaccgcctcgacgcccctgatgaagcagatctggcgccggatcgtttcggctaaaatcacgatgcagggcgcgctgctgacagcccgcgggatcagcggggcagaagcctttcccttcatggcaaagcgggtcacctcgggcgacaaggaaaacctggaggcccaggcggcacggcgctactggcccttgctgatgggaccagatttccggcgcaaccgcgatgcgggtgatgtgaatgcgctgttgaattacggctatgcggtgatgcgcgcgacctgtgcccgcgccattacagccgcaggcctgcatccgaccctgggcgtgcagcactcgaaccgtggcaatgctttcgcgcttgcggacgacctgatcgaaccctttcgcccgttggtggatgccctggccgaaagcatgatgcgcgaaggcatcacccggctggacccgcagcaaaaacgccgcttcgcccggctgatcgcctttgatctgcgcatcgccggcgagacttctccagttgccattgccgccacccggctggcgcaatccctggcaaaggcctttgagaccgggcgccccgacctgatcctcttcgacccgccatcctccctggactgggcggcgatcagtcgtgcccccgaggcggatacatgaagaaaccccaatcctcgcacctgagcggataccgtctgatgtggattttcgtgatgttcgacctgccggttggcagcaagaaggagatgcgggacgcgacgaagtttcgggaattcctgctggatcagggcttcgagatgagccagttctcaatctatgcccgtttctgcaatggcaaggacagttacgaatcgcatctgaaacggatcgagggtaatctgcccgagaaaggcgagatccatgtgctcacattcaccgacaaacaatatgagggaatcgtccgtttctcgagccagcgccgacgccgcccccgagaaaacccggaccaactggcgttgttctagttatgtcccgagtttggcatcagccagatgtgttgttttttcattttatgacaacgagatatcaacacatccagcttagccgttcagaaaccgcaggccaaccgcaacaatatcaatgcgaacgatccagacgttatgagcttagccgttcagaaaccgcaggccaaccgcaactttnnnnnnnnnnnnnnnnnnnnnnnnnnnnnnnnnnnnnnnnnnnnnnnnnnnnnnnnnnnnnnnnnnnnnnnnnnnnnnnnnnnnnnnnnnnnnnnnnnnnnnnnnnnnnnnnnnnnnnnnnnnnnnnnnnnnnnnnnnnnnnnnnnnnnnnnnnnnnnnnnnnnnnnnnnnnnnnnnnnnnnnnnnnnnnnnnnnnnnnnnnnnnnnnnnnnnnnnnnnnnnnnnnnnnnnnnnnnnnnnnnnnnnnnnnnnnnnnnnnnnnnnnnnnnnnnnnnnnnnnnnnnnnnnnnnnnnnnnnnnnnnnnnnnnnnnnnnnnnnnnnnnnnnnnnnnnnnnnnnnnnnnnnnnnnnnnnnnnnnnnnnnnnnnnnnnnnnnnnnnnnnnnnnnnnnnnnnnnnnnnnnnnnnnnnnnnnnnnnnnnnnnnnnnnnnnnnnnnnnnnnnnnnnnnnnnnnnnnnnnnnnnnnnnnnnnnnnnnnnnnnnnnnnnnnnnnnnnnnnnnnnnnnnnnnnnnnnnnnnnnnnnnnnnnnnnnnnnnnnnnnnnnnnnnnnnnnnnnnnnnnnnnnnnnnnnnnnnnnnnnnnnnnncagccaaggggttgcggttttatgagactcgagcttagccgttcagaaaccgcaggccaaccgcaacctgatcgacgagggtaactgggcgcgcattagcttagccgttcagaaaccgcaggccaaccgcaacactgagaacgctctcggagtgccccaagggagcttagccgttcagaaaccgcaggccaaccgcaacttgctcaatgtgtagattgagagatctttcagcttagccgttcagaaaccgcaggccaaccgcaacgaggcagcgaccgtgacgtaagtgccgtccagcttagccgttcagaaaccgcaggccaaccgcaactcctcgccggtgcgctgtgtcgcatgagcaagcttagccgttcagaaaccgcaggccaaccgcaaccagtatctgacgctggatctggattcccatagcttagccgttcagaaaccgcaggccaaccgcaactttgcctatgcagaggagattgccgcgccgagcttagccgttcagaaaccgcaggccaaccgcaacttataaaacttacggatcgacggcattaccagcttagccgttcagaaaccgcaggccaaccgcaacggtcagcagaagcagttcagcgaggctttcagcttagccgttcagaaaccgcaggccaaccgcaaccagtcgcgatgctgaacgctgcgcgagcgaagcttagccgttcagaaaccgcaggccaaccgcaactctgccgaggtggtggtgtctgagccatatagcttagccgttcagaaaccgcaggccaaccgcaaccaagatcatccgctggcagcatcccttccaagcttagccgttcagaaaccgcaggccaaccgcaacacgggcggcaaacagccagtgcaggagcgtagcttagccgttcagaaaccgcaggccaaccgcaactctggcgcgcgcggaatgccttttacaatgagcttagccgttcagaaaccgcaggccaaccgcaacacattcaagcgcagtgacttcaacgatgtgagcttagccgttcagaaaccgcaggccaaccgcaaccgtccggttccgtcctcgctggcgtcgaagagcttagccgttcagaaaccgcaggccaaccgcaacacgcttctgcctgacgacatggtcgctgagcttagccgttcagaaaccgcaggccaaccgcaacgtggtcggggtcgcccgtgataacctgcgaagcttagccgttcagaaaccgcaggccaaccgcaacggagacgacccacgcccgccggnnnnnnnnnnnnnnnnnnnnnnnnnnnnnnnnnnnnnnnnnnnnnnnnnnnnnnnnnnnnnnnnnnnnnnnnnnnnnnnnnnnnnnnnnnnnnnnnnnnnnnnnnnnnnnnnnnnnnnnnnnnnnnnnnnnnnnnnnnnnnnnnnnnnnnnnnnnnnnnnnnnnnnnnnnnnnnnnnnnnnnnnnnnnnnnnnnnnnnnnnnnnnnnnnnnnnnnnnnnnnnnnnngcttagccgttcagaaaccgcaggccaaccgcaacgagactgactaacatcaacacgcccaaaggagcttagccgttcagaaaccgcaggccaaccgcaacgacgagagggtagcggtgcagggcggcggcagcttagccgttcagaaaccgcaggccaaccgcaaccatgagcgcccgctggtattacgagaccgtcagcttagccgttcagaaaccgcaggccaaccgcaacagaaccgtcaccgatggtcagctcacggttagcttagccgttcagaaaccgcaggccaaccgcaacccccccccatctgcgccggtggctggcggtagcttagccgttcagaaaccgcaggccaaccgcaacgcagacgatatgcacaaaatgcagaagccgagcttagccgttcagaaaccgcaggccaaccgcaacggagaccggcagcagccgcccttcggtgacagcttagccgttcagaaaccgcaggccaaccgcaacgatcgcgtccatggcgcgcgcccaccgttcagcttagccgttcagaaaccgcaggccaaccgcaacgacgatggacaacgcgacttcgaccggcacagcttagccgttcagaaaccgcaggccaaccgcaacgacgagagggtagcggtgcagggcggcggcagcttagccgttcagaaaccgcaggccaaccgcaactgcgacaatatcgtgaccaacctgcgcctgagcttagccgttcagaaaccgcaggccaaccgcaaccccgcgctcctggatctggtctttgccgtcagcttagccgttcagaaaccgcaggccaaccgcaacccaatctgccggcggtgcgaaatcgactatagcttagccgttcagaaaccgcaggccaaccgcaacagtgggtaagtgcacacctgttcacacgccagcttagccgttcagaaaccgcaggccaaccgcaaccaagagaaaccaacggccacgagataggtaagcttagccgttcagaaaccgcaggccaaccgcaacnnnnnnnnnnnnnnnnnnnnnnnnnnnnnnnnnnnnnnnnnnnnnnnnnnnnnnnnnnnnnnnnnnnnnnnnnnnnnnnnnnnnnnnnnnnnnnnnnnnnnnnnnnnnnnnnnnnnnnnnnnnnnnnnnnnnnnnnnnnnnnnnnnnnnnnnnnnnnnnnnnnnnnnnnnnnnnnnnnnnnnnnnnnnnnnnnnnnnnnnnnnnnnnnnnnnnnnnnnnnnnnnnnnnnnnnnnnnnnnnnnnnnnnnnnnnnnnnnnnnnnnnnnnnnnnnnnnnnnnnnnnnnnnnnnnnnnnnnnnnnnnnnnnnnnnnnnnnnnnnnnnnnnnnnnnnnnnnnnnnnnnnnnnnnnnnnnnnnnnnnnnnnnnnnnnnnnnnnnnnnnnnnnnnnnnnnnnnnnnnnnnnnnnnnnnnnnnnnnnnnnnnnnnnnnnnnnnnnnnnnnnnnnnnnnnnnnnnnnnnnnnnnnnnnnnnnnnnnnnnnnnnnnnnnnnnnnnnnnnnnnnnnnnnnnnnnnnnnnnnnnnnnnnnnnnnnnnnnnnnnnnnnnnnnnnnnnnnnnnnnnnnnnnnnnnnnnnnnnnnnnnnnnnnnnnnnnnnnnnnnnnnnnnnnnnnnnnnnnnnnnnnnnnnnnnnnnnnnnnnnnnnnnnnnnnnnnnnnnnnnnnnnnnnnnnnnnnnnnnnnnnnnnnnnnnnnnnnnnnnnnnnnnnnnnnnnnnnnnnnnnnnnnnnnnnnnnnnnnnnnnnnnnnnnnnnnnnnnnnnnnnnnnnnnnnnnnnnnnnnnnnnnnnnnnnnnnnnnnnnnnnnnnnnnnnnnnnnnnnnnnnnnnnnnnnnnnnnnnnnnnnnnnnnnnnnnnnnnnnnnnnnnnnnnnnnnnnnnnnnnnnnnnnnnnnnnnnnnnnnnnnnnnnnnnnnnnnnnnnnnnnnnnnnnnnnnnnnnnnnnnnnnnnnnnnnnnnnnnnnnnnnnnnnnnnnnnnnnnnnnnnnnnnnnnnnnnnnnnnnnnnnnnnnnnnnnnnnnnnnnnnnnnnnnnnnnnnnnnnnnnnnnnnnnnnnnnnnnnnnnnnnnnnnnnnnnnnnnnnnnnnnnnnnnnnnnnnnnnnnnnnnnnnnnnnnnnnnnnnnnnnnnnnnnnnnnnnnnnnnnnnnnnnnnnnnnnnnnnnnnnnnnnnnnnnnnnnnnnnnnnnnnnnnnnnnnnnnnnnnnnnnnnnnnnnnnnnnnnnnnnnnnnnnnnnnnnnnnnnnnnnnnnnnnnnnnnnnnnnnnnnnnnnnnnnnnnnnnnnnnnnnnnnnnnnnnnnnnnnnnnnnnnnnnnnnnnnnnnnnnnnnnnnnnnnnnnnnnnnnnnnnnnnnnnnnnnnnnnnnnnnnnnnnnnnnnnnnnnnnnnnnnnnnnnnnnnnnnnnnnnnnnnnnnnnnnnnnnnnnnnnnnnnnnnnnnnnnnnnnnnnnnnnnnnnnnnnnnnnnnnnnnnnnnnnnnnnnnnnnnnnnnnnnnnnnnnnnnnnnnnnnnnnnnnnnnnnnnnnnnnnnnnnnnnnnnnnnnnnnnnnnnnnnnnnnnnnnnnnnnnnnnnnnnnnnnnnnnnnnnnnnnnnnnnnnnnnnnnnnnnnnnnnnnnnnnnnnnnnnnnnnnnnnnnnnnnnnnnnnnnnnnnnnnnnnnnnnnnnnnnnnnnnnnnnnnnnnnnnnnnnnnnnnnnnnnnnnnnnnnnnnnnnnnnnnnnnnnnnnnnnnnnnnnnnnnaaccgcaacgcgggtgccgccttacttcgtcagcatgacagcttagccgttcagaaaccgcaggccaaccgcaaccgagatctccaacacgcggcacacatcggcagcttagccgttcagaaaccgcaggccaaccgcaaccatcatggcatcgacatcaatgcgccagccagcttagccgttcagaaaccgcaggccaaccgcaaccaggcgctccgtgatctgatcgtgagcgtgagcttagccgttcagaaaccgcaggccaaccgcaacagttcgaggcggtcaggatcgcgctgcggcagcttagccgttcagaaaccgcaggccaaccgcaaccgcggcagataagtgccgggctcggcatttagcttagccgttcagaaaccgcaggccaaccgcaacgcaatatcccggcgatacggcgggcaaaaaagcttagccgttcagaaaccgcaggccaaccgcaactctggcgatcatatggcggcccaggctgaaagcttagccgttcagaaaccgcaggccaaccgcaacgcggaattaggggggcatccgattcccggcagcttagccgttcagaaaccgcaggccaaccgcaactgatcgatctcgcccgagggcggatcggcgagcttagccgttcagaaaccgcaggccaaccgcaacgaaatactgcgcgctgaaaagggattggatagcttagccgttcagaaaccgcaggccaaccgcaacaagagcaaggatctccatgatctcggccagagcttagccgttcagaaaccgcaggccaaccgcaactcatcaagcgccgccgcccgcaatggcgagagcttagccgttcagaaaccgcaggccaaccgcaactgaagaaaacgaacggcgtcaggaacagatagcttagccgttcagaaaccgcaggccaaccgcaacaagacagcgcgccatgcggaagaagcgaggagcttagccgttcagaaaccgcaggccaaccgcaaccgcattaacataggccagcgccaaaccgtcagcttagccgttcagaaaccgcaggccaaccgcaacactgatgctcatcgatgacatcaggcagcatcatattgaaggcggccctcctgatcggctttcttgttgttttgacggtggcggatttttttgacacagggatcggaagagggttgggcctgtttctctttggactgcctgctggaatgtcagcgcttctcttcgtcgccaataccgtacgccccgacgatgaggcgggcgctgtcagcctgtttccatcggccattgtcaggccggaggggcttgccgagactttctgctcagcgagatcaccgctttcaggccgccttcggggcggtttttcaggacgatttcgccctgttgcgcctgaatgatggattgcacgatggcaagcccaagacccataccgccggtctcgcgcgagcgcgattcctctaagcggtagagcggctcgaagacatgggccaattcctcttcgggaatgccggggccggagtcgctgacggtgatttccacgttctcggcggtatcggagatggccacctcggcgcgttcaccatatttcaccgcattttcgatcagattggtgatagcgcgtttcaacatcgccgggtcgcattcgaccacgatgggattgcccgccatccagctttgtctggcgctctggtcagctgtcggggtcgccatcgtgaccggcatgccggcatcggcgaaatcatcggtgatgctcgacagcaaagccgtcatatcggtccggcgccattcgggtttcttcgattgcgccaccgcaagctcaagcgtcgcggcgaccatcgcgtcgagatcggctatcgtggccagcatccgctcgcggtcctcggtctcgtcgatggtctcgatccgcagccgcaaaagcgtgagcggcgtgcggaaatcatgggaaatcgccgccagggtcctggtgcggtcatccatcagggcgcggatgcgcttttgcatcccgttgaaggccagcgcggcctgtttggtctcggtggtgccgaggaccggcatcggcggcgcattcaggttctctcccagccggcgcgaggcctccgaaagctcggccaggggtcggctgacgcgccgcaccgcccaggcagaagccaagaggatgacccccgccatagccagcatcgagaagaagaacccgttcgacagcgtggcgcggtcgccgggcaggccgccggaaacattcagccagcgcccgtcttgcaagggcaaggagacatggagctgcgattctgcctgacccgaggcgccaccctccgagtggccatcctccgagtcgtcatcctcgtcatggtcattttcttccgctttttctttgtgttcctcagcctctttcgccgcctcactcagggccttggtcgggctgtcgtcactgtgctcgtcggactccttgccgctgtgatgccctgacgttccgcgggccttttccgagccagatccagagcccgagcccgagcgcgaaatccgcaccaccggctgctgatccgcaggcagcgcaagccgcctcgccaggagctccgccagcgccgccgccgccgccgcgtcgttattgggctgttctgcggtcatggggctgttctcgatccgcaccacgaaagtctcgtcccccgaataggcgacgattcgttcctgccaatcgggcggcgcctgcatcaccagctgcgcgagattggagatccggtcggcaatcgccacgcccccgacgatgcggacggtttcctcgcgatccgccctatagacccaggcgcccaccgccgtcgacaggaccaggcccgccagaagaatggccattgtctggccgaaaagcgagcgcggaccaaagctcattgcagggtctcgacctcggcggagaagatataacccccgccccagaccgtcttgatgatccttggctcattggggtcgggttcgatctttttgcgcaaccggctgacctgagtgtcgatgctgcgatcaaacaccccggccgagcgcccccgcgccagatcgagcagctgatcgcggctcagaacctggccgggccgctcgatcatcgccatcagaagatcgaattccccggtgctcagggcaacggtgacatcatcctcattcaccaattcccgcgcgccgctgtcaaagacccaccgctcgaagcgataacgttgcggccgccgctggtcgccggtggtatcgacattgcgcgtccgccgcagaaccgcacggatccgcgcgatcaattcgcggctgccaaagggtttcgaaatatagtcatcggccccgagctcgaggccgaccacgcggtcgatctcgtcgcccttggcggtgagcatgatgatcggcacattcgattcggcgcgcaaaacgcgaaacagcgtaaacccgtcctcgcccggcagcatcagatccagcaagatcagatcgggcctagccgtggccaacaccttgcgcatcgcgacaccattgcctgcctcgctgacgcgaaagccttcgcgcatcagggcgcgcgacaccaattcgcggatttcgcgatggtcatcgacgatcaggatatggggttctgcgctcatggccgcatagctaaagcattctttggccagcggggattctaaattgaaacagactgtgacacccggcccgactgccacacctggt

SEQ ID NO: 3482 - DNA, 23231 bp, synthetic construct
  source 1..23231: mol_type = other DNA
  misc_feature 1..23231: note = Synthetic
ctctcgctgctgatgctcgccggtatcgcgctgacgggcggcggcctgtggctgctcggcaagcgccgcgaccgcacgcgggcgctgctgatgatcgccgcgggcctggtgatgttcggcaatgtcgcgatctgggccgtaccgctgggctgaggccacacctttagaccgttcaggccgagcgaagtcgaagccatacgctgaacgaagtgaagcgcctcgcgccgctcggcggagcccttcgccttcgctcagggtgaacggagggagggattgccgactaacgaatgggcgaatccggcgacaggcgcatgtcgagatagttgtcgaccgacttcatgagctgatcgagttcatgctcgaagaagtggttggcgcctctgatctcgtcgtgatggatggtgatgcccttctgcgtccgcagcttgtcgacgagcttctgtacagcgcctgccgtcaccacctcgtcggacgtaccctgtacgatgatgccgctcgccgggcaaggggcgaggaacgagaagtcgtacatgttcgcgggcggcgcaacggagatgaagccgcgcacttcggggcggcgcatcagcagttgcatgccgatccacgcgccgaaggagaagccggcgatccaggtggtctgcgcctccggatggaagctctgcacccagtcgagcgccgcagccgcgtcggacagttcgcccacgccgttgtcgaacgtgccctggctgcggccgacgccgcggaaattgaagcgcagggtcgcaaagccgcgctccacgaaggtcttgtagagtgcctgcgtgatccggtcgttcatcgtgccaccgccctgcggatggggatgaaggatcatggcaacaggtgcgcgcggacggggcggggggctgaagcgcccctccagtcgaccttcgggaccggggaaaatgacgtctggcatggcacctggctggcagcaaaaggatcggccacgcaatggctggtggcgctggaaaggaggcctatatagaagcgaccgccgatttagcaataaaatgagtgccgccgcccttgaacgagaggctttacctcgatcacgccgccaccacgccggtttccgtcgccgcccggtcggcgatgatggacgcactggagcgctggacgaacccgtcttctccgcatgcggacggacgtgccgcccgcgctgtgctggaggacgcgcggcgccgggtcgcggcggcgctggactgggacggaacggtgatcttcaccagcggcgcgagcgaggcgatcgccattgcactcgggcgggcgaaggcgcggcacgtcgcgacctcgccgatcgaacatgacgcggtcctgcgcgtgacgccctctgcgcggcggcttgccctcgacagccgcggcgtgccggtgatccccgacgacctgcctgacgacgggcgcggggtgctgctggccgtccagcatgtcaataacgagacgggcgtgatcctgccgctggcccggatcggcgcgacggtgcgggcggcgggcggactgctgttcgccgattgtgcgcagagcgcaggtaagctgcctttgcccgacgccgagatgatcgcgatcagcgcgcacaagttcggcgggccgcccggcgtcggcgccctgctgatccgtgacctgcgccatatccatccgtcgggtgggcaggagcagggctatcgcgcggggacggaaaacctgcccgctattctcggcatggcggccgcgctggaggacgcaccggactggctggaagaggcgacggagctgcgccgcgcgctcgacggcgcgatcgtcgacgcgggcggcgaggtggtggccgccgccagcccccgcgtgtcggccatcgcatcctatcggatgccgggcgtgtccgcccgcgcgcagctgatccagttcgacagcgcaggcatctcggtttcagcgggcagcgcctgttcgtcgggtacgctgaagaccagccatgtgctgaccgccatgggctgggatccggtggcggcgggcgaggtggttcgcgtcagcttcggtccatcgaccgatgccgccgcgatcgatcgcttcatgaccgtgtggcggacgatcgcccgggggcggggctgatggccgagcccgcctatctcgattaccaggcgacgacgccgctggcgcccgaggcgttcgaggcgatggtgccgctgctgcgcgaccagttcggcaatccgcacagtgcgcaccgcatgggccggcaggctgccgccgtggtggaggccgcgcgtgacgcgatcctcgcggcgctggcgatgccgggcggccggttcgtcttcacgtccggcgcgaccgaggcgctgaatatcgcgatacagggcgccgcgcgcgccgcgccgccggaccgacgccggatcgtgacgatcgtgaccgaacatgccgccgtccgggacacagtgctggcgctggagcccatggggttcgaggcggtgctgctgccggtcgggccggacgggctggtcgatcccgcgactgcggcgatggagatagacgggcgcacggcactggtcgccgtcatggccgtcaacaacgagatcggcgtgatccagccggtcgacgcgctggcgcgtctggcggcggatgcgggcgtgccgttcctgtgcgatgccgttcagggcttcggtcgcgtgccgttgccgcaggcggcggacatgatcgccgtcagcgcgcacaaggtccacgggccgaagggtatcggcgggctctggttgcgcgacgggttcgacctgccgccgctgatgcacggcggcgggcaggaaggcgggctgcgctcgggcacgctctcgcctgcgctctgcgccggtttcggcgccgccgccgccctgctgcgggatcgtcggggggaggacgcggcgcatgtcgcgatgctgtgggacagggcacagggccttttcgcggactggaccgtcaacggcagcaggacacaccgttacccgggcaatctcaatgtgcggcgggaggggctggatgccgcgcgcctgctctcggaatgccggaatgtctcattttcgctcggttctgcttgtgccagcggctcagggcggccaagccacgtattgcaagcccttggattgtcgcagaaagaggcaaggtcctcggtgcggatcggattcggccgatatacgacgccggaggagttggagagggccgcgaaggcgatcaacgaagcggcggcccgtcaactggtgctgccggcataggagtcgcacgcgttcatgccctgggttaccttcatcagtgccgacggccgcacccgcagtgaggtgttcgcgcagcccggccaggttctgctcgacgtggcgcaggccaacgggcagccgctggagggcacctgcgaggggcagatggcctgctcgacctgccatgtgatcatcgatcccgccgacttcctgaagcttccgcccgccagcgaggcggaggaggatatgctcgaccttgccgccgccgccacccgcaacagccgcctagcctgccagatcgtgatcggtgaaacctacgatacgctgaccgtgcgcatgccggcggaatgccggaacatgcagggaatgtagtttttgacaatctttgccatgaatggcaggatttccggcatggcgacgatgaacatatcccttcccgacgagatgaagaaattcgtcgaggcgcaggtggcgaccggcctttacgccaacgccagcgattatatgcgcgacgttctgcgcgaccggatgcgcgcctatgaggatttgctggaagcccttcgcgtgggcgaggaaagcgggatcagcgaacggacgccggaggagattgcggaagccgctctggggcgtcaccgttagggtgcgttgtcgtccgcatcctgcacgaaaggatggatcctttgcgccatctgtcatgatcttgccatcggcggcgctttcccccatatgcccgcccgggagtcgggcgggcgcggtcgtcgccaacctggtcaggtcctgacggaagcagccacaacgatttcgccgcgggtcgttccggctcccaccgcgcttcgacagccccgtgcttaacgggtacataggcgccatgaccgattcccctcagccctatcgcgtgcttgcccggaagtaccggccgcgcaatttcaacgagttgatcgggcaggatgcgatggtgcagacgctggcgaacgcgatccgtcgcggccggctggcacatgccttcctgatgaccggcgtgcgcggcgtgggcaagacatcgaccgcgcgcctgatcgccaaggcgctgaactgcgttggtccggacggacagggcggcccgaccatcgatccctgcggcgtgtgcgagccgtgccgcgccatcgccgagggccgccatatcgacgtcatagagatggacgccgccagccataccggcgtcgacgacgtgcgcgagatcattgaggccgtgcgctacgccgccgtttcggcgcgttacaaggtctacatcatcgacgaagtccacatgctgtcgaagaacgcgttcaacgcgctcttgaagacgctggaggagccgcccgagcatgtgaagttcctgttcgccacgaccgaggtgaacaaggtgccggtgaccgtgctgtcccgctgccagcggttcgacctgcgccgcattccggccgaaaagctcgctgcgcacttcgcccatgtgatcgaggcggaagaggtggcggccgagccggaggcgctggcccttgtcgcgcacgcggcggaggggtcggcgcgtgacggcctttccatcctcgaccaggcgatcgcccatgccgatacggagggggaccggccactggtgacggcggcgcaggtccgcgacatgctgggcctgtcggatcgcggcgcggtgcggcggctgctgggcctcattctcggcggacagccggggccgatgctggcggcgcttgccgaacagcacgatctgggcgtcgagccgctggcgctgatccgggggctcctcgaactggtccacgcgattaccgtggcgaaggcgggcaggggcgtcgacgatccgggccagtcggccgaggagcgggccgctctggaggaatgggcggaaaagctgggctttggtcccctccatcgcctgtggcagttgatgctgaaggggcatgacgaggtggccgccgccgtgctgccgcgcgaggcgtgcgagatggcgctgctgcgcgccgtctatgccgcgagcctgcccgatcccagcgatatcgcccgccgcctgaacggcaccggcgatgcgccgtcgccgtcggtcgaagggcctgccggtgcgccacacgaagcggcgccccacgccgtgccggaagccgcggctcctgccttgccggacagctttcccgcgatggtcgacatgctgtgggcgcggtcgggcctgcttgcggacgaggttgagcatggcgtacggcttgttcgtttcgcgccgccggagctggagatcacggccggaggcatcgcgaccgacgatttccgccgccggctggtcgaagcgctgaagcaggcgacgggcgaaatctggcaggtcgcgctggtcccggccgaagggcagccgaccctgtccgagcagaaggaacgggcggtcatgaccgcccggcaggcgataatggatacccccgtcgcacaggcggcgcttgcggccttcccggacgcggaactggtggcggaagacgacaatgaacaatggagcgcgagcgcatgaaggatctgaatgaaattctgggcatggccaaccgggtccaggaggagctgaccaaggcgcaggaaaatctggatcggcttgaggtcgagggcgtgtcgggcggcggcgtcgtcagggtgaaggcgacggcaaaggggcgcatcgtcggcgtttcgatcgacgacagcctgctcgcgccgtcggaaaagcagatgctggaggacctgatcatcgcggccttcaacgacgcgcgcaagaaggcggacgaggtgagccaggcggaaatgagcaagatgaccagcggcctgccgctcccgccggggttcaagctgccgttctgacgggttcggacggttcgttcgtcctgtgttaacgtggaagggcgtacgcaacccggattgattgtcggcctgattgattgctgggagccggacgcccatatgggtccgcacaatgatcaccggttccctcggggccgctgatccgacggagactcgatgactacgacctttcctctcctccccctgcgcgacattgtcgtgttcccgcagatgatcgtccccctgttcgtgggccgcgacaagagcgtcgtggcgctggaaaaggcgatggaggccgacaaggacatcttcctggtgtcgcagctcgacccggccgaagacgatcctgaccgtgattccctgtacgacaccggcgtcgtcgcgacggtgcttcaattgctgaagctgcccgacggtaccgtgcgcgtgctggtcgagggcaagcagcgggcgacgctggaggcggtgatcccggccgagggttatctgcgggccgaggtcgatgtcctgccggaggtcgtggccgaagggcctgaagcgtccgcgctgatgcggtcggtcgccgagcagttcgagaattacgcgaagctcaacaagaagctgcccgccgaaacgccggtgcagctgcgcgagatcgaggatgcaggcaaactgtctgacgccgtcgccgccaacatcaacctgaaggtctccgacaagcaggcgctgctggtcgagaccgatccggtcaagcggctggagatggccttcgccttcatggaaggcgagctgggcgtgctgcaggtcgagaagaagattcgcggccgtgtgaagcggcagatggagaagacccagcgcgaatattatctgaacgagcagctcaaggccattcagcgcgaactcggcaatggcgagggcgaggaagccgacgagctggccgagctgcaggtcaagatcaacaagctgaagctgggcaaggaagccaaggcgaaggcgaacgcggagctcaagaagctcaagacgatgcagccgatgtcggccgaggcgaccgtcgtgcgcaattacctcgacgtattgctgggcctgccgtggggcaagaagagcaaggtcaagaccgacctcaagagcgcgcaggaaatcctcgacgccgatcatttcgcgctggagaaggtcaaggaccggatcgtcgaatatctggcggttcaggcgcgcaccaacaagctgaaggggccgatcctgtgcctcgtcggtcctccgggcgtcggcaagacgtcgctcggccgttcgatcgcgaaggcgacgggccgcgagttcgtgcgccagtcgctgggcggcgtgcgcgacgaggcggagatccgggggcaccggcggacctatatcggctcgctgcccggtaagatcgtgtcgaacctgaagaaggcggggacgatgaacccgctgttcctgctcgatgagatcgacaagctgggccaggatttccgcggcgatcccgcgtccgccctgctggaagtgctcgatccggagcagaacgcgaagttccaggaccattatctggagatcgacgtcgacctgtccgacatcatgttcgtgacgaccgcgaacagcctgaacctgccgcagccgttgctcgaccgcatggagatcatccggctggaggggtacaccgaggacgagaaggtcgagatcgcccagcgtcacctgctgcccaagcagatcgaggcgcatggcctgaaggccggcgagttcgaggtgaccgaggacgcggttcgcgacctgatccgctattatacccgtgaggccggcgtgcgtacgctggagcgggaggtggcacgcctcgcccgcaaggcgctgcgcaagattctggaaggcgcgtacaagaaggtcacgatcacgccggaaacgctcgcggactatgcgggcgtgcgcaagttccggcacggcgtgggcgaggaagagaaccagatcggcgccgtcacgggtctcgcatggacagaagtcggcggcgaactgctgacgatcgaggcggtgaccgtgcccggcaagggcatgatcaagacgaccggcaagctcggcgaggtcatgaccgagtcggttcaggcggcgttttcctacgtgaaggcccgctcgcccggctatggcatcaagcccagcatcttcaaccggaaggacatccatatccacctgcccgagggcgcggtgccgaaggatggcccgtcggcgggcatcggcatggtgacctccatcgtcagcacactgacgggcgtgcccgtgcgcaaggatgtggcgatgaccggagaggttacgctgcgcggccgggtgctgccgatcggcgggctcaaggaaaagctgctcgcggccctgcgcggcgggatcaagaccgtcctcatcccgcaggaaaacgagaaggatctggcggaaattccggccaacatccttgacgggctggagatcgtgcccgtctcgcatgtcgatgaggtgcttgccaaggcgctcgcgactccgctcgaggcgatcagctggaccgaggaagacgacctggcggcgcagcctccgatgagccacggaagcgacggagaggccgccatccggcattaggatcggatcgtaagggcccgtaattgctgaaaattatgtcggggaaagcggcttctgtcgctttccctttgacagagttaaattcctcggcctttatgtcgcgcctcacgccgattccaaattcattactcctgttaaccaccaccaccactaaaaaacgaagggggttccaaaggcatgaacaagcaggatctcatcagcgcggtcgcagaaggcagcgggctcagcaagagcgatgccagcaaggcggtcgagagcgtgttcgattcgatcaccgcgaccctgaagaagggcgacgaagtccgtctggtcggcttcggcacgttttcggtgacgaagcgcaaggcgtcgaccggccgcaatccgcgcaccggcgagacgatgaccatcaaggcgtcgagccagccgaagttcaaggcgggcaagggcctgaaggacgccgtcaactgatccaggcggccggtgcgcctgaccgcaccggctgatcgctccggtcccggcgtgcaggccggctgaccatcgggagcatggatcgacgctgacgccgtgaaacggccggaacgtcgcggtgcttgcgcggcttttccgggacactgggcggggatcgatctccgcccttttcatttgccggcaccggggtgaaaactacccttgacgctggccgggggcgggctctatgagccgcttctctcggggcaaaagcccctgcggcgatcgtagctcagttggttagagcgctggtttgtggtaccagaggtcgcgggttcggatcccgtcgatcgccccatttccctccagacaatctgcgcacaattatctggtctgcaccgcattacagcaccgttcgctcgcatagcggtctgggctatagaccgccagcatcggaaatggcggcgatgggctcaatccactcacaaacataccggtccactcggcggggggctcagtcatcgattgcgttatgccgggcgatatcggcagcaactgcaatatcgacgaatgcatggtcggcggctcggttctgccgtatgataaaataagtcattgattataagcaaattattcgagatctttcattcatggcttctcgggattgatcaagatcggggggtgtcgatggtcccgacacatttggcgatcaggcaggcaagggcgggcatcccgcttcgactgccattttcatcacgaagctctggaagaccgtagttaatacaagaaaatagccaagaaactcatggcaatatcgagcacagctcgaatcaataaattgacgggatatgaaaaaggcggggccgtggccccgcccttatttggtgcagtcaagctgcttgttaacagctggcccgcgatctctgagaagccgttatgctttcaaagcggtggcaaagtcaattgccctttgcgttgaagttcatacaatggacgagggggacataatgcggcgactgggacttgatatcggcaccaacagtatcggctggtgcctgatcgaagatgatgcgcgtatcgtcgacatcggcgcgcgtatcttcagcgacgggcgtgatccgaaatccggtgcttcgttggcggttgatcgccgggcagcacgcgccatgcgccgacggcgggatcgctatatcggtcgccgctccgcttttctcgataagctcatccattttggactgatgccggccgatgccgaggaagcaaagctggtcgcggagcgcgatccctatgcattgcgcgccagggcgctggacgagaagctggagccatatgacatcggtcgcgcgctgttccaccttaaccagcgacgcggtttcctgtccaaccgcaaggccgagcgacggacaaaggacaatgaggacgggaagatcgccaatggagccaaagcgctggatcaggcaatggctgaggcaggcgcggatacgctcggccaatttctggctggacggcacgaaaagcgtgtgcggctcaacggtgagagccaaggctatgacttctacccgcagcgatgccacatcgatgatgagttcggccgcatctgggaagagcaggccaaacataattctggcctgatgaccggggaagcgcgggcggcattgcatcgcatcctcttttatcaacgaccgttaaagacgcaggaggtcggcgtatgcctgttcgccggacgatacggcattgcgcgtgatgaacgccgcctgcccaaggcgcatccgctgttccaggagcggcgtctctatgaagaggtcaaccagcttgagatcacggcgcccggagaggcaccgcgcaaactcacgatcgaccagcgcaatgcactcatcgccgtgctgcgcgacaagaaagatgtcagcttcgacaagctggcgcggacgctgaaactgcagccggacgagagcttcaacaaggcaagcgagacacgcacttcgctgcgcggcgatgaggtgcgggctgttctgggcgacaagaaacgcttcggtaaagcgtggccgcatttctcgccccagcagcaatggatcatcattgaaaagctgatggacgaggaagatccgtatgcgctcgacgatttcctgatcgggaaatgtgggttggatgaggatcgcgccgcccaaattgccaaggccgctttgcccgaggggcatggccgactgggggagacggcgacgcgcctcattctggaaaagctgaaggctgacgtcgtgacttatagtcaggcagttgagcagtgcggctggcaccatagcgacgaccgcaccggggaggtgctggacagacttccttattatggcgaactgctgtcacgcgacattccccccggcagcttcgatccggcggatgcggatcagcccgaagcctattggggcaagatcaccaaccccacggtccatatcggccttcgccagcttgaaaagctgatcaacgcgatcatcgcggttcacggccgccccgaccagatcgtcgtcgaactggcgcgcgacttgaagcttaacgagaaggacaaggaggaacacaaccgccgtattcgcaaggatacggcggatgcccagcgcaggtctcgtgccctattggggctggacgcggacggcaatccgatcggcgaccggatcgctgatgatacgggcgcgaaccgggcactgcttaaactgtgggaggaactcaatcccggcaatcccctcgatcgccgctgtccctattgtgcggaacccatcagtgtgcaccagctgttcacggaagccgacgtcgatcacgtcatcccctattctcgatcattggacgacagtgcatcgaacaaggtcgtcgcgcatcgccattgcaatcgcatcaagggcaatcgtacgccgttcgagcgctggggacatgacgaagagcgctgggacaggatcgcggcgcaggtggcgcgtcttcaccggtcaaagcaatggcggttcgggccggatgccatggcgcgcgtggagaaggatggcgggttcctcgcgcgtcagcttacggacacccaatatctgtcgcgtctggccggcaaatatctgcgtagcctctatccgaccaaggatgagggcagcgtctatgtaatccccggccggatgacggcgatgctgcggcggctgtggggcctcaacagcctgctgcccgatcataattatgtcgagaacgctcatagcggcgcccccaagaaccggctggaccaccgccatcacgccatcgatgcagcggtcatcgcggtaaccacgcgcgggctgctgcaacggattgcgcggacggcggggcaggcggaggatcgtgacctcgaccggctgttcgacggactggaccagccatgggacggttttcgggaggagttgggcgagaagctgatgaggacgatcgtcagccacaaggctgatcatggccgaaagggcaagccgttgcccggccgggatgtgacatcggggcagcttcacgacgacaccgcctacggccttacgggcgcatttggcgttgacgggaagacgccgatagtcgtcaagcgggtcaactttttcagcctggagcccaaggacattgcggatcctgttcgtattcgggatgaaacgttacgcaccgcactgcaggaagggaccgcccgtctgaacggcgtcgcgtttcagcaggcgttggtccgcttcgccaacacccatccattgtttcgcggtattcgtcgtgttcgggtgcttggcgaacgccctggaaccccaacgcttaacgttattccgatcaaggaccggaacggccgcgcattcaaggcatataaagggaatgccaatgcgcggttcattgtctggcagctgccggacggcaactggaagcatgcaactgtttcagtcttctccgctcatcagcgcgattatgttctgcctcggccccatcccgccgcgaaaaagatgctggatattcgccagaacgatcttctcgcgatcgagaaggatggtgcgcgcgaaatcgtgcgggtcgtcaaattctccgaaaaaggccaggtcactttggcggcgcacaatgaaggcggtgctttgaaagcacgtgacgcggcggctaacgatatcgatccgttcaaatatgtggcaccgaccgccggcggcctcaggaaactccgtgcccggcaggtgcgcatcgatccgctgggtcgcgttttcgaccccggcccgcgcgattagaaacggcaagggctcaggcgcatggatcggatcgttgatgtcgccacggacggacgccatttgtcgctctatcgcggtttcctgacggtgtcggaagatcggcaggaagtgggacgcatagcccttgacgacatacacgccgtcatcgtccacgcgcatggcacgacatggagtgccaacctggtcgctgcgctggcggaacgcggcgcgcccatcgttttctgtgggcccaaccatagccccgtcgcgatgacgttacccatagacgggcaccacgcccagaatgcgcgtttccgcgcgcaatgggatgcctccaaaccgctcatgaaacagctttggcgaaagatcgtgtcggccaagatcgtgatgcagggaagcctgcttgccgcaaggggcgtcgatggagcggcggctttccccttgatggcgcaacgcgtgaaatcgggagattccgataatctggaggcgcaggcggcgcggcgctactggccgttgttgatggggcgggcgttccggcgggatcgcgacagcccgggcgccaatgcgctgctcaactatggctatgcggtagtgcgggcgaccgtcgcccgcgctgtagtggctgcggggttgcacccgaccatgggcatcaaccacgccaatcgcggcaatgtgctggcgctggcggatgatcttgtcgagcccttccggccactggtggacgcggccgtcgtcgggctggtggagcagggaatcgccactctcgacacgcccacaaagcaacgctttgcacggatgatcgcattcgatcttcacatcggtggagaggcgtcgcccgtttccattgcagccgtccggctggcgcaatcgctcgcccgcgcttttgaaacgggcaggccgggcttgcagcttttcgatccgccgacgcccatgcaatggtcctccatcgtccgtgccggaagctcggtggaggacgccggagcgtgaacggcgcatcctatctcagtggatatcggctgatgtggattttcgtgatgttcgatctgcccgtggggacaaagaaggagatgcgcgatgccacgaagtttcgcgaatttctgctggatgaaggcttcgagatgagtcagttttcggtctacgcccgcttttgcaacggtaaggacagtttcgattcgcatttgtcacggattgaacgaaacctgccggaaaagggcgacattcacatcctgacttttacggaccggcagtatgaaaacatcgtccgattctccagtcagcgcaggcaacgcccacggaaaaatcccgatcagttggcgatgttctgattctcatgatcagaaaatgccggccagatggatcaattccgattttgttttcaatcggttatcgatgcatctggtttagcagttcagagatcgagggccaaccgcaacaaaggaaccgagggcatatggcggcgcgtgggtttagcagttcagagatcgagggccaaccgcaacagcatccgcgcaatgcggctgtcgtcgttgggtttagcagttcagagatcgagggccaaccgcaacattggaaatgaattcttcgcgggtcatcaggtttagcagttcagagatcgagggccaaccgcaacgacacgcgctttctctggatcgggggcgccggtttagcagttcagagatcgagggccaaccgcaacaaggatttccgtgggttgttttccactgtcggtttagcagttcagagatcgagggccaaccgcaaccgatgccccgcgcaccttctctgacgtcatggtttagcagttcagagatcgagggccaaccgcaacgccagccgggagagtgagttgcgggcatctggtttagcagttcagagatcgagggccaaccgcaacgacatatacgtgtggggcgcgctgcatcaggggtttagcagttcagagatcgagggccaaccgcaacatcagcgcggatgcgccccgccggatagataggtttagcagttcagagatcgagggccaaccgcaacacaccgccgtcatgacacgaacgctcaccgggtttagcagttcagagatcgagggccaaccgcaacttatcgccccacgggtcgaagtggcaggcgggtttagcagttcagagatcgagggccaaccgcaacgcgatgccccgcgcaccttctctgacgtcatggtttagcagttcagagatcgagggccaaccgcaacccttcgcctgcaacaccatcgagcgaagcgggtttagcagttcagagatcgagggccaaccgcaaccgacagcaccgctggtgcgcgcgtcgtgggggtttagcagttcagagatcgagggccaaccgcaacgtcaccggcgcgcatgagggcgccagcatcggtttagcagttcagagatcgagggccaaccgcaacacggccgccagccgagcgcggcggccgcgaggtttagcagttcagagatcgagggccaaccgcaactcgaggaccagttgatcgccgccgcgacggggtttagcagttcagagatcgagggccaaccgcaactctacgtgtcccggcctgcttcttcgcgggggtttagcagttcagagatcgagggccaaccgcaacatcggtgcggccgggacgctgttcgtcaatggtttagcagttcagagatcgagggccaaccgcaacagcgcgatctcatccaaagactttaccagaggtttagcagttcagagatcgagggccaaccgcaaccctcgaccatgtcgacctcgtccgagcgcaggtttagcagttcagagatcgagggccaaccgcaaccttatttgtatgccgacaggaaccggcaagggtttagcagttcagagatcgagggccaaccgcaacatcatcggctggaagaaagagtactatttcggtttagcagttcagagatcgagggccaaccgcaacaggtcgttaccagtgacgacggccattccggtttagcagttcagagatcgagggccaaccgcaacagcgtcgcggtaaggtcagtgttcgcaggaggtttagcagttcagagatcgagggccaaccgcaacatgacggaccatcgcaagtggtttccgggcggtttagcagttcagagatcgagggccaaccgcaactcctgcagcggcgtggtcgcgggcgcgaacggcttagcagttcagagatcgagagccaaccgcaacccgtgccgacatcccccatgccggcgcacgacaaaaccgccctcgcgcgccttcggaacgggctcgtgcaatcgcggctggcctcgtgcccagccagccgcgcgcatcacaaatctcccgcccggaaagctcaaccacggcttagaatcgatcagacagacttaatcgcggggaacgcgggccgaggcggccttgcccgccgcgatcagtgtttccccggcgcgggtcgcggcctcgccggcgagacgggttgcacgctcgggtatccgtgcgcgctctatggcatcacgtgccgctacggctgcctcgcttgcccgcgccttcaccgtgccggggatgtccgcctcgacgagggcctcgcgtgcgtgtgccagcgcttctccggcccgttcgcgtgctgttgccgccgcttttcctgcctgagccttgaccgaatccgcgacctcgctgtgctctatggcgtcgcgggcggatttggcggcagcgatggcccgttcgctgacattggccgcgatgcccggcgctgccttcaacgccgcgcggccggcagcccggcctcgcgggaacagcagggaaatgagcgccccggcggcaaccgccgccgacacggtggccagcgggtgatcagccacaaaccggcccgcaacgcttactgcccggccggtcgaatcgcgcgcagattcatatccgttcgctgcactctttcgcgaccgcgcataggcgtccgctgcccgttcgcgtgcgagttcgatatgttcgagtgcttgattggagcccgccttgatgcggccggaggccgacgtagccttgttatccgcgtagtcgcggatacggcctagctgatcgtggatgctcttattcattccaaatcctccggattatgcgatcggatcgcgcgatacctgtcccggcacagaacgaacaagcggcgtgaaagtgccgcgatcggacggcgcaggagccaggcggttaacccggcaatgacgccgcccgtcgcaaccggatggcgcccgacaaaagcctgcgcctgttccccggccctgcgcgtggccagcaatgcctgcgcctgcgcgtccgatttcaggcgcgcaggcgcaaagcgcgattttgccgtgccgagggcggtcagaaagcgggctcgctcactttccgcgcgggcatcggcttccagataacgttcctccggcgtcacggcgcatcctttccgggaatgagcgtcttgaaccgccgtctggcgagtagcagcaggatggcgacgatgatgaggccccctgccgaaaccgcggctgtcgcgcccaggggcgtaaggagcggggcgagtgcgatcaccaggcccagcatcagcgtcacaagcgtgccgaacagcaggatgagcgcgacggtcacgagcagcgcgatggtccgtgccccggctccgatcaactcggcccgtatcttttgccgttccagttcggcatcggcataggcgcggccggaagaaaggaggcgcgccgcgacatcgcgcaacgactcctcttccggtagcggttccagcctgtcgggctcgccgacggtgtcatcaatattcacgggcgtgccgagtgcacgaataactccttcccccgataaggggcggtcatgccttgtcggaggaagaccccttggcgaggcgcatcagcacgaagccgaccaccgccgcagcaccgatcgccaccgccgggcttttgcgcacgaagtcgcgtgcttcgccgaccagttgatccacatccttggtgtccagcgacttggccgcgccggcaacggcctccgccgcgtagcgggcatagtcgccatattgggggccaagcttcgcgtcgacggtccctgcggtgtcggagataagcttggacaggctgtgcatcgcactgccggtcttgtccttcgcggtcccggcggcggcgcgtgcggtcttccctgcctgctccttgatctgctcggtctgcgccttccagtcgacgccgttgaccgtcttggcggctttcgccgcacgcggcttgcgggtcgcggccttcttcacgggagccgccttcgtggcgcgcgtcgtcgcggctgctggcttcggcgagggtgtcttacgcgcccggggcttgcgcggcgccttgggcgtgggctcttcggtgtcggccatgcgtgggtactcctgcggtatctggctgcttcaggcagcatcaatgcacgggtcagataacaagttccgtctgcgtaatacaccccgaaactgtagcatttcgggaggcggagatatccgtgcggtggccggcattgccttatccgcccatgctggctaagcggtcgccagccaatcggggctgaccacagccagcatcaaaggggtaccgcatgaccgccatcctcgacatccatgcccgccagattctcgacagccggggcaatccgacggtcgaagtcgacgtgatgctggaggacggcagcttcggccgcgccgccgtgccgtcgggcgcatcgaccggcgcctatgaggcggtggagaagcgcgacggcgacaagagcaagtatctgggcaagggcgtgcttcaggccgtggcagcggtcaatggcgagatcgccgacgccattcgcggtttcgaggcagaggatcagggtgagatcgatgcggcgatgatcgccctcgacggcaccgagaacaaggggcgcctgggcgccaacgcgatcctgggcgtgtcgctggcgaccgcgaaggcggcggcggatgcgcgcggtctgccgctctatcgttatgtgggcggtgtttccgcccatgtcctgccggtgccgatgatgaacatcatcaacggtggcgaacatgccgacaacccgatcgatttccaggaattcatgatcatgcccgtcggtgcggagagcatcgccgacgcggtgcggatcggcgcggaaatcttccatacgctcaagaagggcctgcacgacaaggggctggcgacggcggtcggcgacgagggcggcttcgcgcccaacatcgcctcgacccgcgacgcgctcgacttcatcatgctgtcgatagagaaggccggatacaagcccggcgatgacgtggttctcgcgctcgattgcgccgcgaccgagttcttcaagaacggcaagtacgagatttcgggcgaggggctgtcgctcagcccggtcgagatggccgattatctcgccgccctgaccgccgactatccgatcaagtcgatcgaggacgggatgggcgaggacgatttcgagggctggaaggcgctgaccgacaagatcggcggcaagatccaactggtcggcgacgacctgtttgtcaccaatccaaagcgccttgcgatgggcatcgagaaggggctggccaattcgctgctcgtcaaggtgaaccagatcggttcgctgagcgaaacgctcgaggccgtttcggttgcgcaacgcgcgtcctacaccgccgtcatgtcgcaccgttcgggcgagaccgaggatgcgaccatcgccgaccttgccgtcgcgacgaattgcggacagatcaagaccggttcgctggcccgttccgaccggcttgccaagtacaaccagctgatccgcattgaggaagagctgggcgatatcgcgcgctacgccggacgatcgatcttccgctgattctggtggccggacgtccatcgggatgtccggccaagattgcgcaacatttccgcttgccagcgggaacccgctgtgattcaagggcgaatggctcatatcgctaagcttcgcatgctgcttttttccgcgcttgggccagcgctcgccatcattttgctgatcctgttcgcgggctatgcggtgcttggtccccgcggcattctggcgtggggcgactattcccggcagcttggtgaagcgaagcacgaactggctctggcgacggcggagcgcgaccggttgaagaaccgggtggacctgctcgatccgcgccgtaccgatccggacatggcggacgagctgatccgtcgcgaactgggcctgacccaccccgacgaagtggttgtcccgctgaactgacgttgcgccgcacgtcccggatcgtttcttcgggcttctgccgcatttggggtcgcttttccgcccgcgcggcgttgcaatcctgcgcctcttgcctctatatcccggcttctccccaggaccaccaatgaaggatttcctccttggcaagaccagcatcaacgcgggcatcaacgtcgaaggcgaagcccgcccccgcgaagcgcgcatccgcgccgaaagcggcaggcgcggtagcccccgccgaccataatcgcgaacgtccggccgaccccgtcgactacaccgcgagcaaggaagaactgctcgaattctaccgccagatggtgctcatccgccggttcgaggaaaaggcgggtcagctttacggcctcggcctcatcggcggattctgtcacctgtacatcggtcaggaagcggtcgccgtcggcatccagtccgccctcgaaccgggcaaggacagcgtcatcaccggttatcgcgaccacgggcacatgcttgcctacggcatcgatccgaaggtgatcatggccgaactgaccggccgtgctgcgggcatttcgcgcggcaagggcgggtcgatgcacatgttcagcgtcgaccacaaattctatggcgggcacggcattgtgggtgcgcaggtcagcctcggcgcgggccttggttttgcgcacaaataccgcaacgatggcggcgtgtgcgtcgcctatttcggtgacggcgcggccaatcagggccaggtgtacgagagcttcaacatggcggagctctggaagcttccgatcatcttcgtgatcgagaacaaccagtacgcgatgggcaccagcgtcaaccgctcgtcggcggaggaccaactctatcgccgtggcgaaagcttccgcatcccgggcatccaggtgaacggcatggacgtcctggcggtgcgtggcgcgacggaagaagcgctcgcatgggtcaaggcgggcaaggggccgatcctgctggaaatgaagacctaccgctatcgcggccactccatgtccgatccggccaagtaccgctcgcgcgaagaggtccagcaggtgcgcgacaagtccgacccgatcgagggcgccaagaaatatctcgaggcggcagggatcagcgaggacgaactgaagtccatcgatcaggaaatccggaagatcgtcgccgaagcggcggatttcgccgagtcctccccggaaccggaggccggcgaactctatactgacattctggtggagtcctactgatgggcgtggaaatcaagatgccggccctctcccccacgatggaagagggtaccctcgccaaatggctggtgaaggaaggcgatgaagtgcggtcgggtgatatcctggccgagatcgagaccgacaaggcgacgatggagttcgaagctgtcgacgagggcaagatcggcaagatcatggtgcccgagggtacggacggcgtgaaggtcggcaccgttatcgcgacgatggcgggtgaagacggagcggccccggccgccagggccgaagcaccgaaggctgtagaggctgaggcgcccgggaaggccgagaccggtacggcgaagctggcggtcgaggcgaagccggcggttgccgacccaagcattcccgagggcaccgagttcgtgaagacgacggtgcgcgaggcgcttcgcgacgcgatggccgaggagatgcgcgccgacgatcgcgtcttcgtcatgggcgaggaagttgccgaatatcagggcgcgtacaaggtgacgcagggcttgctcgatgagttcggcccccagcgcgtgatcgatacgccgatcaccgaatatggctttgctggcgtcggcgccggtgcggccatgggtggcctgaagccgatcgtcgagttcatgacgttcaacttcgccatgcaggcgatcgaccacatcatcaactcggcggccaagaccaactacatgtccggcggccagatgcgctgtccgatcgtgttccgtggtcccaacggcgcggcgagccgcgtcggcgcgcagcacagccagaactacggtccatggtacgccgcagttcccggcctgatcgtgatcgcgccctatgactcggccgatgccaagggcctgctgaaggcagcgatccggtccgacgatccggtcgtgttccttgagaacgagctggtctacggccgcagcttcgacgtgccgaagatcgacgattatgtcctgccgatcggcaaggcgcgcatcgtgcgtccgggcaaggacgtgacgatcgtcagttactcgatcggcgtcggcgtggcgctcgacgcggcggagaagctggcgggcgaagggatcgatgcggaggtcattgacctgcgcaccctgcggccgctcgacactgcgacggtgctcgaaagcctcaagaagaccaaccgcatgatcgtggtcgaggaaggctggccggtctgctcgatcgccagcgaactgtgcgcggtcgcaatggagcagggcttcgatgacctcgatgcgccggtgcttcgcgtgaccaacgaggatgtgccgctgccctatgccgcaaaccttgagaaggccgcgctggtcgacgcggaccgcgtgatcgcggccgccaagaaggtctgctatcgctgaacagggcgaatagatgaaacggaacggggcgcacggtgacgtgcgccccttttcatgtcagctgcaggtggaagcggtgacggcttcggcattgtagatgccgttggtgcctccggtgtaatcgcgggcatcgcgaacggtcatcgctgccgt

SEQ ID NO: 3483 - DNA, 23225 bp, synthetic construct
  misc_feature 1..23225: note = Synthetic
  source 1..23225: mol_type = other DNA
cggacagcacgctgctgcgtgcgggcatcagccaccaggaaggcaagccggatgcgccggcctggggcgcgctgccctccttctacagcgacggcagcttcgccgcttggccgcgctccaagaccgcgtcggccggatgggccttctgggataccaccaatcagaacatctttgcctcgatccggcaggattttggcaacgactggagcgtgacggccaactacaacagattgaagaacgcccagcacgcccggctgctctatctctccggccagatcgacaaggcgaccggcgtgctggtgagctgggacccggagagccagacgttcggcccgtcctatgattatccctatgaggaccggggcaagagcatccagcatagcttcgacgttcagcttaaaggcaatttcggcctgttcgggcgcagccacgaactggtgctgggcgcgctgcacagcttgcagaaccgggacgacacgacctacggcgcgctgtctttccccacgggtacggatttcgtcaattgggacggcgccagctatcccaacccgggtttctcgaccacgggcgatctggcggtggacgagcggatcaagcagaccggcctctatggcgcgcttcgtttcaatgtgaccgatgcgttcaagttgatcggcggcggccggttgtcgagttgggagcagaccggcttcagcttcggcgcgtccagcgattatggcgacgacaatgtgttcatcccctatgtcggcgcgctttacgacctgacgccgaaccacaggctctatgcgagcttcaccaagatcttccagccgcagggcttgctcgatcgcaatctcgtccagctcgatccgctcgatggcaaggcctatgaggtcggcctcaagagtgccttcttcaacgaagcgctgcaaacctccattgccttgtttcgcattgagcaggacaatgtcgggcagcccgatatcatggtgacgccgccgggcggcggcctgccgcagcagacttatgtcgccgccaagggcacgaccagcgagggtttcgaggtcgagatcaccggcgagccgctgccgggctggaacgtcaatttcggctacagccagttcaaggcgaaggatgccacgggggcatcgttcaacaccgatcagccacgccggttgctcaagctgttcaccacctatcgcctgccgatcggcgagagcgccctcgtgctcggcggtggcgtcaactatcgcagcaaggcttattcggaaggcctgaaccccatcaccaccgcgccgttccggttccagcaggatggctatgcgctggtgagcctgatggcccgctatgaggtgaacgagaccctgcaagtgcaggccaatgtcgagaatctgttcgacgtgacctattacagccagatcggtttctacgagcagtatcgctacggcgcgccacgcaatgtcaccatcggcgcgacctatcgcttctgaggaacgggaccttgccgcccggcggggttaacccgccggcggcttgcaggcgaagctgccgacggtcttgccgtcgccgcccgtatatgcggcgtaggcgggataggggcagagcggccgcgtctcggtggatggcgcgcggcgctgcgcggtgatgctggccggcgccttgccctgctcgacccactcgaccagcgcggagagcaggtcgaaccgctcgaacgcgttgccgccgccgcaatggagcatgcccggcaccatgtagaagcggctggcatcggtgaacgccttgccgttggtctcggcggcgcgctcataatagtcccatgtcgcaaagggcgagaaccagaagtccgacacgccgtggtagaagatcatcttgccgccgcggtcgagataggtgttgaggttggtccagtaattggtgtcggtgaggcgctgcccggcatcgttgcggactgcgtggacccgcgcgtcgaggtcgatctcggtggcgctgctcggcggaccgaaggggccggggccgccggtaggcagatagcccatcggcgtggcgacgatgccggtatcggcggccatcggcgcgtagatggcgtacccggccttgtccttcggcccggcgaggccgaattccagcgcgcggacctgcccgtcgttgaggcagccctccgccttgtcggccgagcaggcgagcttcttcggatcgaaccggcattgggcgacattctcgatcatgccgtccttgaggccgtccagcccgtcgcactgattgaggatgccattgagaatggccttgcggttggcgggcgtgagcacctggctcatgatcggcttgccgtccgcacccttgggcgcggcctgattgaacagcacctgggtatattcgacgccgaggttggaatcgcccgtgcgcatggccggggcgccaacgatgatgccgtcgaacagctccgggtagcgctgcgaggcgagcatgccttcgcgcccgccggtggagcagccggtcatgtagctgtgcgcggcgggcttgccgtaataagcggcggtgatccgcttgccgagcaaggtgacggtcttgaccgaggcttccgcgaaatcgagcgtggcgcgctggtcggtcatgaagctctggtcgaacaccgcgcccttgtggccgctgtcatggctgatgacggcgaagccgcgcgcgagagctggcctgtcgccggacgcgacgggcccgaccggcgggttgacgctgccgttgaggccaccgccgccttgcaggaggaagcgcccgttccaggcatccggcagggcgatggcgaaaccgatgccatactccttgccgcccgcgcccttgcgcttgttgatgatgccctcaacccggcagtgggcggggagggcggaggcgagcggcggtccgccgggctgggcggagccgggcggcgtcacgccgacatgcttcacggcggtaatggtgacgctctcgccgaaactctggccagcgaacgcggcgcagcgcgcttcggcatccccctccgcggcgaatgccggcgccgcgatggcgagcagcgcgagcgcggtaaagctccgataacccaaacgcatggtgtggccccctccctgttcgtcacgacaccatagccgcacggcgctgtgtgcaaagccatcttgtgaagccggtccgtcgatttccctcgccggtccgagcgccggttgcgttatggctgatccggcgcgaattgctggatgtcgctggccgagacgctttccagatcctgcggcacgcccgctgatccttcgctgcggtcccgatacagcgcggcgcgggccaggagcatcagggtgatcggtgtcgtcagcgtcacgaagatggcgatcagcacctcgtggaccatcgggcgggaatgcagcgtggaaaagcagatcatcgaggcgatcaggatacagcctgtacccagcgtcgagcccagcgtcggcgggtggatgcgttcatagaagtttctcagccgcaggagcccgagcgcgccgatcagcgtgatcgaagcgccgagcaggacgaggaagccgaccgcgatggcggcccagagcggcagatcgggtgcctggatcattcgatcacctcgccgcgcatcaggaatttggcgagcgcgaccgtgccggcgaagccgagcaggccgatcaccagcgcaccctcgaagaacaaggtgcggccggtctggatgccgtaggtcagcagcagcaacatgccggcgaggtagagcgcgtccatgcccagcacccggtcctgcgcgcgcggtccgcgcaggatgcggaaagcggcgcagcccatggcgaacgccagcaggatctgcgcagcggtgatggcgagggcgagaaagagggtgctcatacgaaaatttccatcaacagccgttcgtagcgcgtcttgatgagggcgatccactccgcctcgtcgaccagatcgagcacgtggatcagcaccagatggcgctgtgcgtcatgctggagccacaaggtgcccggcgtggcggtgatgatgatggcgagcgcggcgagcgcctgcgggtcgcgcagttcggtggggaactcgatgaagcccgagcgctgcccggccgggcgaaacagcacgatccgcgcgacggcgacgttcgaccggatgatgtcggcgagcaccagcatcgccagccggactatcgccatgctgaagcggatacgtggcggctccgccttgagcgtcagcatcacgcgggagacgagcagggccaccaccgcgccgagcaggatatgaccaggcgagaagccggtcagcagcacccacatgacgaacagcgccagcgccagcagcggaaaggggacgagccgcttcatggcgccgccttggtgatcgggggcgtgcctcggaccgcctcgatataggccgagggatcgccgagggcgccggctgccgtctccatatagagaaagaccggcccggcgtagatcatcagggcgaggcaggtcgccagcagcaggccgatcggtgcgacctcgatcacgctgaggcgcggcggcgaatcctcggccggcgtccatagcaggtcgatgccggcgcgggtcaggccgatcagcgtggccagccccgagcagatgatgagggcgatcagcagccagctcgtcggtgtgatcgcggcatgccggaacagcgcgtcgatgatggcgaacttggcgatgaagccggagagcggcggcaggcccgcgagcagcagcgtgcagaagatgaagccgccgcccaggatcgcgatggtgccgggaatgacgatgccgacctcatcctcattctcctccagcgcgccggtatattcgtcgtcgaacaccggttcggcgatgccggcgatcctgtcctcctcgtcggcattgcgcgtgaccggctcgatgatgaggtagagcgccgccacggccagcgtcgagctgaccagatagaacaggagcgcggccatgagcgcctggccgccgatgccgatggcggcgagcagcgtgccggaggagaccagcacataatgcccggcgacgcgggtgagggtgcgggccgacaggatgccgatggtgccgaacagcatcgtggcgaaccccgcccagatcagccagttgtcggcgaaccccgcggcgccgccggaggtcgcgccgaacagcaacgaggagaggcgcaggacgatgtagatgccgaccttggtcatgatggcgaacagggcggccaccggcggcgcggccgccgtgtaggtgcgcgagagccagaagctgagcggccagatgcccgacttgaccaggaaggccgtgccgaggatcgccgctccgccctccagcaaggggaggtcgccgggcgggacggccgggatgcgctcggcaaggtccgccatgttgagcgtgccggtggcggcgtagatcatcgcgacgccgatcaggaacaggagcgacgtggcgatgttgatcgcgatatagtgcaggctcgcgctggtccgctcggcgcccgaaccatgcagcagcaggccgtaggacgccgccagcaacacctcgaagaacacgaacagattgaagatgtcgccggtgaggaacgccccgttgatgccggcgatgagcagcaggaacagcacgtggaagcgcgggcccgagcggtcccagcgggccatggcatagaacaaggcggtgaagccgagcaggctggagagcagcagcatcaacgccgagaggcgatcggccaccagcacgatgccgaacggcgccggccagttgcccagcagatagacataaggcgccgaagccgggctgaggccgaagccgtccgtcacttgccagagcagcagggtcgctatggcaatgagcgcggccagcgtgcccaggctcatgatgcgcttgagcgtgcgccggcgttcgtcaaaagcgagcaggaacgcgctcaccgccagcggcagcacgatcggcgcgatggtcagatgctgcatccagccactcactggtcgccctcctcgccgtcgacatgatcggtgccggtgaggccgcgcgaggcgagcagcacgacgagcagcagtgccgtggtcgcgaacgaaatgacgatcgcggtcagtaccagcgcctgcgggacggggtcggcatagaggctcggatcgaccggaccgtcccggccgacgatgggcggcgcatcggtgcgcaggcgcccggccgccagtatgaacaggttgaccgcataggacagcagcgacaggccgagcaccacctggaaagtgcgtgggcgcagcagcagccatagccccgaggcagtgagggcgccgatggcgagggcaagcacgatctccatcagcgcgctccctccccggccgcttccgttggctttggcgcccgtggcgagcggattgactggtgggccagcgcgatcaggatgagcgcggtggtgccgaccaccacggcaaacacgccgatgtcgaacagcaacgccgttgccagcgggatcttgccgatgagcggcagctccagataggtgaaatcgctggtgaggaacggaaagccgaaaacccatgctcccatacccgtgagggtcgcacagagcagccccgcgctcatccagcgtaccggctggatggtgaggcgggtttccaccgagcgggtgccgctcgccatatagagcacgatgatgccgatggaggcggtcacgccggccgcgaagccgccgccaggcagatcgtgcccgcgcacgagaaaatagagcgcgcaggtgaggatcacgggaaacagccattccatgaggacgcgcggtacgagcagataatgccgcaccgtgtcgccgcgcgtgcggccctcgcgcgcgtcgtcgaaggcgttctgccgctgttgctgctcgggcagggcgatgctctcggtcgcggggcggaagcggcggagcagggtgaacaccgtgagcgcgacgatggcgagcacggtaatctcgccataggtatcgaaggcgcggaaatcgacgaggatgacgttgacgacattggtgccgccgccgcccggataagcctgctccaggaaatagtgcgagatgccgtggggcgcgtcgcgggtcatgatggcataggcgatggccgccatgccgccgccgccaagcagcgcgagcagcaggtcgcccccgcgccggaacgggacgctcagcggcgcgcgcgtgtccggccactgctccggccggcgcttgggcagccagcgcagaccgagcagcaggaggacgagcgtgacgatctccacgagaagctgcgtcaaggccaggtccggcgcggatagccagacgaaggtgaggcaggtggcgaggccgcacatgccgatgaggatcagcgctgcgaggcggtggaacttggcctgccacgccgcgccgatcgcgcaggcggcgcccagcagccagaggaccgcgaagcccggatcgaccagcgtatctgggcgcgatccccggctgtagcccagttcgaggaaaggtagcacggcggcgatgaaggcggtggcaaccagcagacgcaactggacctgtaaccgccgtgtgccaagcaacccgtgcagggcgcgcgcgccgtcgatggtggctgccagcacgatctcgaacgtgcggcggcccctgaagtggccgatgaagggcgagttggggaagtcgttgagacgtgagcccagcaatatgtagagaccgacgccgccaaccagcgcggtgacgctcatcagcatcggcaggctgaagccgtgccagatggcgaggctgtaggcgggggtttcgctgcccagcacggactgcaccgcggtggcgaggaacggaccgatcgtcagcgtcgggatgatgccgacgagcaggcagagcagcacgagaatttcgatgggcaggcgcatccagtggggcgcctcgtggggctggtgcgggaggtcgcggggcggcggaccgagaaaggtctggtgaatgaagcggaccgaatagagcacgctgaacgtgctcgccagcgtggccagaaagggcagaatgctgtccagcaccgtgccgctatgcttggtcagcgcctcggccaggaacatctccttggagaggaagccgttgaggaggggcacgccggccatggcggcggcggcgaccatcgccagcgtggcggtgatcggcatgaagcgggcgaggccgctcagcctgcgcaggtcgcgcgtgccggtttcatggtcgatgataccggcggccatgaacagcgaggccttgaaggtggcgtggttgatggtgtggaagatcgccgccaccgccgcgagcggactgcccagcccgagcagcagcgtgatgagcccgaggtggctgatcgtggaataggccagcaggcccttgagatcgttctggaagatagccgaccaggcaccgaccagcagggtcgccagaccggtggtggcgacgatgagataccagctattcgtgcccgccagcaccggccagagcaggataagcacgaaaacgcccgctttcaccatggttgccgagtggagataggcggagaccggcgtgggcgccgccatggcgtgcggcagccagaagtggaacgggaattgtgcgctcttggtgaaagcgccgatcaggatgaggatgagcgtgggcaggtagaggctatggttgcggaccgcgtcgcccgcttccagcaccacgtctacgtcatagctgccggtgatatggccaagcagcaggaagccgacgagcaggcaaaccccaccgaaggcggtgacgatcagcgccatgcgggcgccgtcacgcgcgctctggttatgatgccagtagccgatcagcaggaaggaaaagaggctggtcagctcccagaaaaaggcgatctggacgagattgcccgagagcaccatgccgagcatcgagcccatgaacgccagcaggaaggcgaagaagcgcggaaccggatctttcgacgacatataataacgcgcgtaaagcacgaccagcgcgccgatgccgaggatgagcatcgagaacagccaggtgaagccggcaagccggaccgtcagatccagcccgagcgaggacagccagggaatgacgaggcgtacgctgctgtggccgtcggccagccccggataataagcgataaggatcgccagccccgccagcgtgaccgtgccggccagcgccgccgccgcgttgcggctgcgggtaggcagaaatgctgcgccaagactgcccagaaagggaagcgcgaaaagaagcagtaacaattttgcatccgtcgggggcggaataggtcttcctttcggagtttgtgtcgttgaggggccgatgctctatgagcggagttgaccgggtggggcaagatagaatgttaatgtccgctgcggaaagtctaggcgatcggctgcgcgccgacggctgggcgtagcctttggttttaggtgccggcggtgcggttcgtggcggattttcccgggatcgacgggatttgagactctttcatttcaatttttgggccggcgtcgttcctcatggacgatttcgaggtgcccagggattatgaaaatgcgccggtggtggcgaatcacttggcccggagcagcgctcttttgccttatgggcctattgtggagggcaggccggcccttaaggcgcgctgcctccggagatgcgatcgatcggtcgacgccgccgctccggatacgaaatgtctaagatgcgcggtgactggccatcgccggtcccagatgcgtcaaatccatcaaaacatggttcatcggctgaactgcggatcaggtccagccaaagtggcgagtattccatgcgggtcccgccgagcaggcccggcaccccctcaaatgaaaggtggggccgtagccccacccttatttggtgcagtcaagctgcttgttaacagctggcccgcgatctctgaaggacgcagtattcacattttcccggagggcgtcaaggaccagccgcaactgggacttatatgggagggttttaaactgctccaaaatgaccggaacgaatcgttgcggcacagaaaattcgggagaatattggactgggggaagcgatgcttagattaggccttgatatcggcaccaacagcattggttggtgcgtggtagaatatgatgcggagcatcatgtcggcacccggatcgtcgatatcggtgtacgcatcttcggctcttctccgcaaggcgcagggcgggaccccaagtccggcgcatcgctggcggtcgatcgtcgcgctgcacgggcgatgcgccgccgccgcgaccggtatctcgggcgccgttcggcctttctcgacacattggttcggttcggattgatgcccgccgatgcgaatgaggccaaactggtggccgagcgcgacccttatgatctgcgcgcccgtgcgctgaacgagcggctcgaaccttgggaaatcgggcgggcgctcttccacctcaatcagcgtcgcggcttcctttccaatcgcaaggcggagcggcggcaaaaggacggcgaggacggcaagatcgccagcggggccaaggcgctcgaccaggcgatggcagcggcgggggcggacacgctcggccagtttctggccggccaatccgaaaagcgcgtgcggctggacggcgagagccaggattatgatttctatccgcagcggcgccacatcgactatgagtttcagcgtatctgggcggagcaggcgaagtatcaccccgccttgctcaccgaagaagcgcgtgcagcgctccatcgcattctgttctttcagcgccctctgaaagagccggaggtgggtgtctgcaccttcgtcaataccgaacgccggctgccaaaggcacatccgttgttccaggaacggcgcctgtatgaggaggtcaaccagcttgagatcaccacgccgggggaagtgccgcgcaagctgacactcgaccagcgcgaccatctgatcctgatgttgcgcggcaagaaggaggtgctcttctctacccttgccggcggcaaggggctcaggctccagcccggcgaaagcttcaacaaggccagcgagacgcgcaccgcgctgcgcggcaacgaggtctatgccgcgcttgcccacaaggatcgttttggcgccgccggctgggcgaacatgacgcccgagcgccagtgggcgatcatcgagatgctgctgagcgaggagaacccggatacgctccacgctttcctgaccggggaatgcggcctgaccgaggaccaggcgcgcgccaccgccaaaacgccgttgcctgaaggctatggccggcttggcgagacggcgacacgcctgatcctggaagagctgaaaaaagaagtcatcacctatgacgcggcggtgcgccgtgccggctggcatcatagcgatgaccgcacgggagagatcctcgacaggctcccttattatggcgagctactcacgcgcgacatcccgcccggctcccagctcgcgtccgatccgcccgagaagcggtggggcaagatcaccaatccgacggtgcatatcgggctgcgccagttggagaagctggtgaacgcggtgatcgcggttcatggccggccggacgaaattgtggtcgaactggcgcgcgaactcaacctgagcgagaaagacaaggaggagcataatcgccgcatccgcaagacgacggcggaggcacaggctcgttcacgcaagctgcaagaagaggggatcgaggacaccggcgccaaccgggcgaagctcaagctctggcaagaactggcaggcaatccggtcgatcgcttttgcccctattgcggggatgccggcaagttgatcggttttcgtgctcttttttcccaagaggtcgatatcgaccatatcattccatattcacgttcgctggatgacagtgccaacaacaaggttgtcgctcaccgcagctgtaatcgcgcgaagggcaacaagacgccttatgaaaagtggggtcacagcccggagcggtgggaaaagatttccgcccaggttgcccatcttcacagggccaagcaatggcggttcgggccggatgcgatggagcgggttgcaagggacggcgactttctggcccgccagctgaccgatacacagtatctctcgcggctcgcgcgcaaatatctgttgagcctgtatgccgagaagggcgagggcagcgggcatgtctatgtcattcccggtcgtatgacggcgatgttgcggcggctgtgggggctgaacagcttgctgcccgatcataactatgttgagaacgagcacagtaacgcgcccaagaaccggctcgatcaccgccatcacgccatcgacgccacggtaaccgctgtgacgacacgcagcctgctccagcttatcgcgcgaactgccggggaggccgaggacaaggatctcgaccgactgttcgaaggactggaacagccatgggaaggatttcgagagcaactcggcgaagcgcttgccagcgtcaccgtcagccacaagcccgatcacggccgcaaggggaagccgtcgcgccaccgcgacgtcaccgccgggcgattgcacaacgacaccgcctacggccttaccggtgaggtcgcggctgacggcaagacgccgatcgtcgtccaccgtgtgccgctgacgaacctcaagccgggcgacctgaccaatcccgagcggatcccggatgcctcactgcgtgacgcgctctatgcggcgacgcgtgacgccaccggcaaggagttcgaggcggcgctgcgacggttccgtgagactcacccggtctttcacggcatccgccgggttcgcgtgcgcgagccgctcaacgtcattccgatccgtgacaagacggggcgagcctacaaggcatataaaggcgatgcgaatgcgcgctacgacgtctggtgcctgcccaacggcaagtgggtgacgagctggaaggatcgtggaggctgcgagcggtcgagcatcatctcgatgttcgatgcgcaccaatcggcggaggagccccggccgcatcccgcggcgaggaaagtgctcagcctgcgccagaacgatctgctcgcgatcgaacgcgacggcggcgcgccggagattgttcgcgtcgtcaagttctcgacgaacgggagcatcgccctggcccccgccaatgaaggcggtgcgctcaaggcccgtgatgcggcgccagacgatccgttccattatatatactcttctggcggagggctcaaaaagctgaaggcccgccagatccgcatcgatccccttggccggatcttcgatcccggaccgcgaggctgagcgagccgcgtggaccgcatcgtcgacattgcgaccgacgggcgccacctctcgctctatcgcggtttcctcatcgtcaaggaacagcatgaggaagtaggccgcatcgcgctcgacgatatccacgctgtgatcgttcacgcccatggcaccacctggagcgccaatctggttgcggcgctcgccgagcgtggtgcgccgatcgtcttttgcgcggcgaaccattcacctgttgcggtcactttgccgctcgaaggccatcatgcgcagaacgcgcggttcagggcgcagtgggatgcgtccaagcccttggccaaacagctctggcgccgtatcgtctcggccaagatcgccatgcagggggcgctgctggccgcgcgtggcgtggccggtgccgatgcctttccgctgatcgcgcgccgcgtgaaatcgggcgattcggataatctggaggcgcaagccgcccgccgctactggccgctgctgatgggcgccgaattccgccgggaccgggacagccccggcgccaatgcgctgctcaattatggctacgccgtgattcgggcgaccgttgcccgggccgtcgtcgccgcgggtttgcacccgacgatcggcatcaaccacgccaatcgcggcaacgctttcgcgctggccgacgatatggtggaaccgttccgacctctggtcgacgcgctcgtcgtgacgatggcggctcgcgggatcgacacgctcgaccccgcgctcaagcgccggttcgcccagttgattgcgtttgacgtgcggatcgggggtgaggtttctccggtttccattgcggcggcgcggcttgcccagtcgctcgcgcgcgcttttgagagcggccgtccctcgctcgcgctgttcgatccgcccacgcccatcgaatggtcggcgctcgccctaatcgacgagcgcgacggcgcggtccgatgagcgacgcttcctatctgagcggataccggttgatgtggatctttgtgatgttcgacctgcccgtcggcaccaggcagcagatgcgagaggcgacgaagtttcgcgaattcctgctcgacgaagggttcgagatgagccaattctcggtctatgcccggttctgcaacgggaaggaaagcttcgattcgcacctcgcgcgaatcgagcgcaatctgccggagaaaggcgatgtccacatccttaccttcaccgaccggcaatatgagaatatcgtccgattctcgagtcagcggcgccagcggccgcgaaagaatccggaccagcttgccatgttctgattcgcacggtcaggatcaggcctccggatgcgccagttttcgtcacttcatcagtaagttactggcgcatcaggtttagccgttcagagatcgggggccaaccgcaacgcatggtggatggaggtgacgaccgcctgcggtttagccgttcagagatcgggggccaaccgcaacccctgcaaggccgtctttggtcccctgctggtttagccgttcagagatcgggggccaaccgcaactagacctgcgcgttgtcatagacccacgcgggtttagccgttcagagatcgggggccaaccgcaacgtatttccggcggtaacatcgccggtaactggtttagccgttcagagatcgggggccaaccgcaaccgccttcgctagagccatctgatgctggcaggtttagccgttcagagatcgggggccaaccgcaactccagtcccgtttagaaacgtccaaccgtcggtttagccgttcagagatcgggggccaaccgcaactatggtgtcctgcatgtcgccgcaatccagggtttagccgttcagagatcgggggccaaccgcaacggagccaccgagacagtaacggttcccgcgggtttagccgttcagagatcgggggccaaccgcaaccgcggcggcgatcaggtcgatctgccatgtggtttagccgttcagagatcgggggccaaccgcaacatattcgccatggttatgaaaacctgcgggggtttagccgttcagagatcgggggccaaccgcaacgctgcgaaagcgctggtggaggggcagtttggtttagccgttcagagatcgggggccaaccgcaaccgtcggacggccccatgaacgtctccgcgtggtttagccgttcagagatcgggggccaaccgcaactatacatagactgtaacgtctccgctggaaggtttagccgttcagagatcgggggccacgcatgctcgcgcacgaaatgatgaacgtgctgagccccgacgtttcgattgcggaaagcgtggcgggcatactggcgcagccgaatgacgtgttcgatcgagcggaacttgcggctagtctcgaactcatggcgcggcgcgccggacatctcatgaaatttgtcgaacgttaccgcgccatgctagatatgctcgaagctataccgacgccggttcgcatgaccgaagttgcggccgatctcgttcgtatcgttcaggcacgggcaccgctgcccgtcttccagatacatgtcgatccactggacctcgtagccaggatagaccgcgaactcatggagcaggcgctgatcaatctcctcaagaatgccgtggaggcggttgccgcgattccggatcccagggtcgaactcagcatccggagcagggacggcgcgacgctgatcgaagtggctgacaatggacccggcctgcctgtcgatccggatacgctgtttctcccattttatacgaccaagcccgatggatccgggatcggcttggcggtggcgcgccagattgctcacgctcatggtggcgtgcttgcggcccggtccggggcccttggtgcgcgattcacgttgagtttgcccaacgggggcgtgtcggccgaagatacgacgccgaatgctgggtatggccgcgttccgctggagcccgctcataagcgcctgaagatcaggacccgcccgccatcgttggaagcctggcggccatcaaggctgaagggggcggcggggaggcggttggcgtggatcggcacgtgcccataagttgggctttcattccttcggagaacttttggggcaattggcaccgggcacacgcatggcctcggccgccgcgctggcgagctggtcggcgcgttcgttctcggggtggccggcgtggcccttcacccattgccattcgatggtgtggcgcttcgtcgcgtccagcagcgcctgccagagatcggcattcttgaccggcttcttgtcggcggtgcgccagccgttgcgctgccagccgaagatccacttggtgatgccgtccttcacatagttgctgtcggtcgagaggatcacgcggcaggggcaggtgatggcgttgaggccctcgatcgccgcggtcagttccatgcggttgttggtggtgtgcgcctcgccgccggaaagctccttctcgcgccctttgaagcgcagcaccgcgccccagccgccggggccgggattgcccttgcaggcgccgtcggtgaacagctcgaccgcatcgttcatgccggcggaccgaacagcgcggcggccgatcccgccgcataagcctccagccggcgcagataggcgagcgggtccttgcgcgtcaccagcgcggtgggtggcgtgttgatccagtcataggcgcgggtcagcaggaaccgcagcgccgcgccgcgcgcgaggatcggcagcgcctcatgttccgcatcggtcaggccatgatgcgcccggtagccggcgatcagggcatggccgacatcggcgtggaaatccgcgccgtcgggcgagaagctccacgcgccgtgggtgatggcgacatcataggcgcggatgtccgtgcaactgaaatagaagtcgatcagcccgccgaccatgtcgccccgcatcagcacattgtccgggaacagatcggcatggatcacggtatggtcgagcgcggcgggccaatgcgcgtcgaggaacgccagctcctgccggacacggccgtgcaggccgggagcgatctcgtccaggctcgcgccgcagctctcggcgaggcggtgccagccctccggcccgagcgcattggggcgggtgccggtgaagctctccaccgcgcggtggagatcgcccagcgcgccgccggcggcgcgggcctgcgcgggcgtcgggcgggtgacggagacgccgctcagaaactcgatgaggcaggcggggcggccgcacagcgtctggaggcactgccccgtgcggtccgggatgaagcgcggcaccgggcagccgcgcgcgccgacatggtcgagcagcgccatgaagaagggcaggtccgccacgtccacgcgcttctcgtagagggtgaggatgaagcgggcgcccttgccgtccgtgccggtcgtatcgaccagatagttgctgttctcgacgccctcggcgatgcccttggcggcgagcagcgtgccgacatcgtagcgttcaaggaaggccgcgagggtttcggcgggcacctgggtatagactgccatgcgcgatcaggccgtttccagcccgcgcggcagcttgaaggacatgacctcggttgccgtcgttacggcttcctcatgcaccgtgaagcgctgcgccagcttgtcgatgacgccgcgcacaaggatttccggcgcgctggcgccggcggtgacgccgagcgtggcgacgccgtcgagccaggcgaagtcgatctcgtcggcggtctggatgagctgggcgcgggtgccggcgcgctcggcgacctcgacgaggcggagcgagttggaactgttaggcgcgccgatcaccagcacggcgtccgcccgcgcggcgatggccttggcggcttcctgccggttggaggtggcataacagatatcgtcgctgcgcggcgcctcgatgtccgggaagcggcgctggaggatcgccaccatcgcggcggtatcgtcgaccgagagcgtcgtctgggtgaggaaggcgagcgactggccgggggttggctgataagcctcggcatcggcctcggtctggagcagggtcatcgcgccctcgggcacctggccgaaggtgccgattacctccgggtggttggcgtggccgatgaacaggatatgccgcccggcgcgcaccagccgttcggcctggcggtggaccttggagacgagcgggcaggtcgcgtcgagatagtcgaggccgcgcgcctgagcgctggcgggaacgaccttgggcacgccgtgcgccgaaaagaccaccggccggccgtccggcacctcatccagctcgtcgacgaacacggcgccctttgagcgcagattgtcgaccacgaagcggttgtggacgatttcgtggcggacatagaccggcgcgccatatttctggagcgcgcgctcgacgatggtgatcgcgcggtccactccggcgcagaaaccgcgcggcgcggcgatgagcacgtgcagcgccggccggcttgcggcacccgcgctgctgctgtcggtcgttaatgaagcggccatgtcgggtcctttagggcgatgcggccgcgaggggaaggcgcttcctttcggttgcgcggccgggatgcggtgactaagaagcgcggactgtttggaagggccgggcgccgtgcaagcgcccgatacggaaggaaccgggaccatcgtgcggatcaccgctgcgtatagactagccgtcctgggaaccgccctggtcctgatcgcgggctgcgccaagcgcggcgatattgacgcggcggggcagggcatcatccagttccgctcggcctgcccgagcgttgccattcccgccaacaccggcgacatcaccctgttcgatccgcccgcgagccgcgaggccgaggcgatcgacgtggtggccaacatcaccgacgtgcgctcgacctgcaccacgggcgataaggacatctacacccaggtgagctacaccgtgaacgcgctgcggcgtgatgccggcccggcgcgcgaggtggagctgccggtcttttccacagtcgtgcgcggtgccacctcggtagtcgccaagcgcgtggccacggtgcggctggtctttgccgagggcgcgctacgcgcccatgcgcagggcaccgctgccgcctatgtggaccgcgccaccgcgacgctgccgcgcgagatcgagcaaatgattacccgcccgcgcaagtccggcgatgccgacgcagcgctcgacccgctggcgcggcccgaggtcaaggaggcgatccagcgaagcagcttcgagctgctcgtagggttcaacctgacccaggatcagctccgctacaatatcacccgctgaaacgcatccgtttccggcggccggacgaccgcagccaccctgtccccggaccgccgccgatgacaggacaaaccacgtcatgagtatcttcgttttcattgcttccgcgctcgacgggctgctctccgacatggaggaggctggcgagttgccggcggggctcgatcgccgggccgtcaccgttgaaccgccgcgcgacgccagccatggcgatatggcgaccaacgccgcgatggtgctcgccaagccggccggcaccaatccgcgcgcgctggccgagcagatcgcctcccgcatccgcgagatgccggaagtggcggcggtcgatatcgccggccccggcttcatcaacatgcggctggtgccgcacgcgtgggagggcgaactgcttgccgtccatgcgcagggcgccgattacggccgttcggccaagggcgcggggttgcgggtgaatgtggaatatgtctccgccaacccgaccgggccgatgcacatgggccattgccggggcgcggtggtaggcgacgcgctggcgacgctgctggagtttgccggctatgcagtgacgcgcgaatattacatcaacgatgccggcgcgcaggtgcagacgctcggccgctcggcgcatctgcgctaccgcgaggcgctgggcgaggcgatcggcgagattccggagggttattatcccggcgattatctggtgccgatcgggcaggcgctggcggccgagttcggcgaccgctacgtagcggcgccggagagcgcgtggctcgacctgttccgcgagaaggcggtcgccgcgatgatggacatgatccgcgccgatctggcgctactcggcatccatcatgacgtgttcgcttccgaggcggcggtgcagcgtgcagggcgtgtcgacgccgcattcgcacgactggagagcgaagggctgatctacaagggcgtgctggaaccgcccaagggcgagctgccggacgactgggaaccgaccgagatgacgctgttccgcgccacggaattcggcgacgacagcgaccggccggtgcgcaagtctgatggcggcctcacctatttcggcaccgatctcgcttatcatgcgcagaaggccgagagcgccgatatgctcatcgacatctggggtgcggaccatgccggcacggtcaagcgcatcaaggcggcggtggcggcgctgaccggcggcaaggtgccgttcgacgtcaagctggtgcagatggtgcggctgctgcgcgacggcgagccggtgaagatgagcaagcgcgccggcaatttcgtgacgctcgccgatgtggtgaaggaggtcggcaaggatgtcgtgcgcttcaccatgctcacccgcaaggccgatgcgcagatggatttcgacttcgccaaggtggtcgaggcgtcgaaggacaacccggttttctacgtgcaatatgctcatgcgcgcatcgcctcgctcggccggcgcgcggcggaagccttcccggacggcctgcccgagccggacctctcgcggctgggtgcggaggagctggggctgatccgccaactcgccaatttcccgcgcgtggtcgaggcggcggcggcggcgcgcgagccgcaccgcatcgccttcttcctctatgatctggcggcggatttccacggctggtggaacatgggcaacgatcatcccgagcgccgcgtcatcgtgcccgatgatgccgccatcaccgccgcccgacttttcttgagcaccggaatcggacaggttatcaggaacggcctggccctgatgggggtgacggcgctggaggagatgggctgatgacgggggagcaggcggacggcttcaatctggatgaggaggaccgcctgccctggctggagccggccagtgaggcggaggaagccgagggcgtgccgctggccaaggtgctgctgctcgtgttgctaggcttggtgttgctcgcggtgatcgtcggcggtggctactggctcaagaatcgcggtgggggtgatggcggcgacgcgaggctgatcgccgcagaaagcggcccctacaaggtgccggccaacgaggccgatgccaaggcgttcgatggcgagggcgatgccgcgttcgaggcgagcgagggcggcgaagcaaccgggcggatcgacgccagccaggtgccagaagcgccgcgcacggacctcgtgcccgccacggtcaaggcagaggaagcccccaagccggcggcggccgccaagccgagcgtggccgcgccggtcaagacggtcgcgaccgatgcgcgcaagccggcggcagcggcgacgagcgaggcaagcagcgaagggccgcgcatccagctcggcgccttcggttccagagcgctggccgaagatgtgtggaagaagatgtccggccgctttgactatctcgcgccgctcagccaccatgtcgagccggtcgagaccggcgggcgcacgctctatcgcctgcgcgtgtccgtggcctcgtcggcggatgccggcgcgacctgcggaaagctgcgcgtggcgggcgaaagctgcatggtggtgcgctgagacgcacggccggatggagcgcagacctgggcgcatgaaggtacaactgccatgaagcctgtcatcttcggcctggccggcgaaacggtgagcccggaggagcgcgccctgttccgcgcctgcgacccggcgggctatatcctgttcggccgcaacattcgcgaccgcgcccagctccgtgccctgaccgacagcctgcgcgagattgcggggcgcgccgatctgttcgtcatgatcgaccaggagggcggccgggtggcacggatgcgcccgcccgaatggccgaccttcccgcccgcgggtcagttcgccgcgctctacgacactgcgccttccagtgcgatcgaggcggcgcggtgcaacgcccgcgcgctgggcacgatgctggcggatgtgggtatcaccgccaacgccgcgccggtgctggacgtgcggcgggaaggcgccagcgacatcgtcggcgaccgggcattcggcgatgagccgatgcgggtcgccgcgctcggccgggcgacgctggatgggctgcgggagggcggtgtcgtcggcattgtcaagcatatgccgggccacggccgcgcgctggtcgacagccaccatgcgctgccgaccgtgacggccggcgcggatgagctagcgagcgacattacgccgttccgcacgctccaccgcgcgccggtggggatgaccgcgcatatcgtctataccgcctgggatgccgagcggccggcaagcctctcgccgcgcgtgatcggcgatatcatccggggtgaaatcggctttgacgggctgctaatgtctgatgatctcgacatgaaagccttgaacggcgcggctgatgagttggcggcgggtgtgatcgcggcgggctgcgatctggcgctcaactgctggggccgaatggacgagatgaccgtcatcgccgcgcggctgccggagatgagcgcggccgcacgcgagcggctcgacagagcgatggcgacgatcagcgccgggccggatgccgactggccgatggagcgggcgctggcgacgcgcgatgccctgttcgcgcgggcggcagcatgagcgaggaggcgctgcgtccggccggggaggccgatgcggtgttcgccgatgccgattgggccgag

SEQ ID NO: 3484 - DNA, 23216 bp, synthetic construct
  source 1..23216: mol_type = other DNA
  misc_feature 1..23216: note = Synthetic
tcgcgacccagatgctggaatcgatgatctcctcgccggtgccgacccgcgccgaggtctccgacgtggcgaccgcggtctacgagggcgcggatgccatcatgctgtccgcggaatccgctgccggtgccttcccgatcgatgccgtggccaccatgagcaagatcgccgagcaggccgagcgcgatccctattatgcgggcatcctgaacgcccagcgtcctgagccgcaggcaacgggcgccgacgcgatttccgcggcggcccgccagatcgcggaaacgctgaacctggccgccatcgtctgctacacggcttccggcgccacggcgctgcgtgccgctcgcgagcggccggaggtgcccctcgtcgccttgagcccgatcccgtcgaccgcgcgtcggctcgccctcgtctacggccttcacacggtcgtcagcgaggatgcggtggaccaggacgatatggtggagaaggcttgcaagttcgcgatccaggacgggttcgctgcggccggccagcgcatcatcatcatggctggcgtaccgttcggaacccgtggcgccaccaatctgctgcgcctcgccttcgccgacgacgtgaccgcccgatagggcggtcttcggcctaagccgccatcttcgggcgtcgtcgtcatcacggcgcggcgccgctcccggcaatatgccggctcccgcgctcccggccggccccaaagggtgtcgaggcccgacggtgtcaaggacggcgcctcaccctttcggagggcgctgcgtgggtgagcctgtcttcgcggcaggcgaccctgcggcctgcggtctgcggcgtcgcaccggcgcgacgggccgcgtcttctccgtcactttcccgagcacgtcgtccaccgcatcgagcaccgtcgccgtattggtgtgatggagcatgtggcctgcgcccttgagggtgacaagccgtgcctccggcaccagggcggcgaagcgccgcgcatgctgctcgatcgggacgacgtggtcggcatcgccggcgattaccgtgaccggaacgcggatgccggcgtaaagcggcgtgagcgccgccagccgttcgttcagggtggtgacctcgcggttcgtcgcgcgcatcgcctccggtcgcacggcgagaggcgcaccggtggcatccaccagcccaggcggcaccggctcgggcgcgaacacctgcgcgacggaactgtccagcatcgacagcgccagcggcgtggcgagcgtatcggtcagaaaagccccgacgaccggggcttccatcaatccgcgcgaccaggcgaagccgtcgtcccacgggtgtgtggcaggcgcgacgaggactgccccggccgcacggtcggcgtgctgcacggtgaacgccgccgccaccgagccaccgaaggaatggccgagtagtacggcgcgctcgatgccgagggcgtcgagcaactgcgcaacgagatcagcctgatcggcaaggccggcataggctcccgcctcgtcggcggtgtagccgtgcccggggcggtcgatgaagatcacacgcgcccgcccctcgagatcggcgcccagcgccgccagaggatcgcgcagcgaactcgctgtgccgtgcaggaccacgatcgtgggtgcgtttgcgtccttgcccggcaggtcgacgacgtgcaggtccagcccgcccacgggcagaaaggtgccgaccggcggaaactcgcgctcgatgcgctggcgcagccacgccgtcgtcatcgacatgccgaagggaccgaaggccatggcgccgaacccggtgaaggcctgccacagcgatccggtcacgtcgccagcggcgcgggtcggacggaggcgggatgaaacggagggggcttctacgccgggcaacgcggaggagggggtgaacttgttcagagctcttgcccctcaaccgctgtcgcgagttcgtcgcggcccttcagggcttcttccagatagggatggatggcgagggcggcgtcgaacgcctccagcgccgctttcttgcggtcgagatcgaccagaatcatgccgaggccggccattgcctgccaatggcgcggctccagggccagcgtgcgcctgagatcggccagcgccgggccgtagtcgtccatctggtactcgatcgtcgcccgcatcgaccatccttcggcataagacggcttcagccggacgacggcatcggcgaggtcgcgcgcgagcggcaggtcgttggcggcgagcgccagcgtcgcccggcgcatcaggaggtcgacggtgggactgccggaattgagccagcgggtttcgatctggcgcgcgaccacggccgcgctgtcggcgtccttcgccttggcgagccgcgcaaacagcgaatcgaggctcttcgccgtgtcgggtccctgggcgacggcggtggatgcgtccggtgtctggtccagggtcacacccgacggcaattcactcaaggcctggttcgggccggagccggcgggatcatccgcctgaggcgagcgctcctgggcgtcgtcctgcatcggcgcgtcgccatgaccgctcgcggcggtcgcaacaccgccggcgggcagaagcaaggcaagtgcgagaatggcagcgcggcagttcatgaggcaaatatgggccccgccatcgaattggtcaaaggccaatctcacgcgaggctgcccacgcccgaaaggcgcggtcgtgtcatgaccttcacgggaaaacgaaagcgcacccggaatcggtgattccgggtgcgcaatttcgattctggccggctgaaccgggcggcgtgccgcccgccaggcaatcagccctggcgcgccttgtagcgcggggccttcttgttgatgatgtagatgcgacccttgcggcgcacgaggcggttctcgcggtggcgcgtcagcagggacttcagcgagttcttgatcttcatcggtctggttccgtcgcgatcgttcgagcgtccacggtcgtgcgcaccggaagaagccctgaaatgtccgttcgagagacttcggcacctgaccccgctgccgacaccgtcggcggatcgtggcgcgcagcctcaattcgtgcagcgttctaagagagtggggccgccgctgtcaacgggaggcacgtcgaatccgtcgtttgaggccccctggcggtcgaatccgtggtccgccgatcaagaatcgtcgccttcgtcctcgctgccgaccgcccggccgggaatcacgtagcggcccgaaagccaccgattgaggtcgacgtcggcgcagcgcttcgagcagaacgggtggtaggccttcacggcgagcttgccgcagatcgggcagggcttgaactttcgctcgtccgccgcattctccggcgcctcgtcagcgccgctcacgctgcatcctccgccccgggggcgtcgccgccccaggattcgacgacgggataaccctcgcccgccagcaaggtcgcggtctcgtagatcggcagcccgacgacgccatagtgcgaaccgatgatctcgatcacgaaggcggcggcgaggccctgtatcgcgtagccgccggccttgcccttccattcgccggaggcgatgtaggcggcgatctccgctctggagagccgcttgaatttcacgcgggtctcgacgcgcttttcgcgcaccttgccgccgggcgtgatgaggcagatggcggtgacgacgcggtgcgtgcgcccggaaagccgggtcaggcaggcatgggcttcctcgctggtctcggccttcggcagcacccggcggccggtcgccaccacggtgtcggcgccgaggacgtaagcggcggtgcgttcctcggcgcggaagcgctcgcgcgccacctcggccttgcggcgggcgagccgcacggccagcgccacaggcgtctcgccttgttccgggctctcatcgagctccgccggaaacaggtgttcgggcacgacgccgatctgttccagcagcgccagccggcgcggggagcctgaggcgaggacgagcggggcgtgtggcgtcatcgaaaaggttccggtcttgccgcggcagccaggggcgtccttcgaacagacggagcggtccgcccggcaggaaatgtcacccggttcaatcttctgctttctgttctcgtccgcatcgcgtcgaccggacggatctatgctctagccaatcgggccgggaaataaaaccgcgacggggatgacgggacagcgcgccccggtctcagctgccgccccggacgggcggcatcaccaccgtcgcggcccggcacgcggagcgctccagggcctggcaggtgcggaacttcaggtccttcgtcagacacacccgcacctcggacagccgcccgcgcgagcacaggatcgagatgccgtccgccttcaggcccggattggcggtgaggaacgcgcgctccaccgccgccggggcaatggtgacgggggctgcgagcgcggcgaaggccggcggcacggccacggcgtcgcgcgcgctgcgcacggcggcgaaatagccggcggcatcgaggccggagcaggtgccgtgcttgttccactcatggcgcacgagacccgggctcggcatcaggtcgagcatcccgtcgaccgtcttgcggggcaggcggggcgggggcgagaggcagtcggacggatagccccattcgtattgcggccagagtccgtgcaccacgaacgcatagggccgtccgccgccacactgcatgccggcgttagcggaactgcgtccggcgcaataggtcggcgaccaggacagcgacagcacgtagaaatcgaactggccgggcacgccgttgcgcgcctccggcggctcggcggccagggagggctgaagcgcggccgcaatcaagccagcgccgaacaggcaccgccggacgatgcgcgcggtgacctctgcgacccttcgcaagcgcgtgccggccttcacgccggcaagcctgtctttgccccgtgcggagatcgttctgccgctcactgcgacggcggcatcatcacggtggagcagttggcgccgtagacgaaccacttatccttgcccgtcatgcaggtctccacgttccaggagacgccgacgaagccatagttctgcgcgatgacataataggccgggttgaccatgccgctcgacaaggcgagctgcgccgagcaatagcgcttggcgtacggattctcagggccgacgacgacgccagtttccagaatatggctggcgccctgcacggtcacgccgtcgtagtaggagggaatggcgcgggcgatcgagcgggcgacggcgctctgcaccgcactgtcgtcgcaggccggcaccggtgccttcgcggcggccatgcccggcagcggcgcgggggtcgccagatcggcagcgaaggccggctggacagcgagcgcggtgacggcgagaacgcaggcgagaagcggagaatggcgagcggacatcgtgtcggttccctgcggaggacgcggcgggcggctgcatggcaggcgtccgcaagacaagcaactgcaggccaaggccgaatcgctgcagcgcgggcagccgctccccttgtcccatgatggagaaaccatggtcgagcgcccgcatccggtcaagcgcaccggtgccacagcccggcgatttcgacggcagcgggccgttcgcccgcgggcagggcacgcgcacgcgggttccgtttgcgtcaggcggcttgcatacttataatggcgctttccccaatccgacatgacgtcgaaaaagggctctcgcggtggaaaacccgcgggacgcgcacaggaggagtttgaccgatggccacgccgctcatgccgaaggcgaccgccgtctggctcgtcgagaacacgtccctgaccttcgagcagatcgcgaatttctgcaagctgcacccgctcgaggtgaaggccatcgccgacggcgaggccgcccagggcatcaaggggctcgacccgatcctcaccggccagctcacgcgcgacgagatcaatcgcgcccagatcgaccgaggtcacgtcctgaagctcgccgatcgcaaggtgcgcgtgcccgagagcaagcgccgcggcccgcgctacaccccggtttcgaagcggcaggaccggccgaatgccatcctctggctgctgcgcaaccatccggagatgaaggacgcgcagatcatgcgcctcgtcggcaccaccaagtcgacgatcgcctcgatccgcgagcgcacccactggaacgcccagcacctgacggcgatggatccggtcagcctcggcctgtgcagccagatcgaactcgacctggaagtcgagaaggccgccaagtccgcaccgcgccgcgaggaagaggggaccggcctcggtaccctcatccccgtcgaggagacgacggcgccggacgcgctggcggcgttcgagcgcggtggtcgctcggagcccgaggaagaggaagagctcgacgcgcaggcggtgttcgccaagctcagcgccatgaagcgctcgcccgacgaggacgacgacgagcagtaaggggcgacggcgcctttgtccgatttcccgctcctccagggccgatctgatcggcttggtccggggagcgggttctctcccgtccgcccaccgccgcccatctgaccccgccacgggcggcgttttcgtggacggtcccgcggggagcgtcgcggacgccgtttccggcggcgtgagcgggcgggcgacggcccgatgcgccggctggccgcctcgccggttcccgacagaacggcctttgagcgtctcgcgatgaactatcgtcacgcctttcatgcaggcaacttcgccgacgtggtgaagcacgccgtgatcgcccgcatcatcgcgcacctcaggcggaaggacgcgccgttccgggtgatcgatacccacgccggcatcgggctgtacgatctctcggccgacgaggccgtccgcaccggcgaatggcgcgaggggatcggccgggtgatcgcggcccgtcgcccgccggaggtggaggcgctgctcgcgccctggctcgacgtcgtcgccgccgtgaacaccgagcacacggcgcccgatcgcgtcgacgacggaggcctgtccttctacccgggctcgccgttgctgatgcgccggctgctgcgtccgcaggacgcgctcacggcggtcgaattgcacccggccgactttcaggtcctcgccgatcttttctttcgcgaccgccaggtcaaggcggtcgaactcgacggctggctcgcgctcggctcgttcgtgccgccgaaggagcgtcgcggtctggtggtggtcgatccggccttcgaagagcccggcgagatggaacgcctcgccgacggcctgatccgcgcctacgggcgctggccgaccggcacctatatcggctggtatcccatcaagtccgtcgcgcaagttgacaccatgcaccgccgcctgctggacgcgggcatcggtgggcttctcgccattgacctgttcgtgcgaaccgtttcggacgggccgttgcccggggcggggctcgtggtgatcaatccgccgtggacgctgaaggacgaactcgccgtgcttatgccctggttccgcgatctgctggcccagggcgccggagctgccttccgcgtgctgccgctcgcggagcgctgacgaaagaccgccggtcggtctgcggccggttcatgcaggcgatcgggccgccaccgtcgtcgggccggagctttcgccggccgcggcctcccagaggccgggggtggcatcggccgtgttgccgtcgcggccatattggcggggcgagcggcccatgacgcgcttgaacgcggcgctgaacgcactttccgattcatagccgagcgccagcgcgatggccgagatcggctcgtctgtgttcacgagccggtcgccggcgagcagcatccgccagcgcgtcaggtagtccatcgcagaaagcccgaccatctgcttgaacttcagtgcgaacaccgaacgcgacatgccggcccgttccgccagcgcctgcagcgtccaccggcgtgccggctcggcatgcatggcgttgatcgccgcgctcatctgccggtcggcgagggcgaacagccagccgacgcccccctcgaccccctccgccagatgcagccgcagcgcctggacgagcacgaggtgcgcgaggtgctgggccaccaagaatccgcccggctgccggtcgcgcagttcctgccgcatccgctcgatggcccagcgcagcgcctccttgtcggcctccttgcgcaggtggaccaccgggggcagcatgccgagcaggacaccggcatgattgccggcaagggcgaaatggccgccgacgatggagaactccccgccgccgttgatggtggcgatgctgccgtttctccgggtggggaaatagacccgggcatcctcaggctcgaccgcgaggtcgctcgcgaggcggaacgagcggccgcgcggcagcaggaagcagtccccggtccgcaggcggaccggctgcggaaccccgtccaccgaaagccagcacgcaccgcccgccacgacatagcacttgatgccctcatgctggccgaagcggatggcccagtcgccaccggcatcgaacccgccgaacatgtagctgcgcggcttcagcaccgacagcacgtcggagagcgggtccatcatggggattgcctccacggacgttgccgcgatgcctcggacgatcgcgacagaaatacagaccttgcagcatagatcgtatttcgcgcgggtctatcttgctcgtcgcgccgcgaaagcggccgccaatcacgagaaggattcactcgatgcgtgtcttcgtcaccggagcgacgggcttcgtaggctccgcaatcgtgcgggaactgatcggcgcggggcatgaggtgcgcggccttgcacggtccgaggccggcgcgcgggcgctggccgaaaccggcgccgccgtccatcgcggcgatctgcaggatctggaaagcctccgccagggagcggccgggatggatgcggtgatccacacggccttcatccacgatttctcgcgcttcaaggagaactgcgaggtcgaccggcgcgtgatcggcgcgctcgcggatgctctgggatccgggcgtccgctgatcgtcacctccggcacgggcctgttgccctccggccggcttgcgaccgaagacgacgaggtgcccgcctctgccgccattccgaggatcgcctcggagcaggccgctgcggaggcatccgcccgtggtgtcgacgtgcgggtggtgcggctgccgccctccgtccacggtgacggcgaccacggcttcgtgccgctgctgatcggcctcgcgcgggagaagggcctctccgcctatatcggcgagggcggcaatgtctggccggcggtgcaccgcttcgacgcggcccggctctaccggctcgtgctggaaaaggggacggcgggcgcccgcttccatggtgtcgccgaggacggcgtgccgttccgccggatcgccgaggtgatcggccgccggctgaacctgccggtcatgtccctgagcggcgaagatgtggcggcgcatttcggctggttcgcgcatttcgccgggatcgacaatcgtgccacgggccacaagacccgggatgctctcagctggcgccccgaggaggcgggcctgatcgaggacctcgaccgcccggcctatttcgcgacgtgacactgcaggcgcggtgcaggccgcatccgggttgcatccgcacactgcgcgggcataggcgaagccgctggcggaaatggaaaaggcgaggccgtagcctcgcccttatttggtgcagccaagctgcttgttaacagctggcctgcgatttctgaacgatcgatcttcggcaaagcacgcgcgcaagtcaacatcgatcctcgtctttacggcgatctgcaattccggattatgattctcgcaactttgagtcgttcggcgttccgatgccgggtgaaaagggggcgagacatggctcgggagctgggcatcgacatcggcaccaacagcatcggctggtgcctgatcggggacgggcgcatcgtcgatatcggcgtgcgcatcttcggcgacgggcgcgatccgaagtcgagggcgtcgcttgccgtggaccggcgggtggcgagggcgatgcggcggcggcgggatcgctatctcggccgtcgcgcggcctttctcgccaggctgatcgaacacgggctgatgccgggcgacctgccggacccgtccatccgtcagcgtcgcgggcggcagccggtgccgaacgacgcggcccgcgcgctcgccgatctcaatccctacgacctgcgccgccgcgcgctgacggagcggctcgacccccacgagatcggccgcgccctgttcgcgctcggccagcggcgcggcttcaggagcaaccgcaaggccgaccgccgccgcaaagacaacgaggatggcaagatcgccaccggcgcgcaggcgctggatagcgcgctcgatggccgcaccctcggcgccttcctcgcagaccgcatcgccgagggcaggccggcccgcgtgcgcatgggcggcgagaaccaggcctacgacttctatccgcagcgccgccatgtcgaggccgagttcgaggccatctggcaggcccaggccgcccaccatccgggccttatgaccgaggccgcacgcactgcgctccaccgcatcctgttcttccagcggccgctgaaggcggtggaggtcggctactgcaccttcgccggcatggcgggggttccggcggacgagcggcggctggcgaaatcgcaccccctgttccaggagcggcggctctatgaggaggtgaatcatctccgcatcgtcgtccccggtgccggggagcgtccgctcaccaggtccgagcgcgacaagctgatcatgaagcttcaggaccggaagaaggtcagcttcgacagcctcgccaagctgttgaaactcggcgacggcgagcgcttcaacaagcagagcgacacccgcaaggacctcgccggcaacgaggtgcgcgccgaactttccgacaggaagcggttcggcccgcgctggaacggctttggcctcgacgagcagctgcggatcatcgaccggctggagaacgaggagaatccggacgcgctgctggcgtggctgaaggcggagtacgacctcgacgatgcggcggcggcggccgtcgccgccgcgcacctgcccgagggacatggccgcttcggcgaaacggcgacgcggcggctgctcgagcacttgcgggaggacgtcgtcacctacgacaaggcggcgcacgccgccggcttccaccacagcgaccaccgcaccggggagagcttcgatgccttgccctattatggcgaggtgctcgcccgcgacatcgcgccgggcaaggctgaatatgccgatccgctggaacggcgtttcggcaagatcaccaacccgacggttcacatcgggatgcgccagcttcagaagctggtgaacgccgtgatcgcggtgcacggcaagccggaccggatcgtggtcgaactggcgcgcgaactgaagctgaacgacgaggagcgcgaggaacaccgccggcgcatccggcgcgacaccgaggcggccgcggcccgcggcgacaagctgaaagccgaagggattgccgataccggcgcgaaccgggcgctgctgcggctgtgggaggaggcgaacccggccaacccgatggatcgccgctgtccctattgcggcaagcccatcggcatccgtcagctcttcaccggcgaggcggatatcgaccacgtcattccctattcccgctcgctcgacgacagcgcgggcaacaaggtcgtggctcaccgctcctgcaaccgggagaagggcaaccagacgccgttcgagcgctggggcggcgacccggagcggtgggacaccatcagcgcgcaggtcgcgcggatgcacaggtcgaagcaatggcgcttcgggccggacgcggcggagcgcgtcgagcgcgacggcgggttcatcgcccgccagctcacggacacgcaatatctctcccgcctggccggcaaatatctgcgctgcctctacccgaccgccgagagcggccgcgtcgacgtgattcccggccggatgaccgcgatgctcaggcgcatctggggcctcaacagcctgctgcccgaccacaacttcgtcgagaacgagcattcgaacgcgcccaagaaccggctggaccatcgccaccacgccatcgacgccgcggtggccgcggtgactgacaggggcctgatgcagcggatcgcctatgccgccgcccgcgccgaggaaaaggaactcgaccgcctgtttgaggatctggcgcagccctgggacgggttccgcgaggaactgcgcggccggctcggccgcgtccgcgccagccacaagcccgatcacggccgcaagggaaaaccctcgcggaaccgcgacgtcaccgccggccggcttcacaacgacaccgcctatggcctgaccggggagatggcggcggacggcaagacgccgatcgtggtgcatcgcgtgccgctcgcgagcctcaagccgggcgacatcctcgatcccggccgcatcccggacgacgccttgcgccaggccctgttcgaggcgacgcgcgatcatgccggcaaggcgttcgagcaggcgctggcacgcttcgcgaaggagcatcccgtcttcaggggcatccgccgcgtgcgggtgcgcgagccgctcaacgtcatcccgatccgcgaccgcgagggccggccctacaaggcctacaagggtgacgccaacgcgcgcttcgatgtgtggcggctgccggacggcaagtggaaggcggacgtcatctcccagttcgaggcccaccgccccgacaccggggaccgccgtcctcacccggcggcgaggaaggtgctgagcctgcgccagaacgacgtgatcgcgatcgagcgggatggcgcccccgtcgagctgctgcgtgtcgtgggactgaaccagcagggcaacctgacactcgtgccgcccaacgaggccggtccgctgaaggcgcgcgacaaggaggccaacgatgtcgatccgttcaagtacacctatctcgcggcaagcacgttgaagaagctgaaggcgcgccaggtccgcatcgatccgctcggccgggtcttcgatcccggcccgcgcgagtagaggagggcggcatggagcggatcgtcgatatcgcgagcgacgggctgcacctgtccgtccatcgcggctttctcctggtcgagaaggaccgcgtcgaggtcggccgcatcgcgctcgacgacatccatgccgtcgtcgtccatgcctatggcgtgacaggagcatatcccgttcagatcggatcgatctgaacgacaaggatatgctcaagcttttgaatctggagcgatttcttgtcgatctgatgttccatcagatcggaaagcgctctggagcggtaatctcgtcgctgggctcgccgggcgcggtgcgccgatcgtgttctgcggcgcgaaccattcgcccgttgccgtcaccttgccgctggaaggacaccacgcgcagagcgcgcggatgcaggcgcaactcggcgcgtcgaagccgctgatgaagcagctctggcggaagatcgtcgcggccaagatcgcgatgcagggttcgctgcttgccgcgcgcggcatcgagggtacggaggcctttcccttgatcgcccggcgcgtgagttccggcgacaaggagaacctggaggcacaagctgcacgccgctactggccgcttctgatgggagcgcggtttcgccgcgaccgcgacagcggcggcgtcaacgggctgctcaactacggctacgcggtgatgcgggcgacatgcgcccgcgccgtggtggccgccgggctgcatcccaccctcggcatccagcattccaatcgtggtaatgcgttcgccctggccgacgatctcgtcgaaccgttccggcctttggtcgacgctctggccgagaccatggcgcgggagggtatcgaggtgctggacccggcgatgaagcggcgtttcgcgcgcctgatcgccttcgatctcaggattgcgggcgaggcgtcacccgtctccgtcgccgcggcccggctcgcgctgtcgcttgcccgggcgttcgaaaccggccgcgccgagcttgcattgttcgacccgccgacggcgatggagtgggatgcggctggccgtatcgacgatggcaacccgtgatgcggggcgagccatgatgcgggggcgacccgtgagcgcgggcgatgcggcacacctgagcgggtaccggctgatgtggatcttcgtgatgttcgacttgccggtgggcacgaagaagcagatgcgggatgcgacgcggtttcgcacgttcctgctcgacgacggctacgagatgagccagttttctgtctatgcgcgcttctgcaacggccgcgacagcttcgaagcacacttgaagcggatcgaggccaatctaccggaaaagggagacgttcatgtgctcaccttcaccgaccggcagtatgaggcgatcgtccgattctccagccagcggcgccagaagccccgcaagaatcccgatcagctggcactgttctagttatgtccggcggaacctgccgaccagatgcctcgatttcccgtttgaaaacaaagggttatcgacgcatctggtttagcagttcagaaatcgcaggccaaccgcaacgccccttcgcactcgacgcatcggcgggctggtttagcagttcagaaatcgcaggccaaccgcaacatcgagccatggttacagcgcggccatctcggtttagcagttcagaaatcgcaggccaaccgcaacgtgacgcgggcaatcgagacgttccggctcggtttagcagttcagaaatcgcaggccaaccgcaaccaccgccatcgaaacccaccgcctcaaccaggtttagcagttcagaaatcgcaggccaaccgcaaccgcgagaagacggcccatatctgggagcgcggtttagcagttcagaaatcgcaggccaaccgcaaccaaactctcgtgatggtaagcaatctccggggtttagcagttcagaaatcgcaggccaaccgcaacatctcgacggttgagcccggcgccgccgtgagtttagcagttcagaaatccccggccaaccaaccgcgcctcagcctgccttgccgcgcccggccgagggccaggtcgcgaggacgtggtcgatgacggcgatgaggtcggcgcgcgtcgcgcccgccttggcctggatggccatgccctgcgctaccgtcatgacgaagcgcgccagtgccgcgcaatcggcgccggaggccagttcgccctcggcgcgcgcgcgctccagccgctccttcaggtccgcctccgcggcgacgcggcgcctgaccagttcctggcggatggattcggtctcgtccgagcacgcgagagcgccgttgatgccgaggcagccgcgggcgtgcgcgtgcatggtctgcacctccgccgagccgacgagaatgcgccggaccacggcgcggctgtccggctcgtccagcgcctcgcgcatgaaggccatgtatttggcgtcgtagcgcgccaccgcgcggcgaaacagcgcctccttgttgccgaaggcggcatagagcccggggcgcgccacgccggtggcctgcgtcaggtcctcgaacgaggcgccctcatagcccttgcgccagaacacgcacagcgccgcatccagcgcctggtccacgtcgaattcccggtgtcgtcccatcgcggcctcgtttcgataccgctcgttataaaacgattggcgcccgccgtccatgtaaagtaacgatcgttatcgtaacggttggtatcgaatcagttcgcgccgatccttgccgccgcctcgttcgggcggcgccccggtttcgcacgcctcggcgcgtgccgcggccggcatggcggaacccctccgcctgccacccttcatggagtttcagatgagcagaacactcgcgggcaaggttgccctcgtcaccggcggctcgcgcggccttggcgcggcgacggccgcggccctcgccgatgccggcgcggatgtggcgatcagctatgtcgcctcggcggagaaggcggcggcggtcgtcgcggacctcaaggcgcggggcgtccgcgccgccgcgatccgggcggaccagggcgatccggcgggcgccgaaccactggtgcgcgctgtggtggacacgttcggccggctcgacattctcgtcaacaatgccggcgtcgcggtgcagggccacaccatcgacgatccggcgatcgacaatgccgccatggaccggcagtgggcggtgaacaccgccggcgtgatcgcgaacatccgcgccgccgtgcgggtgctgcccgagggcggccgcatcatctcggtcggctccgggctcggcacccgcgtggcgttcccgttgacgacggattatgccgccaccaaggccgccatcgtcggctacaccatgggcgcggcgcgcgatctcggcccccgcggcatcaccgtcaacgtggtgcagccgggtctgatggacaccgacatggccgccgcctcgaaggacaacctgccgcccatcgtgatggattctctcgcgatccgccgcttcgcgcggctggaggaggtggcggcgaccatcgtcttcctcgccggccccgatgccggctacatcaccggcgccgtgatcgacgtgagcggcggcttcaccgcctgaccgcgccggcccgcccgtgcggaagaggcgggcgaggggagcatggcggtggccgtgctccccgtcgtgcggatcggaaagcgctctagaggcagcccgcacggctcagcatgtcctcgacgaggatgggggtcgccgcggtcttgccccacgtcgccttgtccgtgcgagcgaacgcggcgagggctgcatcgctggaaatgccgagcgggcgggaacaggtcatcctgatggaggaacgccgcccggcttcggccaccagcaggccggtggtttccccgacgccggcgagataggccatcgccgcattccgagcggcgttgtccgttggcgcgcgctcgatcagctcgacgacctgggcgacggagatcgccccggtaggtgtggaaggggtggcctgagccggcagggcgaggccgagcgacagcgtcagcagcgtggcgagtctggcgttcatgggcaaactccattatcgtaaaacaacaattcacgcttatcagcggccaaagattattgtcaaacaataatttttggtccataactcgatcccgaaccggagggggagagagatgaagaaccgaggcggtctcgtcttcgcgggcgaggtgggggcgcaggcggcccatcggccgtcgccgcgcgcgcggatcgcgttcagcgcgctcggcgtgttggccctggggctggcggttttgttgccggcgctggcgatcggctactggctggccggcgcagggcatgtgggctacggcgccgccatgcagttcgtcgcgatcgcgacggcgctgctgcatctcctgcccatgagctggggtttgctgcggctgcgcgtgtgcctcgcgcagttcgcggcggggcggccgttcgctgccgaaggcatcgccgggctgcgcgacttcgccctgggaaccggattgagcgccctggcgaagccgtttgccggcatgctgtttacgctggcgctgggctggaacggtggcccgaagcagatcgccatcgagatcagctccgacgtgatgatcctggccgtgtttgcgggcgtcgtcgcgtcgttggcctgggccatggaaaaggcggccgcgctcgccgaagaaaacagtcagttcatctgatcgccatgcccatcaaagtgaaccttgccgcggtgctggcgcagcgcaacgtaaaatccaaagaactggccgaatatatcggcatcaccgaagccaatctcagcctgctccggcagggcaaggtcaaaggcatgcgcttcgacacactggacgcgatctgccgctacctcgcctgccagccgggcgatattctcacctatgaacccgacaacgaaacagccgcgacaccggagccgtgacgcaagcccgccaccgggcatcgcgcgcgatgtgaacggggcgactagagggcctgcggcctccgctccggacaggccggggcggcgcgggcatggagccatcgattttcgacaggaacaggcaataaacagaggggatcgggctaggttatcagcggaaagacgcccatttcaggcggctgagacaggtcgcatcgtcgtggtgcgaatttctggtggcttggaatgaccatcgtcagaagcgaaaccaccgttgaagatccgatgatcgcccttgctcgcgaccggatcgccgagatcgtcaaacgtcacctgagcacgaacgggcgacctgaaacggctgtggccggtcttacgattcatgggaagaccggtcccgcggagccggcgtctttcttctacgatccatcgttcgccctgatcgcccgcggatcgaagcgcgttgttctggggggcgagagctatgtgtacgatgaatctcacttcctgatgacggcggtcggtctgcccaccatcgttcaggttctgaatgcctccgagtcccagccctattattcgatcaaactgagcatcgacctcgatttggcgcgggagctcatttcagagctcgcccaatacggcgcgaaagcgccggtcgccagtatgggtatggccatcggcccggtgacgccgtctcttgctctcgccgcaatgcgcctgaccgaactgctggatcggcctcaagacattcccgcccttgcacggtctctccagcgtgaaatcctctatcacgttctgatcagcccgattggagatcgcctgcgccaagccgtccagcttgacgcgcgcacgagcagggtcgcgaccgcaattcagtggatccgcggcaatttcgcggaagcactgaggatcgaagaactcgccgcgatggcgggcatgggagaatcgaccctgcaccatcatttccgggccatcaccgcgatgagccccctgcaataccagaagcatctgcggctgcacgaagctaggcggctgatggtcaacgatcggatcgatgcgggcctcgccgctttcaaggtcgggtacgagagctccacccagttcaatcgcgaatatagccggctgttcggcgcccccccgaagcgcgacgtcaccgcgatcctgtcaaacgatgtggcagtccgccaacgggcgacgccctcactgtgacgcaactgattccgggattccggctggcccgtgaaagaacgcttggctgcaagagcaacaggcaagaaatgggcagcttcgagctaccgctctagagcatatcctgttcagattgaaccgatctgaacgacaaggatatgctcaagctcttaaatctggagcgatttcttgtcgatctgatgattccatcagatcggaaagctctctaaggaaacgaactcccatcatccacacggtcaagcgtgatggacgccgtcggatcggagggttcgcacggccgacatcgcgcgccaaccggccactgtgccatgggcgcatccggccatgggcgcacgcatccgcggcgcccgccgttgctgcggatggtgcgttcggtcggccggctgctgcgtctttcgagacctgattgaaccgatatctgctggcacgaccgcctgcgagacttctcgaaaaagtggaaaatgtagatgactcatctcaagggaaagaccgccctcattaccggggcgtcgagcggcatcggcgcggcaacggcgctgaaactggcaaaggccggcgttaaggtcggcatcgcagcgaggcgggccgatcggctcgatgctctgaaggcggagatcgacggccaaggtggcgaggcactcgttctcgaactcgatgtggcagatccagatgcggtccgctcgggtgtcgatcgtttcatgcagatgttcgacgtgatcgacatcctcttcaacaacgcgggtgtcatgccggtggcggagatcgatcagttcaaggtcgatgagtggaatgccatggtcgatatcaacatcaagggtgtgctaaacatgacggccgccgtcctgccgcacatgatccgccagcattccggccatatcttcaacacatcctctatcgctggacgaaaggttttcgggccgggttacacggtctattccgccaccaaattcgccgtcagcgctttcagcgaaggactgcggatggaggtcgggaaaaagcacaacatccgtgtgaccagcatccagcccggagccgtcgccaccgaactgcccgaacagaccacagatccggaaaagcgccggcagctcgacgactacagagccgccatcacgtttctcgacccggacgatatcgctgacacgttgctttttgcggcccaggctcccgcccacgtcaatgtcgccgagctgttcgtcctgccgaccgagcaaatttgatcatcggccaaaccggcacgcgtccggaaacacgttgacacgcaggcactggcgcggaccttcgaggccgaagcgcaatcacataagattgggcaaggccgcgaggacggaatcggcagggagagcctacggcctcgccagcatctggggataggatcgaagggcgaactgctgcgagccctgacgtcggtctctagcggcagatcggtagggaccggcgcgcccactcgcgggctgaaatggcggagagagagggattcgaaccctcgatacggtttcccgtatacacgcgttccaggcgtgcgccttcaaccactcggccacctctccgggaagcaggccggtacgtgtccgaggctgctcgcggcggcactataatcatcggcggcgccgacgcaaggccacggcggcgttctttcgaaaatgcggtggatggcggtggagagctttattaatatcttgaaaaaagagggatttttcgcccggccgcggcggccgggcggggggcgtgtcacgcttgggtgggagaaggcggctaaatcacgccccgttcgcatcgaggtgtcccgagcggccggggtgtctccaagctcttgattcggcgccgttttcccttggtccgacggggctatcggatcggaaggcgttccacgcggcgccgatggccgtctatcggacggcgaccccggccggcgatggtgtttggtcgggctgcgagggggcggacatcggcggtcccgggccggggggcttcattcgccgtgttccgcggctcgaattggtctatgagcggggaggcgtgcacgggccagcctgccgggccttcttcggaacacccgcgcctgcccgttgcgtgccgccgctccgcttcatcccccgtgctctgatcgactgctgccgcccatgaccgatccccagtccgcctccatcaatccggcttccgcccggccccagggcgagccgccgcccttcgtcgcgatcgagggcgatgatcgcaccggcatcctcgtgatctgcgaccatgcgtcgaaccgggtaccggcggcctatggcggcctcggcctgccggcggcggagttcgagcgtcatatcggctatgatatcggtgcggcggcggtgacggaggcgctagccgcccggctcggagcgccggcgctgatgacgacgttctcccgcctgctgatcgatcccaatcgcggcgaggacgatccgaccctggtgatgcggctctccgacggtgcggtggtgccgggcaatgcacggatcgatgcgacggagcgcgagctgcggctcgagacctatcatcggccctaccaacgtgcgatcgaggcccggctcgattccatgctggcggccgggatcgtcccgctggtggtctcgatccacagcttcacgccggtctggcgcggtacgccgcggccgtggcatgcggcggtgctgtgggacagcgatccgcgtgccgcactgccgatgatcgcgcagcttcgggccgatccggcgctcgtcgtcggcgacaacgagccctatgacggcgccctgcgcggcgacacgctctatcgccacgccacccgccgcggcattgcccatgcgctgctggagatccggcaggacctcatcgccgatcgcggcggcgccacggcctgggccgagcggctggtaccgatcgtgcaggcgatccgcgcccgcccggacgtggccgaaatccgtcatttcggttcgagaaccggtccggtcgagatcggctgaggcggtcgcgcgacgtgcggctgggcgcaacaggccggcggtttgcagcggcggcgcaaagcgtctttaatccctgcggcattgaaggacgggccaggaccggagagcgacatgaacgacgtggcgaagacagcgcctgtcgagggcacggacggggcgccggcactggacgaggcgacccggacggcgctggaggcggcggcctttcgcaggctcgtcgcgcatctgagggcgcggccggacgtccagaacatcgacctgatgaatctcgccggcttctgccgcaactgcctgtcgaactggtatcgcgaggcggcggaggagcgtggcatcgccctcgacaaggaggcctcgcgcgagatcgtctacggcatgccctacgaggactggaaggcgcttcaccagcgcgaggcgagcgaagcgcagcaaaaggccttcaaggccgcctccggccattgaggggcgaggcgccggtgagcttggccgagcgtcgctctccgcgcgccgaagcatgggctgcccggtcttgcagggcgaacggcggagcggcgggcggccaggccgggcaccaccagccggatgcatgcggttcggggttgccaccttcccggccttgcttcaggagtgtcgggcagaggcgaggccgggcgtctcaccggccaccgcgctagcctcgtaccgcccgccccggtccgaaacggacgcagcggcgcggttcaagcttatgatctccggcatgttccctcgccggccttcggccgggaacacgccggagacgacgtgtcgacgtgcaatcgaggtacggaagaaaacatgaccaccgatatcgccgaaaccggcgtggccgcggaagagctgaagcagttcatagagcgcatcgagcggctcgaggaagagaagaagggcatcgcggacg

SEQ ID NO: 3485 - DNA, 23213 bp, synthetic construct
  misc_feature 1..23213: note = Synthetic
  source 1..23213: mol_type = other DNA
tgagccattgaccagactgcgcttgaccatgagctgctcgcggccaatgaattccatggctcggccagtcgccagaacagtctggacgatgtcgtcggctgacagcgcttgctcgcgttcgagacccagcgcccggcacagttccggaacgcaatggaccggaacctcccggccaagcagcgagcggccatccgctgccgatatgcgactgaccctcacgaaatcggacgggagcttgtcccagaccggcagcagaaggcccgtcgcaagatagaggcgctcgcgcttgtggctggtccgcgcttcctcaacttcggctgcccaggcttcgcggaaagcgtcgacggagattccctcccagctgctctcagccagctgatcctcggtgatgtggctgcgcttcagcggacgcagcaattcgaagcgggacacgcgcgtgccatcatcggcaagaatgctgcgggcgggtacgagcaagccaacccggcctgaacgcgcgttccgaacaggttgctgccgttgcccggcgaggccgtagagctcttcgagcctcttcagcgtcagcggcttcagggcccgggcgatttccagttccagcagatgggtggtcgcgcccgacgccggatccgtgcgcagcagcgtgtccgacaggaccgtgaagtcctcgaccgcgatggtctcaaggccgagatcgagcgtgccggcctgacgcgcggcatcaatccgcgcgtcaaccagccccatgaactcatcgaagatcgcgttctgtaaggcgatgggaagtgcgaggatgcgattgagccagcgctggatcgacggcaggtcatcgaccatcgacccgtcgggtgcttcaatcctgaggcctgtcaggtcctgaaatcgcccgaggctgaccgcatcgagcttgccgatgaacaacaagccgaaccagcggtggagcgcctccttgacgtagatgctctcgagattgtcggccggatcgaacaggttctgtccgccggtctggcgctgcccgcgcgtcagggccccgaggctgtcgagccgccgcgcgatcgtcgagatgaagcggcgctcgccgcggacatcggtcgtcaccggcttgaatagcggcgctgatgcctgattggtgcgattggtccgtccgagcccctggattgcggcgtcagcccgccatcctggctcgagcaggaaatgaacgcggcgggcctggttcttggctgcgagatcggcatggtagctgcgccccgttcccccggcgtcggaaaagacgaggatgcgcttgctgccatccatgaaggcctgggtttcagcgacgttcgcgcgcggcgatcgggattggagtttctgatggccatcgccgccaatgatcagccgccgcgtacggccggtcacttccgccacctgatcgacgccgaagcgttcgatgatggcgtcaagcgcagtcgcgatgggcggcaaggcgcagagctgctcgatcatccggttgcgggcggcgagtgccgatcggcatagtactggcgcgccttgctcatcgctcatcggttctgagcgaggattgccgttttcatcggtgaagaccgccatcagccggacaggaaagctcttggcgaggtaatcgatcacatattcccgcggggacagatcgatctccagcgcttcgcgctcctcatcagagaggtcggcaagccgacgattgagcatggcttctgcggtcgagaccagctggacgaccacggcgttcccctcgccaatcgctgcgtcgatagctggtaacaggctgggcagcttcatcgacagaagcagctgcgcgaagaagcgctgcttggttccctcgaagatcgagagcgctgcggacttggcaccggaattgagcgtcccgccggtttcgctatcgacgatccgcgtggcttccagcgcttctcggaggttggcgtgaatgatcgcccaggcctcggcataggcgtcatagaccgcaatctgatcctcgctcaggcgatgctcgaggatttcgtattcgacgccggcgaaggacaatgcgcgcgcggtgtagaggccgagcgacttgaggtcccgcgcaaccagttccatcgctgcgatcccgccgtcacgaatgtcggcgacgaacgcctcgcgattggcgaaggctgtctccggaccccacaggccaaggcgcgtggcataggccagattgttgacgtctgatgcacctgttgccgaggcgtagagcacgcgtgcccgcggcaggaggttctgcaggcgcacgccagcgataccctgctccgatcccttgaccttgcctcgcgatccttcgccgccagcagcattggccatggcgtgcgcctcgtcgaacacgatcacgccgtcgaagtcatcacccgcccaggcgaggatctggtcgaggcgggtcgcatcgtttcggcccgaccgcagggtcgggtaggtcacgaagagaatgccatcgcgcatggcgatgggggtgccgagcttccaggatgcgagcggctggatgtcgatcgggaggccacccagcgcagcccagtcgcgccgggcatcttcgagcagcgcctcgttcttcgagatccagatatggcggcgctccccgcgcacccagcgatcgaggatgacgctggcaacctgacggcccttcccggcgcccgttccgtccccgaggaaatagcccaggcggtacgtctggccttccgcagatgccttgagcgaacagcccttgtcctcgggctcgaaccgaccgggtagatcgcgcgcatgggcgctagccgcgtagatcagtgtctctgcctgggcggccgacagcagtcccttggcaatcattccgtcgggcagctggggcacagcttcgggaatcggtgcggcgatcgaccccatggcgacggactcaacgagcggcgttggatgttccgccgcgccatcgatcacgattctgctcggacgatagggcagatagtggccgacctgaggggcaagcggcgaaggggtttcgagggtctggtacgtgagcgacccgatggcggatgctgcaggagtgattctggtcggtgtcggcagtggcctgcgcggcgcggccaccaggcgaaacggcgcacgagccgggaggctcgattgctcgggaacagcctccaagctgccgcgagccggcagagcctcgacaagatcgaccagctggcgaaagtcgtttgtgcggatagcgacaggctcatgggagtcgtccaccttgtcgaacaccaacagccgcgtggttatgccggtgccctgcctgacgaacgcgcgttcgacggcggcattgagccgcagcgaaactggccccttcagacccgccagaaacctcgcgcaatcgaaccattcgggcatgattgcgaaaagccgaccgccggacgccagacggttccaggccgacctcaggtggcgcgagccggtgcgactatcgtgccctcgctcgatgccgtgcgaatagggagggttcatcaacacgacgcttggggtgatggcgggatcaagcagttcgtcgatcagctcagcgtcatgaccggccactcgggcagccgggaacagggcattcaggcagtcgcggcggagcggcgagatttcgttgagggcaaggcgcgagccggccttggcggcccagaccgcgagcatgcccgttccggccgagggttccagcacaagctcgccagtggccagcgcgcaagctcgggcagcaagccaggcaaggcgcggcggcgtcgcaaactgctgccattcgatctgctcgtcgctgcgattggtctgggtcggcagtcgggcatcgagggagcagaagaactgttccgcctcgtcgatcgacgccgagagcagaatctgatccgctgctcgcaggtattgaacctgtgccagctcggtggctgcatgggcgtcacgaactgaccaacgcccgagagcatcgctccccccgaagtgctctgtcatgatgcgcgtgacgtcgctgcgtgaaagcgcgcggcctgccgccagctcagaagccatggtctgggccgccatcacaacaacgggcggtgatgggtcatcgaatgcaaaggcgagggaagaattggacatgggaacctcctgacgaggtcctgcggcgggcaggcctcaatcagccaaaggccccctcccctctgcccgatagatcaggtttttgggcaagccgcgactgcagctcatcgttccagtcaaaaccaggcgaggccggtgctcgcgagtggatgacacgattaggcgtagcataggccttcagcgctcgctcctcggcgagagcgcctccggcatcattgtcgatgaacaggtagagctcgcgcacgctctccgggatcgaaaccagaccgaaccgctcgtttccaagcgtcgcccagcacgggatcccgaagagctgcatggctgacagggcgctctcgataccttcggcaagacccagacgcccctgcactgccggcgcaagtctgacggcaccacagccaagggtgccaagcgcacgcttgggccgctcgaaaccggccagcttgccgctcgccacgtcgagaaatgtcctatgtactgcgataacgccaatgtcagtcgtgactgcggccagcatcgcagggagaaacttaactgccccgcgtggcccgagcggcgtacgttcaaggtagcggaactggtcagatgcgcgctggagaccgcgctgtccgagatatcgttcgaccgggctgtcggagatcgccgaagccgattgccacaagcgtcgcgcattgggactgaagtcactctgattttgccgatcagctgttccagggccagaaccatcaaagagctctcggctgcgaacgccctggcgatccaatgcagcaatgacgtcctcattcgaacatccggcgaagcaatggaacaggatggcctttcgccccaaggtcacgctgagcgacggtgtgcggtcgtcgtgggcaggacagcagcacatgcccttgccctggcgccatgttcccttgaggcgtacgataatcgtgcgggcacggcgttcgagttgatgacttttctctagctggggcatcgacctactccggttgaggtgccctccccgtgcagcctccgctctgcaccagcgccaaagcattttcctacatcgtttgttctttatatgttctcactcgattcggctatagaaggatcgagaaatgacaataaaagctctcttgatcggtggcattgccatcgcatcagccatgcctgccaatgcccaagaactgccaatgccagatttaccagagcaacatgccggtccttcaggcggctttcggattgccgaagcatcgaacggatttcagttggtcgagcatgggttctggcaatccgcgcaagccgccccagcaccaagttcgagcgttgcagaaaatggacgggtcaacctgccgcacagatacgagcccaaggccaaaactgccgcatccgggtttcggcgggcgagctacctgccccacgtttatgcggcggaagcgaagtattcattgcctaccggcctgctcgacgcgctcgtctggacggaatcccgctataacccccttgctgtcagcccggcaggcgctgcgggccttggccagctgatgccagcaacggcaaaggaacttggcgtcttcaatcgctttgaccccatggccaatatcttcggcgcggcgcggtatctgaggcagatgctcgacaggttcggcgtggttcacctcgctgtcgcagcctacaatgccggtccaggtgcagtcgaacgcgcgggcgggataccgcggaatggcgaaacgcccggatatgtccgcgacgtccttcgctattggcgcttttagcggtttatccgcaagttagccgaaacagaggaaatcgacggattgttgccgggctggaccattttgcaggcaagcgactgcacgggagtttagccgcttttggcctcgacggggtacttggctacaatctgcattacctccttgccccacaacgccaacgcctcgcgcttctcgttggtatactggtgtcggtgataaacccccgccacaccggccatagctgatcctgactggtgattgaggaccgcttcagaaaccaccagaggtatgccgagacgctggaggccagttgccaccgtccgccgaatgtcatgcattgtgaagtgaccggcttcgtagccgagcttctcgtccacgcttgctctgatccgcttccatgctttcgagaggccgctaacgctgttcgtgctggtgaccttcgatgccaacagaatctgggattgcttgtgagcatcgtcaggatcgatccctgcggccacgaagacctctgtgactactgcaagggcctgcgcggatagcggcaccacattcgctttgccatttttcgctcggtcgcctgggacggtccaaaccttcgccttgaaatcgaactcgtcgcaagctgcatcgagcacttcaccccggcgttgagccgtaaggacaagcatctgcacaaggtgaccgaatggatagccatcctcgaccgcagattgccatagcgccgcgagttctcggtcgctgagtacgcgatcacgaggttcattgcgtttcggacgccacgcgtcccggcagggattggcgggcatatgctcgagtctggtgagtgcccaagtgtagaaggtcgaaagatggcgatagacgatccgcgccatcgtcagggtttccttgccccgctcgaatgcgatcttctcaacaaagcggctcacgtcacctcgggtaatggagtccgcgaggcggtctcccagctcgggctcaatgtactttcggaagacccgatcgaactcccttgcgctgcgctttttgccctcgatctgctgggacagatacgtctcgtagagctcggcgaccgtaccgacgccctttgcccctttcctcttagcacccggcttcctggcaatgctcttgccctgctcgacatcgaccagcagatctcgcgccttcttacgcgcatgagcgagggtaaaactcggaccatggcgtccgatggtcacattcaaccacttgccctgaacccgcttgcgcagaatgtacgtcttgataccactggcacccatgcggagcctcaggccggggacgataccatcggccagctcaacctgaccagccgccggcgccttgagccctgcgatcttcgcgtccgtcaaacctactttgttcgccatatgtacctgctaccttaggtagctttttgtagtggatactggtgaacatttcaagaacaatgcggactgtgaatcgcagatttccgccattttcggacacatgcggacgcgctaggaccctctgatcatggctcttaatcagcgggtcctaggttcgagccctagtgcgtccaccatttattcttcaatataatcagtaacttaggtcagtcccggccacgagcttgagccttggcggctccgaactgtgaccatttttgtgaccttcggccgaacccccggctggcggatttccgccggtccgaggtgtgaccgaaaacgtcagctggtcggcatagggctggagatgcttcaccgacatatgggcatagcgccgcaccatcgattcggacttccacccgcccagctcctgaagcacccaggtgggcacgtcattctgccgaagccagcttgcccatgtatggcgaagatcgtgccaacgaaagtcggtgatccctgcccgcacgagcgccgcacgccacgtcttggtattcacctggccgagcgcgcggcccttgaaggtgaacacatattcgtgctggatcgccatcctccgctcgagcaccgcgatggcgagatcgttgagcggtacgcccagtgcttcgccattcttggtgtcgccgtgcccgatcgtgacgatgcggcgggacaagtcgacctgctcccagtgatcttcccccggttgcgcggacaccgatgaacggctcattggagcgaggaggtgtaagatggcgaaggttgggaagcgatatttcacagacgagttcaagcgcgaggctgtgacgctgtgggagacgagcggtcggatgcagaccgacgttgcgcgtgagctggggatcatgccgacgatgttgaggcgctggcagcgggcactggagatcaaggggacagtgcctgcggcgaagccgctatcatcgccgatggcgtcgccggcggatcaggcgtcggagattgccaggctgcgccgcgaactcgatcgcacgcgcatggagcgcgacattctgaaaaaagcggtcggcatttgcgcggagatgccacggtgaagttccagttcatccgcgcccatgctggcacctggccggtcagcgtcatgtgccgcatgctcggtgtgtcgcgcagcggctattacgattggcgcgatcggccgccgagtatgcgcacgacggcgaacaccgtgttgctcggcgatatccgtcggatccaggcgcggcattccgggcgatacggcagtccccggatgcatgccgcgctgcgcgcggaagggcgcggctgcagccgcggtcgtgtcgagcggctgatgcgccgccacggcatccgtgcgcttgccggtcgccgctttcggccctcgacgaccgacagccgccattacctgccgatcgcgccgaacctgctcgcgcagcgcttcgaagccacggcgccgaaccgcgtgtggctggccgatatcagctatatcccgaccggcgaaggctggctgtatctggccgccgtgctcgatctggcgactcgcaagatcgtgggctgggcgatgcgggatcacatgcgcaccgaactgacgctcgctgcgttgatgatggccgcccaacggcagcgaccgctacgcggactcgtgcatcactccgatcgcggatcgcaatatgccgccggggcttatgtcgatcaactcactgcgatcggcgcgaccgcgtcgatgagccgcactgggaactgttacgacaacgcgccgatggagagcttcttccatacgctgaaggtcgaactggtccatcaatgccgctgggcaacgcatctcgaagcccggcaggctctgttcggatatatcgaaggctattataatcggaaccgcatgcactcggccctcgggtatctcacccccgaacaggccgagcaacgcatgacgggctaaccctggtgtccgcgcaaccgggggaagatcagcccgacagggcctgtcggcgccacgtataaagcatcccgctgccgaccgcgtgccgctggcacgtcgccgagaccgagccgtcggggccgaacgcctcgcgcaggatcgacagcttctgatccaccgaccaacggcgacgaccgccaacgaccgcgatccgactgctcatacgatcactcatatgaccactcacgagaacactcgctcccgccgctccggtatcctcgttcatcaccgctcctcgcaaagagcggctatcagcaccccgcagcagcttcccgcaaggcggtcttcaggacacggtacccttgccagtaaacaaccgccacgacatccgggttgcccgcaaccatttacgacgaatgatttgctcggtacttgtcagatgagtctggcattagcgggcaaccgaacatttccacacggtcggattcggtcacaactacgaatcccgcttcttgggcaacggtaagaaatgggggccgtagcccccaccttatttggtgcaatcaagttgcttgttaacaaccggaccgcgatttctgaaggattcagtccatcaggaatcgcggctgatgtcaagaggttcagaaatcgccggtccgattgcagcctactccatttatcagtcgccaacgccaccatgccacgcctggcccgtgatcggaagtgatttaaatggagtagggagttttaacttcgattgacctgtggtaaaaagcccttgtcgtgtccgattcgggctgcagctggtggagcctggaagggtcgagccgacgctcgccccttcccttgcggatggaagctgagggagggaatcgtatatgacaacgcgtctcggcctcgacatcggcaccaacagcatcggctggtgcctctatgacggcgacagcatccgcgacatcggcgtgcgcatcttttcggacgggcgcgagccgtcgaagctcgccgtttccgggtccggcacgccgctggcggtcaaacggcgggaggcgcgcggcgcaaggcggcggcgggaccgctatatcgggcggcgttccgccatgctgcgggaattgcgtcggcacggactgctgccagccgatcccgaactggccagggcgctggagacgcaagacccctatgcgttgcgtgttcgcgcgctcgacgagaagctggaacctcaccagatcgggcgcgcgctgttccatctcaaccagcggcgcggtttcaaatccaaccgcaaggcggagcgcacgtcgaaagccggcgaggatggcaagatcgccacggccaccaggctgcttgacgaggacatgcggcgactgggtgcgcgaaccctgggcgagtttctggtcaagcgcgatcatgaatcgaatggcacgatgggcaagcgcgtcaggatgcgcgccgacagcaaggcttatgacttctatccggaccgtcggcatgtgctggacgagttccgcgctatctgggatgcgcaaaaggcctggtatccagacctgctgacgccgcaggcatggaacggcatttaccgtgtgatcgaatatcaacgaccgctgaagccacagattgtcggtccttgcaccttcgcaggaatcaacggcgtgccgacggacgagaagcgcctgcccaaggcgcatccgctgttccagcagcgccgcctgtatgaggaggtcaaccagctcagggtggttgcaccgggtgcagccgggcgcccgttgacgctcgatgagcgcgacgccctgatcctgaagttgcaggacaagaagtcggtttctttcgacacgctgggcaagacgctgaaactcaaggacggcgaacggttcaacaaggaaggcgaaaaccgcaaggcgctggatggtgacgaggtgcgcgccgaactttcgcacaagaaactgtttggtccgcgctggtttcatttcagcgccgaagaacaatggacgatcatcgaacggctgctcgaagaggaggacagcgacaccctgctgacctggctgaaaagcgaatatgggctggacgacgaaaccgcgctggctgtcgccaacgcgaaactgcccgaagggcatgggcgctttggactgacggcgacaaaagcgctgctcaaagaatataaggctgatgtctgcacctacgccgaagccgcgaaacgggctggatttcatcacagcgatttccggactggggaagcgttcgaccaactcccttactatggtgaaatcctctcgcgcgagatcgcgccgggcaagcctgaatatggcgacgcgaatgaacgccggttcggcaagatcaccaatcccaccgtccatatcgggctgaaccagctggccagactggtgagcgcgatcatccgggtccacggaaagcccgaccagatcttcgtcgaactggcgcgcgaactgaagctcaacgaaaaggagaaggtcgcctataatcggcaactcaaggagaacaccgatgccgcacgcgaccgtggcgcgaagctgggcacgatgggcgtccgcgataccgggcgcaaccgactgatcctgcggttgtggacggaactgaaccccaaggacgtcctcaatcgccgctgcccctattgcggggagaatatcggccaggcgcatatccggaacaacgatgtcgagatcgaccacatcgttccatattcccaaagctatgatgacggcattggcaacaaggtgcttgtccatacgtggtgcaaccgcgagaagggcagtcaaaccccctgggagcgctggggccatgatcccgaccgatggtccatcatccaggagcaggttgcgcaccttcaccgctcgaagcaatggcgcttcggcccggatgcgcgggaccgctatgcggcggaggaaggcagcttcctgccccggcaactggtcgatacccaatatctcacccgtatcgcggcgaaatatctggcctgcctctatcccgaacgcggcgagcggcatgtgttcgccgttcatggcgggatgaccgcgatgttgcgccgcctgtgggatctgaactccatcctgcccgatcataattgggtggataataaggaaagcaatgcgcccaagaaccgcctcgatcatcgtcatcacgcgatcgacgccgccgtggtcggcatcatgacgccggcgctgatcgcggagattgcgaaggcggcggcgcgcgccgaaaagcagaatctcgacaggctgtttgaagatttgcctatgccgtgggcgcggcatccgaacgatcgccgtttccgcgacgaactgcgtgagaagattctggccgcgaccgtgagtcacaaggcggatcacggccgccggggcaagcccgaaccggggcgcgacatcacggccggcaaattgcacaacgacacggcttatggcttcaccggcctgatcagcgatacgggcctgccggtcgttgtccaccgcgttccgctcgccagcctgacgcccaaggacatcgccgatccggatcgcattcccgataccgctctgcgcgacgcattatggcaggcaacgcgcgatgttgcgggcaaggagttcgagaaggccttgctcgacttttcccgcactcatccgcacttcaggggcattcgccgggtgagagttcgggagggactcacgctcattccgatcagagatcgaacaggcaagccctacaagggctatctgggcgattccaatgcgcgctataatgtctggcagatgccggacggccgatgggtccatcaggttatctcgacattcgatcttcaccagccgggctttatcgaacagcgccctcacccggcagcgaagaaagtgctgagcctcaggcagaatgatctgatcgcgattgagcgtgatggcgggcctcgccagattatgcgggtacagaaatacggacaaaacggccagattttcctgatcgagcacaacgaagcgggaaatatgaccgagcgcaacaaaaacccggatgaccccttcaaattctatgggccgggggcatcggcgctcaagaacatgaaagcccgccaggttcgcgtcgatgaactcggccgcattttcgaccccgggccgcgttaacccgtcattatccatgatgtgccagcctgctctcccgaaaggctggccatggatcgcattgtcgatattgccacaaacgacctccatctctctgcttatcgcggatttcttgtcgtcagccttgatcggcaggaacaggggcgcgtagcgctcgacgatattcaggcggtcatcgtccatgcccacggcgtgacctggacgaccagcctggtcgtcgcgcttgccgaacgcggtgcaatcatggtgctgtgcgcggccaaccatttgccggtggcgatcatgtcacccattgatggtcatcacgctcaggctgccagaatgcgggcacaatgggaggcgccgcgtccccttttcaaacagctctggcagaaaatcattgtctccaagatttcgctgcaagcctcgttgctggcggcgcaaggcagggatgaagccaacgcactggccttgatggcacggcgcgttcgttccggcgacccggataatctggaggcgcaggccgcgcggaaatactggcccgccctgttcgggagcgattttcgtcgggatcagaatgccgatggcccgaatgcccttctgaactatggctacacggtcgtgcgatcctgcgtcgctaggtcaatcatcggcgcggggcttcacccggcgatcgggctgcaccaccatagtcgcctcaacggctttgcattggccgacgatctggtcgagccgttccgaccgcttgttgacgcgctggttctgcggatgagcgaggaaggcgtcgacgccgtcaccacgcaagcgaaacagcggctggcgcgtctgatcggccatgatctccgcttgggcggagtcgtatcacccgtgtccgtggcagcccagcgactggcgcaatcgcttgcccgaagcttcgaagaacgcagatcggcactggccctgtttgacccacccgatcctctcgattgggcctcgatcgggcaatcagttgcgatcgaagcatgaacctgagcggataccggctgatgtggatattcgttatgttcgacctgccggtggacaccaaggaacacgcacgcgaagcgacgaaattccgggagtttctgcttgatgaaggctttgaaatgagccagttttcaatctatgctcggttttgcaatggcaaagaacattatgaaacctacctgcggcgaatcgaggctcacctgcccgaacgcggagagattcatgtgctcaactttaccgacaagcagtacgagaatatcatccggttctcgagccaacgtcgccagcggcaacgaaaaaatcccgatcaactcgccctgttttgatgattcgctgcatttttgcagtgacagatgggatcttttccggtttcagttcaaccagttaagagcccatccgtcatagcatttcagaaatcgcggtccagctgcaacatattactagggatagtgccaatccgactggtcatagcatttcagaaatcgcggtccagctgcaacgcaagttcggcctgctcgacgggcagtgcggtcatagcatttcagaaatcgcggtccagctgcaacggcgtggcgggagcgatggcgaaagccctggtcatagcatttcagaaatcgcggtccagctgcaacggaagtcccgcgtccccggatggtccttccgtcatagcatttcagaaatcgcggtccagctgcaacgatgctatcgcctgggatagccctgatgacgtcatagcatttcagaaatcgcggtccagctgcaactgggccgtcccgctggcactatcgagcgctgtcatagcatttcagaaatcgcggtccagctgcaacatctttcatccagaacagatcgctggccatgtcatagcatttcagaaatcgcggtccagctgcaaccagggcacgctcaatccgacgctatggggcgtcatagcatttcagaaatcgcggtccagctgcaacgtgaagccttgttctttcaaggcatcggctgtcatagcatttcagaaatcgcggtccagctgcaacaagcgcaggtcttctacggcacgccggaaggtcatagcatttcagaaatcgcggtccagctgcaacggtgatcggaacgccctcgttgatcgcgcggtcatagcatttcagaaatcgcggtccagctgcaactccatctcgacgatggattgttgggcgggagtgacgtgaccccctggtttccaccagcggggattagagcccagcagctttgttgcgcatgagcgcagtgtaagcaatggcctgtgcagcggagcccgaagggcgtagctgcacaggccattgcttatgcagttcggcggcgaacgccgccggtgtctcatatccaagggccgagtgtggccgcgcctggttgtaatcttcggcccaggccgcgatcactgtgcgggcatgatcgaggtcgaggaacagcgtctcgttcagaagctcatcgcgcatccggccattgaagctctcgacatagccgttctgcatcggcttgcccggcgcgatataatgccactcgaccccgacctcaccgcaccatgcgagcaccgcgttcgatgtcagctcggtcccattgtcgctgacgatcatccccggtctgccgcgctcctcgatcagatcgctgagctcgcgcacgacccggcgcccggagatcgacgtgtcgggcaccgcgcgcaggcactcccgcgtgacatcgtccacgatgttgagcacccggaaccgccgacctgacgccatctgatcatgcacaaagtcgaggctccaccgctggttcggcagcgcgagcaccggtgcgggcgcccgcgcaccgatcgcccggcgccggttgcgtcttcgtcggaccatcagcccctcctctcgatacaggcgctgggtcttcttcctgttgatcatcacgccctcccggcgcagcaggatatgcaggcgccgataaccgaaccggcgacgctgctgcgccaactcgcgcagcttctcccgaacctcggcatcgtcgccacgctgcgaccggtagcgcatgctcttccgatcggcgcctgtgacacggcacgcccgccgctcgctcatcccatggcaagcctggagatgggcgaccgcttcccgctgaacggcgggcgtcaccatttttttgtgagaagatccttcagcgccgcattgtccagcatcgagtccgcaagcaaccgcttcagcttcgcgttctcgtcctcgagcgagcgtagccgcttcgcctccgacacctcaaggccgccatacttggccttccagttgtagatcgttgcttccgacaccccgtgtcgccgcgccagctcgccggtcttcgcgcccgcctccgcttccttcaacaccccgatgatctgctcttccgaaaacctcaaacgcttcatctgtccgtccttccttcaagaccggactctaatcactgttggaggaaaatcagggggtcacgtcaatcgcggtccagctgcaactgatttttgtcatgccgtatattattacgggtcatagcatttcagaaatcgcggtccagctgcaacagcgcccggccgatagcctctgccagcgcagtcatagcatttcagaaatcgcggtccagctgcaaccataagcgggcgtcggagaagctgcaggagtcatagcatttcagaaatcgcggtccagctgcaacggaccggggattaggccaccgcgcattccgtcatagcatttcagaaatcgcggtccagctgcaactatgcgaaccaaaggattgaccttgaaaaagtcatagcatttcagaaatcgcggtccagctgcaactgcgcttgccgccgacctatggcgtcggcgtcatagcatttcagaaatcgcggtccagctgcaactcatcgagtctgtgtccaacgtcggtgatcgtcatagcatttcagaaatcgcggtccagctgcaacgaccgctgcacacggtaacccaccccctatgtcatagcatttcagaaatcgcggtccagctgcaacgctgccgacatcaagtattatcatggcggcgtcatagcatttcagaaatcgcggtccagctgcaacaggacggctcgtgctggggctactacggcggtcatagcatttcagaaatcgcggtccagctgcaacggcgcatggcgcgcggcgatgcgtggatcagtcatagcatttcagaaatcgcggtccagctgcaacccagtaatcgcgccaccattgagcgttgtgtcatagcatttcagaaatcgcggtccagctgcaacttaccgccgcttttgacgttgaaaacataggtcatagcatttcagaaatcgcggtccagctgcaacaacttgcgctcggcttcgaaaatgccgtgagtcatagcatttcagaaatcgcggtccagctgcaacgcgtgttggcctctacactacgctgctacagtcatagcatttcagaaatcgcggtccagctgcaacacggcgcacgacatgccgccggtcgattgcgtcatagcatttcagaaatcgcggtccagctgcaacgcattcggtcacggcctcgatctgcgcggcgtcatagcatttcagaaatcgcggtccagctgcaacgagggcagcgacaacaaaccccaagacgtcgtcatagcatttcagaaatcgcggtccagctgcaacgagactgggcgcgatgagattttttgcgggtcatagcatttcagaaatcgcggtccagctgcaacagctcatcgcatcggccgacccgacgctgggtcatagcatttcagaaatcgcggtccagctgcaacgccgctgatcctgtggacattcaggcgcaagtcatagcatttcagaaatcgcggtccagctgcaacaacgaacggaatgatccggcgttcgttaaggtcatagcatttcagaaatcgcggtccagctgcaacgtcgaaatcgtcgagccagccgaaccgaatgtcatagcatttcagaaatcgcggtccagctgcaacagacccgccgccttgcctcctcgccgctcggtcatagcatttcagaaatcgcggtccagctgcaaccaggcggaacggtgccctgactgcgatggcgtcatagcatttcagaaatcgcggtccagctgcaacttaatagctagcgccgctggcgtggcaggtgtcatagcatttcagaaatcgcggtccagctgcaacgatctcatcgactggaaacgcgagcgagcagtcatagcatttcagaaatcgcggtccagctgcaacacatttctaattgcgttaccagtaatgttagtcatagcatttcagaaatcgcggtccagctgcaacgaggggtgggatcaggtcagctggcgcttggtcatagcatttcagaaatcgcggtccagctgcaactaactggttcagtgtgctacggcggactaggtcatagcattcagcgcaggatcgccgacgaggtcagttcggtgccattgtcgttgacgaccatatgaggcttcccccgcaggccgatcagcatcgtcagttcccgggcaacggggatgccggacaccccaggcgacgatagccgaaccggcggcgctcggtcggcagttcgcgcaggcgttgccgcagagcaccgtcatccggcctcgtcggctcatatctgatcactcggcggctcacgcccaccaggctgcacgcccgacgctcgctcagcccgtgatggtcacgagcatatgcgacggcctcccgcttggcgccgggcgtcaccatttttttgatgtcagatccttcagcaccgcattgtcacgcatggcctcggccaggcgcttcttcagcttcgcgttcttgtcctccagcgcccgaagacgccgcacctccgacactccacaccccgaacttggccttatacttgtagaaggtcgccgagctgaccccgtgccgacggcatacatccgccgacggcacccctacctcatgctccttcaacatcgcgatgatctgctcttcgctgaacctgctttgctatattctatccgactccttcgcgtcggattctaatcaaaacgggtcacattcccggggatctgtcacgtcgaacaaaagactcaggggattcccccatacgacccgattatcccaatggccccggctatcggcgtcacggcgccgcgtcgcgcgacggcgctctcgccccgcgccatttgaagtggtcgaacagcacccccgcgaggggcgctgccgccatctcgacgcaggcttcgacttccctcgccccatgcgctcggccctggcggcgggacttgctcccgctgcggcaccgacgcgaaaccggtttgcgagactgccatgtgattgctgaccgcaaaaggcctcccgcatcgaaacgcggaaggcctcgaaaaagctggcgcacccggagcgattcgaacgcccgaccctcagattcgtagtctgatgctctatccagctgagctacgggtgcgtggagcggtgcctttagggggccgcgcggagtcgcgcaagcccctttgggcgattatttgcgcagcgccgcctgcgccgccgcgagccgcgcgatcggcacgcgatagggcgaggcgctgacgtaatcgagcccagttttctcgcaaaaaagaatgctcggcgcatcgccgccatgttcgccgcagatgccgagcttgatgcccgcgcgcgttttgcggccacgtgtcgcggcgagctcgatcaactgtcccacgccctcgacgtcgaggctgacgaaagggtcggtgacgaaaatgcccttgtcgacatattgcgtcaggaagcgcccggcgtcgtcgcggctgatgccgatcgtcgtctgcgtcagatcgttggtgccgaagctgaaaaactccgccgactcggcgatctcgcccgccatcagcgcggcgcgcggcagttcgatcatcgttcccaccagataggcgatctcacgccccttttcggcgaacaccgccttcgcctgggcgtcgacgaccgccttcatcaggtcgaactcgcggcgcgtggcgacgagcggaatcatcacctcggggatcggcgccgcgccggtttcggcggcgacgtcgcacgccgcctcgaaaatcgcgcgtgcctgcatctcatatatttcgggataggtgaccccgaggcgacacccgcgatggccgagcatcggattgaactcgtgcagctcgttcgcgcgcgctttcagcgcctcgatccccacccccgccgcggcggccacatcggcaaaatcctcctcgcgcgtcggcagaaactcgtggagtggcgggtcgagcagacggatcgtcaccggcagccccgccatcacgcggaagatcgcggcaaagtcgccgcgctgttcgggaagcagcttggcgagcgcggcgcggcgaccgtcctcgctgtcggcgagaatcatctcgcgcaccgcggtgatgcgcgcggcgtcgaagaacatatgttcggtgcggcacagcccgatcccctcggcgccgaagtcgcgcgcgacctgcgcgtcctgcggggtttcggcgttggtacgcaccctcatccggcgcaccttgtcggcccagcccatcagcgtgccgaaatcgccgacgagttcgggcatcaaggtcggaacctcgcccgccatcacctcgccggtcgagccgtcgagggtgatgatgtcgccctcgcgcagttcgcgacccgcaacgcggagcacgcgcgcggcgccatcgatactcagtccgcccgcgcccgagacgcaggggcgccccatgccgcgcgcgacaaccgccgcgtggctggtcatcccgccgcgtgcggtgaggatgcccttggccgcgtgcattccgtggatgtcctcaggcgacgtctcgacgcggacgaggatcaccgcctcgcccatcgcggtggctttctccgcgctgtcggcggtgaacatgatcctgcccgacgccgcgccggggctggcgggcagtcccctggtcaaaacgtcgcgcggggccttgggatccagcgtcgggtgaagcagctgatcgagcgcgcccggatcgacgcggcccacggcctcctcctcgctgatcagcccctcggccgccatatcgaccgcaatcttgagcgccgccttggcggtgcgcttgcccgagcgcgtttgcagcatccaaagcgtcccgcgctcgacggtgaactcgatgtcctgcatgtcgcgataatgattttcgagcgtgtcgaagacgcggcccaattcggcgaaggtttcgggcatcgcctcttccatgctgagcggcttggcgcccgccttctcgcgcgcttgccttgtcagatattgcggggtgcggattcccgccacgacgtcttcgccttgcgcattgatcagccattcgccataccaggcgcgctcacccgtcgcgggatcgcgggtgaaagccacgccggtcgccgacgtgtcgcccatattgccaaacaccatcgcctgcacattgaccgcggtgccccattcggcggggatcgagttcaggcggcgatagactctcgcgcggtcgctttcccagctcgcgaacaccgcgccgatcgcgccccacagctggtcgttcggctcctgtggaaagggtgcgccggtctcgcgctcgacgatcgcctgatattgtttgaccagcgcctgccagtcttcagccgacatttcggtatcgaggaaaaatcccttgtcttccttggcgatttccagcgcctcctcgaactcggcatggtcgaggcccatgacgacgtcggcatacatctggacgaagcggcgatagctgtcccacgcgaagcgcggatcgcccgaggcttccgcgaggccgatgacggtcctgtcgttgagccccaggttgagcaccgtgtccatcatccccggcatcgacacgcgcgcgcccgagcgcaccgaaacgagcagcgggtcggtggcgtcgccgaaacgcttgccggtgatcgcctcgatatgcgcgatgcccgcggcgacctcttgggccagcccggccggatattgttcgccattggcgtaataggcggtgcagacttcggtggtgatcgtgaagcccggcggcaccggcaggccgatcgaggccatttcggcgaggttcgaccccttgccgcccagcaattccttcgaccgctcggtcgtggtggccgcgccgccgaacaaatgcaccatcttcgtcatctcttgctcctgctgccccggggaggaggttgcggctggataggtatgcaatcgcacttggtcgattcagttttgcttcgttcgttataagctaagcggcatctcaattcccgttcgcatcgagcgcagtcgacatacccatcgttcatcctcgccttcccggtgtctcgacttcgctcgacacgaacggaaactgacggttcgctttatccctctatcttcgagaaatcggcgacgccatgcaccgcgccggtaaatcgcgcgagcaagccgagccgataggcgcggaccgcttcgtcgggatcgttgaccatcacgccgtcgaaaaaggcgtcgatcggcgcgcggaggctcgcgagcgcggccatcgcatcggtgaagcgttcttcttcgacagcgttgcgcgcagccggttcggcggtgtcgagggcggcaagcaaagcccgatccacatccgtcatgcgctccggcgaaagccggagcccagggcgtgcatccgcagacgtccgttcttggccaccctgggttccggcttccgccggaacactggcttgtttcaaaatattcgccgcgcgcttgtagcccgcgagcaggttggtgccgtcgtcggtcgccataaacgcctgcagcgccttcacgcgggcgagcaggcggacaagatcatcctcgcccccgagcgcgaaaaccgcgtcgatcaggtcgtggcgaacgcccgcttcgcgttgttggaccttgaggcggtcggcgagaaagtcccgaacatccagcatgaagacttgctccatagctgcaccaaccgcattttcgattgagccaccggcgtcaggataacttcgttcgtcgccaa

SEQ ID NO: 3486 - DNA, 23213 bp, synthetic construct
  source 1..23213: mol_type = other DNA
  misc_feature 1..23213: note = Synthetic
ttggaccgggcgccggccttgggatcatagcccttggtctggcgcgaggcggcggtggccgcccatagattgccgtcgtgcacgccgatgccgtaggcggcgacgccggcgcggaaggtcatcagcggcttggcgccgtcggccgacagcaccgtcaggctgccgttgcgcacgcccgagagatagagccggtcgccgcccgaggccaggctttcgcccagggtgaagcccggcacgctggccgcttcgtgcatctggccgaccggtgcggtgttggcggcctgcaacgcgtcgaggtcgccgtcccacaccgcggcgaaatccgggttcttcttcaggtcgacgatgtagccgcgcttttcgtaggcgaccagttcggcgtgcgccttgtccttgcggttctgggccaggtaggcctgggccttgagcaggtagagcgacggcgagtcggggatcagggccgcggccttgtcgaaggcgtcgatggcgccggaactgtcgtggccgtcgagcgccttcatgccggcctcgcgcgccgcgcggaactggccgagatcggaggtcgggtcgaccgactgcgcccgaaccgaagagacctgggccgcaccggcggccatcaggatacagaacgccagggacagggtgcgggtcatttgtcgtctccggatgacaagggcgaccggtcgcgggaaccggcgcccagcgcgcttttgaactccaggaccaggccgatcggcacggccgtcgtcgtcttcaccgaccgcatgatgatgcggctttcgacgccggacaccaggtcggacgccagcagcttgtcgcgcaggaagtcgtcataggcgtgcatgtcgcgcgtcatgatcctgagcatatagtcctcgtgcccggtcacggtggcgcacgacaccacttccggccacgtgtccagccgcgcctcgaaggcttccaggttggcgcgcgacggcaggctgagcttgacggcggcgtagacctcgaaacccaggcccagcttgtcgggatcgagcacggtgacgcgcttgcggatgacgcccaggtcctccagccgcttgatgcggcgccagcacggcgacggcgacaggccgacgcgttcggcgaggtcggccaccgacacggaggcgtcctcctgaatcagttccaggatgcgggcgtccagttcatcgatcagatcggacaaattcttcccctcgaaaggacagaaaccccggcaagacctcttcatgagccctttgcgcgcaaatttccacctcgtggcggcaaaataaaggccgcggcttgccagtccgccaaaacgcgctacagatcggcattgcccggccccggggtagtgagtgcttcgtcgatgaaaatcgtcaatatcatgctggcgcatgtgcgcggcggcgtcgagaccatgtccctgcgctaccatcaggccatgcgcggcgccgggatcgacgtcctgagtgtgggccattcgaagggcatcttcgccgaggccgtggcggccggcgagatggcggcggacgccttcgtgcgcatggacgcgctggtcaaccacgatcccctgtccgcgctgcagctgcgcgcgattaacgccgaattccagccggacatcgtgctgacccacggcaaccgcgccaccggcatcgcgctcctgcccttcctcggcacggcgaaaaagacggtgcaggtggtgcacaatttccgccacaagagccaggtcaaccggctgcgcgccgccatttcggtcagccacgccgtgcacgacagcctgcgcgccgcccaccccgccctgcccgtcttcgacgtgctgaatttcgcgccgctcgacgtgcggccggtcaagccggctcccgccggggaagcggtgatcggcaccctgtcgcggctgcatccgaacaagggcatcgacgtcatgctgcgcgccttcgcccggctgcgcgcgcgcggggtccgggcacggctgaagatcgccggcgacgggccggaaatgggagccttgcaggccctggcgcaggaactcgaactggacgagttggtcgacttccccggctgggtcgacgcagccgactacctggaaacgctcgacctcttcgtcgtgccgtcgcgcgtcgaacccttcggcctggtcgtcgccgaaagcatggccgccggcgtgccggtcgtcgcctcgcgcatcgatggcccgcgcgaaatcctcaagggcggcgaactgggccggctggtgccgccggaggacgaggacgccctggccgaggccgtcacggcggcgatcggcgactgggacgccaccctgcagcgcgcccgagcggcgcaggcctatgccgtcgaccatttcagcctggccgccggcaaggcccggctgaagaccgtcctggaacagattgtgccgatattggcctgacgggtccggaagcggcgccgcactttcggattaaaaagcacccagggggtcttgatagggcgaaacgttttcgctatagccgagcgctctcgcgaacggcgtcgactttggtccgccgtttccggttcggttgggtagctcagatggttagagcggtggattcataacccacaggtcggcggttcgatcccgcctccaaccaccacttcttccttataggcaaagccggatttcaggtctcccgccatacgtcgtgtaactggcggtattcgtgtgactatttcggccgacgtctgccacccataaacctgagaccccggcatttaagcccggcccacgcaaaaaagcctggcgtctctgccgggctgggtcgaggtgtgcgttttatccgggggtcaggtccagccgtacttcaccgcctgctcttcccagcgcaacggcatctcttcgaccttggtcaggtggctgaccagcagcccgtccggctgccggccgtgaatgatgtcctcgacaagaaacggggatagaaaggcagcttcatcatatcgccggcatagctggcgctgatgctttcgcgctcgacaatgtccctgtatcctttgatccggccatgcatccaatcttcgaaccagacgtgacctttggcgatagggctgacgagttgcaggtcgatctttgcagcccggtattcggtgggcttcatcaccaggcgcatctcgatcccccgccgcttcaacaccaccggaaactgacgccggatgacaatcgcaccacgaaaatccatttgaaatctcatcgtcccgaattctgccgtggcaggaccgatgaagctaccattcgtgccaattgctgattttattagaaaagctcaaacttttccgctactcggccgcctaaagcctataaattacgcgtcaaaatgatcccggacataggtggccacctggctcaagggaatttccggcgaagacgcgccggccctgacaatcaatcgctctgtcggggggctgttggcattgtcagaaaaggccagatatacgggatttttcgaacgcttcacctcgacacggcagattacttgaccttcgaggaccggatagctgagtgtgacgcatccagcacggaagctttcggagaaacggtccttgatcaaattggtaagatgaagttcaaaccgatcacggctgccgccaaaggtcgccaagtccggctccagtccctgtaccgttccatcgtcgcgaacgccgatcagcaatgtgccgccacgatgattagtgaaggcggcaatagccttcatcgcactgtcctcgacttttctattcgttgcgcccaggcgcaaatcccatcgcagcgtctctttgaattccaagcgctcaccttcgccttcgtcaataagcgcctgcaagcttgccttggacggttcgcgcttggcaataggggcattgggacctgcatcgataagtgtgtcccggcggacaaggatgccggtctccagcgatttattcagcacactgagcaaggcctcacgcagctgcgcactggtcgccttaaagcccagagcgcgcgagacgtgttgaagcgcctgctcttccgtcgctccgaaattgccggacacgacgtcgatgagcgccttttcgatttccgccggcggcaacatatcgggtcgtcgcagagtaggagattcgacttcgccgcgatcgcgtacagtcacttcgcccccaggcatcgaaaggaaattgtcctgcgacactatccgtccctggcggagcgacacgtcaaccgcactgcgaatggcatcacgcatacgcgccccggccttggccgcgccccacgctgtgcgaagccgaaccacgacttcgtcgaaatgtaccggcccctcgccctgtaccaccgcctcggcgagttgggacaatacgcccgttggcgcaagatgaagatcgacggaaacatgccccggccgcacaatcggcgcctcgacgtagcgaatggaaacacaggcatcaggctcactcatgcccagccccatttcggtgacaaattcacgatcgaccgaaatgatttcataggccggcatacggatcgcctcggcatcaccgcgttcgagttcgaccttggcggcctcgatggcggcgatcagacgctcaagttgttcctgtgggcgtttgaaccagtcgccactccacacgtgatgcacgatccagccctggttttccagaacgctgcgtcgcaggcggtcacggtcgcgggccgacttggcgctacgataggacgggccgtcgcattccaccgccagcagatagcggtcgggctgatcgggtgaagccacggcaatatccacgaacagacccgacacgcccacattttggtgcgcctgatatccccgtgcctgaagggcctgggcaatctgctcttcgaagaccgcgtgacggtcgcgtccgacggtttccgccaaggtcatgcgcccggtccgagcgaagtgcatgaacagcttcagagcgaacacgcctttgcgcgaggacgcaaaatccggatcgatatcctcatcggtcatcgaagaaaatacctcgcacctgcgtttggcacggctaatcaggacgttcagacgacgctcacccccttcctgccctacggggccgaaacgcatgggcggtcgcgcacccggcgcggtcggaccgtagccgatcgagatcaggatgacgtcgcgctcgtcaccctgaacattttcgagattcttgacgaagaaaggctcggtcggatgggcctggaagaaggcttcctcagcgggggtcaactgacgcctcagcagctcaagctgctccagaatggccttcctctgcggggcggagaaggcgacgatgcccagggattgcgtcggcgtcgttcgcgcatgatggatgatcgcgcgcgcgacggccttggcctcgaccgggttcgtacgggttgtacctgtctcgaacaagccgtccttgacatggtgaaaacgcaggcccagcccggattgcgctgtgaaggggctggggatgatcaccagcttgttttcatagaactgtcggttggaaatggcgatcagcgactcgtgtcggctgcgatagtgccagcgcagcatccgtaccggcagcccccgcgcggtaaacaggccaagaatgctctcgatatcggcaaccttcgccgcgccatcatcatcatcgccatcggtttgtccggtcatcttcgagaagaaggcggtcggcggcaattgttgcggatcgccgaccacgacaacctgtttgcagcgcgcaatggcgcccagcgcatcgacaggctggatctgactggcttcgtccatcaccagcaagtcgaaggtgagcttcccgggcggcagaaactgcgcgaccgacagggggctcatcatgaaaaccggcttgagcgcctggatcggaggggcggccttttccatcagttggcggatcggcatatgcccgcgctttcgggccatttcgcctttcaacaccttgagcggaccagccacgccgccgcccggcggaggtacatgtcggtgatgcgcgatcgcgacttcgctggcggccagccggatacgctggcggtcgagatcgataaaatcgcgcacccggcgaccctgtatttcgccatcgaacaccgccagttcgggctccatatcgacctgctgctccaggaccgcttcaaaaaatgcctgctcgaagtcgtcaaaagcggcgtccaccttcagtcgcccgtcgtccaaccggctgacgacatccgcaaggcccatatgttcggcttccctgacgcgcgccaagtatcccacccacgaagtcagcgcctctccactgtcgcgccattcggcgagccgggtttccagttcatccagcgacgtcgtcgacagggcctccccggtaatgcgggcgccttccgtggcccggatgtctgtcaacatgccagtcatgtcgctcacccaggcgtctcgaacgcttagagccatgtcactccgcgttttcaggccggcgcgatcatcgatgcgggaggccaggtgccttatgtcggtattggcctgtacccaatccgccatgacttccagcgacagccaatccgattggcgtccttgccagccggccccgaacgctacccgcgcgatcggctcaccggcgtccacggatgccgccgccacctgcccctggatcagtttctgcattccctgacgccgggcttcaagagagggctccgtcaccaggctcagggcatcggccgcttcacaggccgcagctacggtcagacacgtctctctcagcgcgggcagatcagcttcatccggtccgaccgccgcgccgaagaaagtcgaacgcgccacccgagcttcgtcccacaggcgccacaggtcctgtttggcacgagacagttcggcgtcaagcgattgagacaggccggcgatgcgctggcgatccgggcgacgccccaggatcagccgcggctccgcgcccagtcccctgaggcttcgcatccagtcaacaagcgcctccaacggcgcggacaccgaacgctcccctcgccagtcgccggcaaaggccgtgcgcccgaactccgcttcgtcgcggatgagcttcagggctgcctgccccttacccagggcatcaagccagctcaggcgttgatcgagagacgccttgggttgagactgaaaggaacgcatcagacggtctgcggcccgccatttaccactgactattcgcagaaaagactcgccgtgggtcaccaacaccgttctcacggatgataaatccgtaccccaggccgcttcactcaggttcgagccgacgacagcccgcgcctcctccagcgtgcggacagcgcccgccagatcggccgcccgctcgacaccactgtcccaaaggtcctgagcgaaggccaccgggtcggcctcaggcgccaccgcgacgcgctctcccaccttcaccagttgctcaagatcgcgcaacgtcatgggcgtggccgcccgccccatagcttcggccagccgccgcccctgttccagcaattgaggcaaaccagtcgcgacctgtttcgcattcccgaaagcttccagcggcgtattggcatcgagcggtgctaacgccgcctgaatcggggcgatatctgtcgtccatgcctcttctctgaatagaggcgccagttgctgcctgagatcggcatgggccttacccgccgcgaggatttcgcgaacggcatcgggcgtgtcccatatgtcggccgccagacattgcgccgccaacgcgggcgcggcggcaagccgatgcgccaggtcgaccatgaagtcgagttgcgccaatgcctgcggagcaggggtttccagtatcgccgccagttcggcgcaggtctcccacatggccgccaagcgcacgcataatccggccagacgctcgttgagtcgtgcaacgtccgtcggcagaattcgcgtcagttcgattccgtaccacgtatgctcggatggcgttcccagatcggccaggcgctccgtcagttcagccacccgctttgagcgatcgtcgacctcggcctgtgtccagtcattggccccggcaagctgaagatagccaggggcaacgcccttctgacgcaaccgaacgaggtggccgatcacttcatagggtgtcagcccggccgcgccgacgggcgtatgcaggcgctccgcatgggcattcagatagtcacgcgtttcggataggcgggcattcagggcttcaggactttccgtgcgtggcgcacccagttcccatgtccgcttcaactcttccagaacggcacgcttgttcgccttattgctgtgaagctcaaggcaggccacgcccgtccctgtcgaatccaggcgccgtttgaccacttccagcgcggccattttttccgccacgaacaacacggtcttgccgtcagcgatggcagacgcaattacgttggcgatggtctgcgactttccggtgcccggcggaccctggatgacgaggttgcggccgcgccggacctcctcgatcgccagggtctgggaactgtcgctgtcaacgatgtgcaccatgtccgccggcgcgatatgcgcatcgatcggttcgtcctccggcaacagcggttctccctctggaaaaccgtccgaaaccaggggcttgatcaggacatgatcggccagcctggcctccgccggccaggtctggggatccaagtcccgatacatcaggaacttggcgaaggaaaagaaacccagaacgatgtcgtccgcgttcacttcccagcccggcttggccgagaccgcgtcggtgaccgccgccacataggccgacaggtcaaaatcgtccgatggctcgaacatgggcagtttcagcccgtgcacacgcgcgagataggcctcaagcgacagattcgcggcgaagtcttcctgccggcagcgcagtttgaacttttcggcggcattgccgcgttccagttcaaccggtaccagcaccagcggcgcataacggcttgcggcggcattgttgggatcaagccacttcaacgtgcctatagccaggaacaggatattgacgccctgctcttcttcgagcgtgcgggcatcgtaatacaggtccagaagctttttctgcaaaccggccggcgtcaagcgggtctgaagccgcgtatcggcgtagcgactggcgatccccctgtgatcgagcggatcgtcctcgggctgcaccagttcgagcgtgtcggggtcttcatccggatcgaccggcgcccccttgccgggaaggaatgtgaatggcttattttcagcaaccagtaaccggaagacttcgtcggcacgctcatcgacgatttccagcgttttcgcgcttttggccgaccgtggaatattcagcaggcgatttcgggcggacaggtcgagcagttccgtcctagcccgttccagcttggcctcaagcggaagcatgttttcgaagatggataccggttcgctcaccggattttcgatcatgtcagccataatgacctccccccacacacaactattgtgtgcaaacagccgcgacgtccagttgtttttaaggcttgcgcacgtgcggaattgccggaacgggagagttcgcaggcgcgggacagaaagcggatcgcggctcatcaaaaccggcgtcgagcagattctcagcccccggccccatgaccacgctgggcctgagggtgatgcattaaataaaaaggcgaggccgtagcctcgcccttatttggtgcagtcaagctgcttgttaacagctggctcgcgatctctgtgcggacaacattcgacaaatcgaaaaggttgtcaaggagccaaccgcaactaagtcctatcagcgacctgcagatgcaaagcgcctagtgatttatcgggaacggttttggatttccgctcccttgtgctaatgatttatcgttgcctagaaacaactagcgatcttactgcggcttggactccgcagggatcgctatatcttcgcactgccgtgcagtgtaatggacaagaagccacattacaatcccctaagtcctatcatatatatcatcttgtatccctgagttgcatttacgtggatttgccgcattatggtatggttatggggaggggaaatgcgaaggctagggcttgatatcggcaccaacagcatcggctggtgcctgatcgaagatgataaacgcgtcgtcgacctcggcgtgcggattttcagcgacgggcgcgacccgaaatccggcgcctccctggcggtggaccggcgtgaggcgcgcgccatgcgccgccggcgcgaccgctacctcggccgtcgctccgcctttcttgaaaccctgatccaatatggccttatgcctgaggcccaggacgaagcgcgcctgctggccgacaaggacccttatgttttacgcaagcgtgcgcttgatgaagtcctgacgccgcatgagatcgggcgtgccctgtttcatctcaaccagcgccgcggcttcaagtcgaaccgcaaggctgaccgtcagcagaaagacggcgaggacggcaagatcgctaccggcgccagggcgctggacgaggccatgcgtgaagccgatgcgcgcaccctgggcgagttcctcgccgggcgcgaggaaaaacgcgtgcgcctgaatggcgagagtcaggcctatgacttctatccgcaacgccgccacgtcgaagacgaattcaacacgatctgggacaagcaaaagccgcaccacggcactgtattgaccgacgccgcgcgcgaggccctgcaccgcatcctgttctttcagagacccctgaaaacgccggaggtcggtttttgcaccttcgccggctgggacggcataccggacgacgcgcgccgcctggccaaggcgcacccgctgttccagcagcgacggctttatgaagaggtcaacaacctgcgtattgtggcgccgggcgaggccgatcgtcccctgacccgtcatgagcgcgataccctgatcctgaaacttctggacaagaagaaggtcagcttcgacagcctggccaagaccatcaaactgcccgaaggcgaacgcttcaacaaggacagcgagaatcgcaaagaccttatcggcgacgaggtccgcgctgagatgagcgacaagaagcgcatgggcacacggtggctgcatcttggtctggccgatcagttgcgcattatcgagcaggtgcagaacgaagaaaacatcgacatcctgctcgactggctgcagcgggaatatggtctcgacaaagagaccgccatgggcgtcgccggggcgcgcctgcctgaaggttatggccgtttcggcgaggtggcgacgcagcggttgcttgaggctctaaaaagcgatgtgctgacctatgacaaggcggcgcaaaaagcgggcttccatcacagtgatcagcgtaccggtgaatatttcgaccgcctgccctactatggcgaactactgacacgcgaaatcgcgcctggcaaacaggaatatggcgatccgctggagcggcagtacggcaagatcaccaacccaaccgtgcatatcgggctacgccagctggaaaagctggtcaatgccatcatcaccgtgcacggccgcccggacgagatcgtcgttgaactggcgcgcgaactgaacctcagcgaggacgacaagaaaaagcacgatgcccgtatccgcaaggacacgcaggccgccattgcccggggtgagaagcttgaggcgggaggcttcgacaatacgggcgcaaaccgcgcactgatgaagcagtgggaggaactcaatccctccaacccgctggaccgccgctgcccttactgtgcccagcaaatcggcattaagatgctgttttccggtgaagccgatatcgaccatataattccctattcgcgctctctggatgacagcagtggcaataaggtcgtggctcaccggcattgcaatcgcgccaagggcaacaacacgccctaccagaaatggggccacgatcccgagcgttgggacaccatctctaaccagatcacccggctgcataagtcgaagcagtggcgtttcgggcctgacgcgatggaccgtattcaaaaggacggtggtttcatcgcccggcaattgacggacacgcagtatctgtcacgcctggcctataaatatctgtcgtgtctgtatgaagccgacgggacacgtcacgtctttgtcgccaccggccgcatgacggccttgctgcgccgtgtctgggccctgaacagtctgctgcccgatcataacttcgtcgacaatcagcattccaatgcgccgaagaaccgtctcgaccaccgtcaccacgccatcgacggcgcggtcatggccgtgacgtcgccggccctgctgcacaaaatcgccactgccgcgggacgcgccgaaaatctcgagctcgaccgcatgttcgagagactggaagcgccatgggacaccttccgtgacgatctacgcgacgggttgatgcgcgtcacggtcagccataaggccgaccacggccgaaagggcaagccttcgcgccatcgcgatgtcaccgctgggcggctacataacgatacggcctatggacttaccggcctcaccgctgccgacggcaagacccccatcgtcgtacaccgcgtgccgttgctgagcctcaagcctgccgaccttgccgatccggaccggttgccagatgaagcgctgcgcaccgcgctttgggaagctacccgtgaccagtcgggcaaggcgtttgagactgcattggacaatatccgccgcaacggcatcgacaagcgcgacaagaacggcaagcggatgttcaaggggctgcgccatgtacgggtccgcgaacccctcaacgtcatcgctgtgcgcgacaaaacgggcaagccttataaggcctataaaggggattcgaatgcaaggtgggaattctggcgtcttcccgatggtgcgctgaaaaccaccgtcgttacgatgttcgatgcgcatcaagccaatgcagatacgcggccgcatcctgctgccaaacgtttacttaatctacgccaaaacgatctcatcgcaatcgaacgaaatggcgggccacgtgaaattttacgcgttatcggcttcaatgtcgcaggccgtcttacacttgctccagcaaacgaaagcgggaacctgaaagaacgcgacggtacatccaacgacaatgatccgttcaagtatatctatttgcaaggccgtagcattttaaaagccaaggcgcggcaaatccgcatcgatccgctaggtcgtgttttcgatcccggtccgcgagaataaaggagaattggggggatggatcgggttgtcgatatcgccacagacgggcggcacctgtccgtctatcgcggcttcatgttggtggaagcagaccgtcaggaagttggacgtatcccgctcgatgatatccattcggttatcatccatgcgcacggcacgacatggagcgccaatctcgtcgccgcactggccgagcgcggcgcaccgatcgtcttttgcggcaagaaccacgcccccatagctgtaaccttacctttggacggacaccacattcaaaatgcccgcttccgagcacaatgggaggcatccggaccgctgatgaaacaattatggcggcgcatcgtttcagccaaaattcttatgcaaggctcgcttctggcagcgcgcggcgtggaaggcgcgaatgtcttgttactgatggcagcgcgggtaaagtctggcgacagcgacaatctcgaagctcaggcggcccgccgttattggccattgcttatgggagcggactttcgtcgtgaccgcgatatgcccggaaccaacgccctgctcaactatggctatgccgtcatgcgggctacggtagcccgcgccgtagtggccgcgggtttgcacccgacgatcggaatacagcatgccaaccgtggtaatagccttgccttagctgacgatctgatcgagccttttagaccgctgatcgacgccctcgtggtagcaatgttgtcagctggagtcgacgaactcacgccgtccgcgaaacgtcatttcgcccgtctcatcgccttcgatctgcgtgtggacggcgaagcctcacccgtctcacaagccgctgtacgattggcgcaatccttggctcgggccttcgaaaacggccgtccgatactccagctatttgttccgccaaccccgattgaatgggcggcgctggcgcaaattgacgtcgaaacgcaatcggaatgacagacggcaactttcttagcgggtatcgtttggtgtggatatttgtgatgtttgatcttcccgtcacgacaaagaaagacatgcgtgatgctaccaagttcagggaattcctgctagatgaaggttttgagatgagtcagttttcagtctatgcccgcttttgcagcggcaaagacagttttgaggcgcatctggcacgcattgaacgcaatttacctgaaaaaggtgacatccatgtgctcactttcactgatcgccagtacgaaaatattgttcgattctctagccaacggcgaaagcgcccacgtaaaaatcccgaccaactcgccttgttttaattttacccgaggaaaacaactgcccagatatgctgatttattctttttattcaaaagactatcagcatatctggtttagcagttcagagatcgagagccaaccgcaacttgatcgacctcttaacgtcggtcgggtcggggtttagcagttcagagatcgagagccaaccgcaacggcaactggaccacgcccgcacccgggttaggtttagcagttcagagatcgagagccaaccgcaacgcggtggccttgttgttctggtcaagggcgggtttagcagttcagagatcgagagccaaccgcaactcggcggcacatggccaaggcgttatccgcggtttagcagttcagagatcgagagccaaccgcaacgtgaccatggatcacacgcggaaagggcgcggtttagcagttcagagatcgagagccaaccgcaacttggccgcgatcaatgcgttgcagcgcgtaggtttagcagttcagagatcgagagccaaccgcaaccgcgaagcgcttcgagctggtgcgcgtgagggtttagcagttcagagatcgagagccaaccgcaacggatggcccgacgtaccgataccgatttcgggtttagcagttcagagatcgagagccaaccgcaacacaaacgcgctgcgcgacctggtcgccataggtttagcagttcagagatcgagagccaaccgcaacctgccctccacctggcaggtgatcgcccagggtttagcagttcagagatcgagagccaaccgcaaccagcaagacggtgatgcgcttcgtttttccggtttagcagttcagagatcgagagccaaccgcaacgctgaacatggcagcgccataatcatcctcggtttagcagttcagagatcgagagccaaccgcaaccggcctgtctcgtcaggttctaccgctccgggtttagcagttcagagatcgagagccaaccgcaacctcgccagtgctatcgtgtatggcccagatggtttagcagttcagagatcgagagccaaccgcaactcccgggcagctgtcacatggtggtgaccgggtttagcagttcagagatcgagagccaaccgcaacatgtcgctgccgatggaagatggcaagccgggtttagcagttcagagatcgagagccaaccgcaacgcgaccacgccacgcgtgaaccccgtcagcggtttagcagttcagagatcgagagccaaccgcaacaacatccagcaagagcagttccgcgaccttggtttagcagttcagagatcgagagccaaccgcaacacgcacgcgctttgctcccacctggcctttggtttagcagttcagagatcgagagccaaccgcaacatggcctcgggtcgcgagcgcatgtcgtcgggtttagcagttcagagatcgagagccaaccgcaacggcctgcggtttggcaaacgacgccatcggggtttagcagttcagagatcgagagccaaccgcaacggcgaactgctcgacaagcggccggaaggcggtttagcagttcagagatcgagagccaaccgcaacggcactgcgcgcgagctgcgccgcattcgaggtttagcagttcagagatcgagagccaaccgcaacggtcactggcaaggaccggtcggccgccgaggtttagcagttcagagatcgagagccaaccgcaactgccggcgcaggctgatcgcttgggcgcggggtttagcagttcagagatcgagagccaaccgcaacgatgatggccaggccaccgccctgcatcatggtttagcagttcagagatcgagagccaaccgcaacctcactggcgaattctaaggccttggccagggtttagcagttcagagatcgagagccaaccgcaaccaaggtccggtgcgagtattttccgacctcggtttagcagttcagagatcgagagccaaccgcaacctgcgccgttgcggggtctcgaaatgacctggtttagcagttcagagatcgagagccaaccgcaactgcttcacgctcttggtggtcttgttctgcggtttagcagttcagagatcgagagccaaccgcaacattgcagacgatggcacgccttatcgtatcggtttagcagttcagagatcgagagccaaccgcaacacccgacttgattgcctcaatatgtcgatcggtttagcagttcagagatcgagagccaaccgcaactcggctgccgtgccgatgtacggtgtaccgggtttagcagttcagagatcgagagccaaccgcaaccaggttcgacatgatgcaaaacatgcacgaggtttagcagttcagagatcgagagccaaccgcaactttacagacggcgaaataccgattgtctgcggtttagcagttcagagatcgagagccaaccgcaacagcgcccacaccgaactggccagtggtgatggtttagcagttcagagatcgagagccaaccgcaacgcggtcaaggctggccgccgctttgtcggcggtttagcagttcagagatcgagagccaaccgcaacgaccacgcgccgggggtcattccggccagtggtttagcagttcagagatcgagagccaaccgcaacgaggcacaactcaaggacttgatcaccggcggtttagcagttcagagatcgagagccaaccgcaactcgaaatcgccccgcaggacgatagaggtcggtttagcagttcagagatcgagagccaaccgcaaccataatcgtgccaagcattttcaaacgcctggtttagcagttcagagatcgagagccaaccgcaactgatgcaacgccgtaccaacatccgccgcgggtttagcagttcagagatcgagagccaaccgcaactcccagagcgtcgtcgcgaaatcaaaaacgggtttagcagttcagagatcgagagccaaccgcaacctgtagaccgtgtccttgcaaagctccttgggtttagcagttcagagatcgagagccaaccgcaacctgctaattggcgtaatactcatcgttgctggtttagcagttcagagatcgagagccaaccgcaacggagacgacagcttgatctgagcatcgcggggtttagcagttcagagatcgagagccaaccgcaacctaggggagacctgaccatggccgctacgtggtttagcagttcagagatcgagagccaaccgcaacaggaattacaatgtccattattcagcctcgggtttagcagttcagagatcgagagccaaccgcaactagtattgttgagtatagtgggattggttaggtttagcagttcagagatcgagagccaaccgcaactcgacctcaccgaacctatttctcatttgaggtttagcagttcagagatcgagagccaaccgcaacagcgcgaaacgccggtccgtctttgcggcgggtttagcagttcagagatcgagagccaaccgcaactatgcctgcgtccaccatgacttaggcagcggtttagcagttcagagatcgagagccaaccgcaacatcttcgacgtctggtcgaagcgctacaaggtttagcagttcagagatcgagagccaaccgcaacgactgccggcggatactggacgccgaactgggtttagcagttcagagatcgagagccaaccgcaacacggcgccgccgatggcctcgctgttcggcggtttagcagttcagagatcgagagccaaccgcaacgtcgtgagcgctgtcgtttgcgtccgggccggtttagcagttcagagatcgagagccaaccgcaacaaaaaaacgcagagaagcgacggattgagcggtttagcagttcagagatcgagagccaaccgcaacgttattggcgccggcctggctgtcgaccggggtttagcagttcagagatcgagagccaaccgcaacgcaaggagatccaggataggtgcgccgacgggtttagcagttcagagatcgagagccaaccgcaactatcctcacccccctatccgttttccgagaggtttagcagttcagagatcgagagccaaccgcaactggaatgtcccgaatatcattaccatttggggtttagcagttcagagatcgagagccaaccgcaactgacctgccccaatggcgactctggccacgggtttagcagttcagagatcgagagccaaccgcaaccagggcctggccatcaaacacgacctgctggggtttagcagttcagagatcgagagccaaccgcaacggcatggaatcggtccaggtcgacctggccggtttagtagttcagagatcgagagccaaccgcaaccatgcgggccttgttgagcacgacaagctcggtttagcagttcagagatcgagagccaaccgcaacatagccagtatgggactgggggtgcaggtcaattatagagtcgcacggcggcaatcttgttgccgaaaaggcatgcggccagcgggagtatctttacctttaatttgaatgtggtggaggtatgatatctcttgtgagagtgaggtggcgtcgggccacgacttgcccagcggcaagccgattgatgttcgtcgatctattgcctacccgtgaaatattaatgctgcctccgcgcccttcagagtccgacttcggttcccgtaatcggcattgggggctacagggccgtccaggaaaccgcggccacttcagacgatgacacgagcattcaccatgtgcctgatatagtcagactttccctgttaggtcacgggaaattccctgcctttatctgcagagaattcttcataaggtactgatttatcgcgccaccacttccttcttctccgcaaagtccgatctcagcttcttctgatcttcgcccgcgccaggcggcggtcttccagcgagtagtatagccagatgtcgccgtcctggacgataaccgaggcggcgaaggcgatgtcggtggccgtgcggtcgtcgaccggcggcggggtcaaaagcggctgaaggcagcggtcgaccacggtgcggcaatcgcggtcgaaggcgacccagccgatgcgccagcgcgcgtcgtgcgtggcgccgttgtagaacatcaccggcatgtccggatcgtccatcagcatcggcccgggcgacaggtgccagttgtcccaggcattgtcgcgcggcatgaacggcgtcggctgctcggtccacggcccgccgacatcgtcgccgatggccaggccgatgcgcgaggcctcgtcctgcgcatattcgtagaacagccgccagtggtggtcggcggtgcggccgatggtggcttccttggtattgcccatggtcttggtcgaggccagggcgacgccggtcttggtcagacggtcgggcgtcgggccggtggcgtagaacatctcgccgtgcgcgcggtccggaccgacgcccgtatagtagacgacatagctgccgtccttgcgcttcagcacggtcggatcctcgacgccgccgatgtccagttcgtccggcccgccggtcaggacgggcgcgtccagcatgtcgaaggcgacgccgtcggtgctccagcccagccagatctggccggtgtcggtatagggctggccggtacagggtacggcgcggaccatcaggccgatccggccgtcgggctcggtccaggcataggggctcatcaggtcgcggcggcacagggcgtccggccctttcagtgtcagggtctgcaggtcctcgacattgaaatcgacgcggcagcagcgcggcttcaccgcctgcttgcggtcgccggttacggaatcgggcgtcgactggcttttgtgcgtgccgtctttcatgcgttacagtctaacgcctgcggtcggctattaccgatggggttacgaggggtgctttgtgaaaaaacgataatggacggcggcgaaatcgaggtttgacgctgcgtcaaaaccgcgcaataggacgccgcatcgacggcgcccgtcccgggcgcgctcaacgaggaaaattcccatgacgatcaagcgtttcgaaagcggcccgcgcatgagccaggccgtggtccacaacgggctggtatacctggccggccaggtcggcgagcccggtacctcgatcgaggaccagacgcgccatgcgctctcggaaatcgaccgcctgctggcccaggccggcaccgacaagtcgaagctgctgacgacgacgctgtggctggccgacatggccgacttcgcggcggtcaacgccatctgggaaaagtggatcgacccgcagaacccgccgacgcgcgccaccggcgaagtcaagctggtcacgccggagtacaaggtcgaagtgattgccgtggcggcgatgtaagacgcttaaggaagtaagatcccccaccaccacgcccttcgggcgcggtccccctccccggcatagccggggaggaatgagaagaacttcccctatcatgcctccccacctttggtggggaggggaaccgcgcccgaagggcggggtggtgggcgcggcccggcgaggggttcttacgtcccttcccctacccttcgatcggcttcgtgaccccgaacagataggccagggccgacagcgacacgatcacggcccccaggatcatcgccggcacgaagctgcccgtcgcctggacgacatagccggtgaccgccggcgccagcgcaccgccgatatagccgccgaagttctgcaccgcgcccagcgacgccacctggctttgcggggccgcggccgagaccagggcccacgacgccgtcgaggcgacgttggccaggaacaccaccatcgaaatacaggccagggccagcaggttgctgtgcaccagcgcgcccggcacggtgaaggccgccatgccgaacatggcgatgaccgccagcaggcgccgccccttcaccgccgatccggtcagcctgaccaatacgtcggacagcccgccggccacccagcagccgataaagccgcagaagaacggcacgaaggcggcaaagcccgtatggatggtgtccatgtgccgcgcgatctgcaaatagccgggcaaccaggtgacgaacagccagttgagatagaccgagccgaagaagcccaggatcatgccccaagtggtgccgtggcggaacaggtcgcgccaggccctgaaaccgccggccgacggcttttcaggcgcatttggggcgggcgcggcgtgggcgatggtggcgcggtcggcgtcgctcaataccacctcgtccggattgcggtagctcagccaccagaagacaccgacgaagacgccggccatgcccagcacgacgaacacccagcgccagtcggtcgccgccaggatcagggccaggaccggttgcgccaccgccgtgcccagcgccgaggccgagttgaagacgccggtgggaaagccgcgcttatgcaaggggaaccagtcgctgaccacgcgcgcgccggtcgggtattgcggcgactcgccgatgcccagcagcacgcgcgcgccgatgaaggtcgcgaaattgtgcacgaagccgcacagcgcctgggccagcgaccacagcacgatgccgacggccagcacgttgcgcgggcggtaacggtcgatcagcccgccgatcggcagctgcgccagggcgtagctccacgaaaaggccgacagcagcaggcccatctcaccgagacccaggtgcagatcgccgcggatggcggaattggtcaccgacagggcgctgcggtccatgtagttcagcgtgccggtcagcagcagcaggcccagcgacacgccctggacgacggccagccggcggggtttcgaagtcggaacggatggcatctttatccctgtcgcgccctccggcgcccttgtttgtgaccttctccatagcacaggatgcacggtgcgcgactcccttcggttatcgcgcgttttgcggcgcgcccggcatgcggtatgattacaggcgcgacacagtccggagggggacagatgcacgaggggacggaggcggagatcgacgcggtcctggggctggtcgaggccatctacgatacggtgctggaacccaagctatggccgcaggtgctggaacgcatctccgcccatatcggccagggctgcgccggtatttcgctgatcgacacgcggtcgaacgccatccgcgtggccgcccactggggcgcgccgcccgacttcatgcaggcgatgatgcaggccgtgccgatcaatccggccaatacggcccactggttcaccccggtcgacgaacccttcacggtcgagcgcctggtcggccgcgaggcctacctgcaatcgcgcttctatcgcaccgtcaacgcgccgcacggctgccgcgacgggctgatcagcatcctgagccgcagcggcgaccgctacggcaatatcgccctgccccgctggaccgaccacggcccgatcaccgaaaccgaccgcctccggctgaaacgcctgtcgccgcacatccgccgcgccgtgacgctgaccgacctgctcgacagccgggcgctgcgcgacagcctgctgagccagaccttcgacctgttgcgcacgccggtgctgctggtcacggacgacggtgccatcgcccacgccaaccgcgccgcggacgccgtgctcgacgccggccgcctcctgaggcgcaacggtggccacctcgccgccgtcgatcccgccgcggcgcacgccctg

SEQ ID NO: 3487 - DNA, 23204 bp, synthetic construct
  source 1..23204: mol_type = other DNA
  misc_feature 1..23204: note = Synthetic
cgtgctgaaagacgatcctcgcgccattttctctgctgccagcaaggcgcaggctgctgcagactggatgcacgcccagcagtcccagcctgaggagatcgctgcatgacctgtgctttggagctttacgcgggaagtcacatggcgctggcatgtcacgaatgtggaagcgccctgtccgacaacctctgtgcccaatagcgcctccccgataagcgccacgacaactgcgcctgcgccaaccaatgctaatgcggccgggccggggatgagcaaccactcctgcctcgtcgtcgtccttgccatgccgacgtgtttgcccgcgcttgtcgtccgcgagaccgagtttgcaagaatccgcgccaacgggcgatcgttgaggagaacagaccatgggttggctattcatgtcacgcgatggcatggctccgttcgccacgccgcaagcctatctcgacaaccagtgcacctttccgcccgaccccgacaagggccggacgacaggtctgcgcgtcctgaagtcgacggttcgttcaggtgcctactacgccgcgtgtcagagctacgacgcaaatggcccgcgcgagactttcgcgatcatctgccttgtcaaatggaagccctgcgcgcgcagcggcgaggcgttcggctacaaggatctcaccgaaacgatggggccgtacagttacgactgcccggcctcgatcctcgacctgctcggaccacccggcaatgaatatgccgcgcagtggcgcgaacattgtcgtcagcgccttgccttgaccgcgcgccgcaagccggcgcccggcgacatgctggttctcgccgagccgctgaccttcaccgacgggcagagcgagcggagcttccgcgtggtccagtcgggccacaagacgatcctgtgccgcgtcagcgatggagtcggggtgaaaatcagcaggctgatgagcagggcctggacgatcgtgccgccggccatcgccccgtctgccgcctgacctgccagcaagcgggcgccgccatgacgaatcccgccccgaggcaacgcttgtccagccgcatcgccacccagatcgccgagcttgtccagaggaccacaccgcccggacaggaccgggcacgctgcaacccttctgcgcggtcctgctgctgcccggtcaccgaatcgtaatttcttgaattctatccgggttctgcgaatggatccggcaaaggaatgacgatgcgcatctggaccgctgcccttgtcctggttgcagccttggcctttccggcacacgctcaggttataacgggaagtgcaaccgcagccgatggcgattcccttgttgtcgctggccagaaggtccgcttgttcgggatcgatgcgcccgaacttgctcagacatgccagcgcgatggcgaggcctgggcctgcggccaagcggccaaagagcaactttccgccctgattgcaggtgcccaggtccgttgcacacgcttgagcaccgacaactatggccgggctgtgtctacctgcacggccggttctgaagacctgaaccgggttctggtcgagaatggctgggctacagcctatcgcgagtacagtctcgactatgccgatgcggagctccgggccaaacgcgacggccttggtatctggagcagcaccttccagatgccagccgattttcgccatgcaggccaacctcgagatcgtgccgctaccgcacgagccttcacgcctcgcccgtcacgcgtatccggttgcgtgatcaagggaaatcgcaacaggcgcggacagtggatctatcatctgccggggatgccctattacgaagccacccgcccggaggaaatcttctgtagcgaggcggaggcgcaagcggctggatacaggcgggccatcgtccggccgtgaaatgcagcgcacgcccgaaccgttcaacagccatgttctcccggcgatcgatgggccggccatttccggcgataaggcacgccccgcaaaaccattgccgggaaagtcgacagcacgcttgcatggaccatgaatggcaagccttgctttgccagcggtcagatcattctattgccggtgctctatcgttgcattgccggttgctggcatccctgtgtcaccggattgccgtcaaggtcggcttggcgcagccagatgctccgggccggttgtgcgggtttggcgatcctcgccaacctgactttcgcttcgcgtcagggccggtggtcggtcgttggcgggaattgcggggcgactgccaattcgcgcattgcgcagcagctcaccaaacggctcgaaactgaacataggggttgatccaggacgacacacaaatatcgcccgcaaggtctggaagggaagaccggtccttctcagaggagcgagaaaagcttgtccattgtgaagggtttgcgcagaaatttctcccgatcggacaacaccgccggcatttcggcataccctgtcatgtagactacgcgagcttccggatcgccgtcgagggcatgacggccaagcatccagccatcgactttgccaggcatcctcaagtccgtgacgatcacgtcgaacctgtgatccgaacccagcagcgccatggcagcatcaccgttcgaggcactttcgaccttgtaaccgccaagttcaagctcatcgacgaggagctcgagaagcaaaggctcatcgtcaacagccagcactcgcttcatctgcccctccaacacgtcgcggaaaagaaagcttcacgctggttccagttcccggctcggactcgatcgtgacctgcccaccgctttgcaccacgaacccgaacacctggctcaagcccaggcccgtgccagaaccgaccggcttggtcgtgaagaacggttcgaccgcccgtgaaatggtctcgctatccatcccgacaccttgatctttcacaaagatagcaacggacccaccttccatggcagtggtgatccgcagaagaccaccgtccggcatcgcgtcccgggcattgagcgcgaggttcaggatcgctgtgtcgaactggttcttgtcgatctcgatatccagtgactcaggccacaagtccgtctcgacagtcattttctggctggtcgtctgttcgatcagcggtacaagatcgcagactgcctgattgacgtcgaccgggacgatcatgagaggctgcttgcgggcaaaggcgagcaactggctggttaaccttgccgcccgttcgctggctgcaagggcattctcgatgcttcttgcggtcttgtgctcgtcatcacttccgcgcttcaaccgctccaggttgccgttgattatcgccaaaagattattgaaatcatgcgcgatccctgcagtcaactggcccactgcctgcattttctgcgactgccgcagcatctcttccgcatgctcgcgctcggccatctcgacatgcaatcggtcaagtgcggattgcagctggctcggcgagggaacggcaaccagtttcggtagcagcggccacagaacaattgctgtcacgatcgaggcaattgcggtgatgaccttgacgagagcttcgattccgtaggctggaacccacaacacgagaatgctgatcaggtgggttgtgccgcaggccaggatgaacagggcaaaaagccccagcaaccacccgaactccaggtccggacgacgcctcaagaacaaccagagcacaaccggaattgagtaatatgccgatgcaatgatcgcgtcggcgatgacatgcgtccagacaagacccggatcccacagcaggcaaaagccatggggcggcaagcccgtctgcaggaaaaagcgcatcaacctgtcgagcatttccattgatcgctcctaacaggccccagcattgtcgcaaacgacattggaagcaatctgcctgcttgcgcggtgtggctcaatcctgtgccgctcgcggaatttccctgcggacgagatcttggcgatggttgaatgaactgatgcggtggaagcacccttcgtcccgcatcggatgatgctcactgcgccgatctggcgcatcaaggagaggcaggtggcaccagcacacctccaggcgatcgacctgacgaagctgcagccgctactgtgcgaaggcttcctgcatcgcctgcgctgtaagcccgcccgaacagccattctaggagccgccatgcccaatcatttggccatgaggtccgcttgatcagccacaagcctgtagggcaacgaggaaatggcgataggaaatctggtcttggacattgtcggagaaccgtgccccagtcagaatgcctgcctaccttcggcaatgtttaacagctccggaaaaacgaacgtagccggcgcccggccgcacgcaggcaggagctcccgaagcaggccgttgctgcgtaagtcgcggatgattttgcgcgcagttgcaggcggaatctgcgcggactgaggtggtgccggaagtctggacggaatgctaagctaatcccgacctgatggtggtaatcgacgagaccttcatggagtgcccgtggtatggcagccgccagatagtgcggcatctgcggcgcaatggtcgggatattggtcgccgtcgggcgcgacgcctgatggcgaagatgggtctgacgccgatctaccagcggccacgcaccagcgatccgcaaccgcaacaccggatctatccgtatctactgcgcaagctggcgatcgaccggtcacaggtcaggtcctcctctcaggaaaacccgacacatagcggccaccacgaccatcacaggcacccggcaaagagtgcctccggtgtgtcgggatcgactacgggctacgctctccgccgatcccgacacaccggattctcgtcctgattgtcgcgcgacaggtcgctgcagtctgggaatcaagcggtgtcaggcgctttgaaccaggtcagccggccgcccgcagcctttgaggcggcttctggagtgctaacagactttgaacctcagcgcctgggaccgggcggctgatcaagtagccctggatcatgtcacacccttccaggcgtagcgcctcgagcagttcgggcgtctctacaccttcggctagcgtcaccatgcccagagcatcagccagggtcgtgatcgcgcggacgatggcgttggcgctgccgccttcactcatggcgcgaacgaagctctgatcgatcttgatcttgtcgaacgggaaggagcgcagataactgagcgaggagtagcccgtgccaaaatcgtcgagtgccacccgcacgcccaacgcctgcaaggaatgaagaatcttcaaggtcttgtcgacatcgccgataaacacgctttcggtgatctcaagttcgagccgcgaagcaggcaagcctgactgggccaaggcctgggcgacgcaggtcacaagcccctccgaggacaattgccgcggcgagatgttgacggcaacagaagcatctccaggccacttggcagcctgtcggcaggcttcgcgaatggcccattcgcccatctgcacgatcaatcccgtttcctcggcaatcgggatgaactgaacaggactgatcatcccctgttctgcgtgtggccagcgcatcagcgcctcgaaacccttgatccggttttcggagatcgagaaaaggggctggaaatggagctcgaaatcaccttggccaaccgcactgcgcagatcgacttccatgcggcgccggcggctggcctcggcatcaagatcgggttcgaagaagtggcaggagcctttgccttcgcttctggcgcgtgacagtgcgagttcagcagcagtcatcaatgcattggcgctggcgccatcctgcgggcctacggcgataccgacgcaggccgatatctcaaggttgcgatcgctggcaaaggtacgaccgagcaccatttcaagcgatcgagcgatggagttgcagtcttctgccggctcaagtccgccaagcaagaccccaaactcgtcgctgccaaagcgcgcaaccatcgcatcggggaagcggtcgcgaagcgtgaacgccagcgagcgcaggatttcgtcgccaacgggatggcccatcgtatcgttaatggccttgaaatcgtcgacgtcgatgaaggcgatgaaattcctgtggcgctcgttctggcgcgtgacggcgcgatccagctcttcaatgaagaaccggcggttgggcagaccggtaagagagtcgtggagcgatgcatgaagcacctgctgctcgcgctcctcgacggcgtcgaccatcgcgttgaaactgtcggccagggagcggatctcgataaccccttcagccttgaccttggccactgtgccgcgtccataggcgcgggttgcttcagccagggactggagtggccgggcaagccctcgggaaagacggatggaggcccacgccccggccagcacgccaaccaggctgatcaataccagaatgagacgcaaacggctgtattgcgccagtgacttgtcgagcgagtgcgcgagaaccagtcgaggctgcaaggcgttctgcaggctcgcaatcgccgagatctgcaccagcagctgaccgccatctccatcgatggtcctgatctcgcccaagccgaccgaggccaggcttcctgccagttgcgagcgatccaatatgctggcctgaacctcggccgcggacaggcgggcaagctgcttcatgtcctcgggcccgagccggttgaccagaacgagccatccagcaaggtcgggcatctcgatcggtaccgccgcagcaagagcgtgcgtcccatcaaggatgacaactccgcgatcctgtccttgctcaagccggtccagcatggctgcaccatcgattgcatttgcgccatcggatgcaatcacgctgccatcaaggtgtacgatgaccactgcactgacccttgcacggtcgcgcagggtctcgatcgctgacgtcaacgtcggggcatcgcctgtggcataggcttccctgaagccgaaatcacgcgccaccacctcgcctgcatcggccatctgcccctgccgcgttgcgatgatctggtcaaaaacgcgtgcgtttgcagaaagttcgcgttctgcagcctgcctggcgaacatggtaatgcccgaactggcgacagcaagggtcgcgaccatgacacaggcgagaagcaggacgtaaagcagtgcgatcctgccgcccagcgttcttgcccgacgcccggcactggccatcgcgagccgggtcagacgcctcaggacggccttcacgctcacgatcatttggccggcccgggacggacagcaatggcgatgtgcgcgcgattgcccggctccatgacaagcttgccgcgccactcgccaccagccgcgcgcatgcctggatgccacacgatcacgtcgtaggaaccacggccgagtccctcgatcgttgctagtccgtttacatccgtgcgcgcggcataaggggagtcggttacgcggatgtagccacgcatctggtcgtggatgttgcaccccagcgcgatcgtgcccgccaccttgaactgctgcgtgcgcgtctgatcctggccatacaattcgatcttgaacggacccggcctggaaaagctgtagatcgaatggcgcacgttgtccaagttgggaaatgccaccgtcgcgccgcgaggcacgatcagcgtgcccggagtgaaagcgagatttctctgcgccatggcattgcgccagcggaaggtcgcaatgcgcttgtcacccggcggaggcaccacctcgaccaccgcatcgcgcaccggcatgcccgcctgatccacgacctgcacctggacaatcggcggcggcgctgccgaaagcagaaggggcaagatggctatccacgacaagcgggcagcgaacgtcgtccgcggggcttgggggcggtgcttcggcaggtcctgcatggaagcggcttgccagaaagttcctaatacaatcagaatctttcggcttgcagtattcaggatttcccaacgtctctcggttaacgcagttcgcaagactggcgatgacggtgagatctcccctatgtgcaacaaggcatccaaggcatttgcagcacgccccggctggcggacaacctggccgggcgctgccgccggcatcctgttctgctccatgctcctcgcagcaccagcagcccatgccgaccccctgctggacggcggcaaactggtgctgaccaacgggatttcctccatcgaaggctcgagcggcggcggccttgccagctgggctacgatcggcggcatggaaactgaccgcggtattggcatatcggctcatgtcacggaaatcgaacttgccgactatggttggcagagccatggcgcctccattggcatcaaggacagggttgaactggcctatgctcgccagaacttcgacacgagaaaggtcggcgcggcattggggctgggcgagggttacaagttcaatcaggatatcttcagcgccaaggtccggctcatcggcgatctcgtctacggtccgccgctgctgccacagatcagtatcggcttgcagcacaagcgcagccttgatgccgccatcgtcaaggcagtaggcgcctcatcgccgaatggcaccgacttcaccgtaagtgccaccaagctcttcctgcagcagagcgtgctggtcaacgctaccgcgcggctgaccaatgccaaccagttcggcctgcttggcttcggagggccggatcagcgtgcgcgttcgctgcagttcgaaggttcggttgcctatatgctgacacctcgcctcgtcatcggcggtgaataccggactcgtccaagcaatctcgcgatcgcgcgggaggatgatgctcatgacctgtttgttgcgtgggccttcgtccgcaatgctaccattactgccgcctatgccaacgtcggctccatcgccacgttcgacggccagcgcggcggcctcgtctcgctccagttcgcattctgaaggatatcccatgacacttgctctcgctcttgcgctgcttgcagcacaacctgtcagcgccgagccgcaaggtgcagtgatccagcaggaggatcctgccgcggtcgactgggaaaaggagttcggggtcgagaagaaagtccgtgatccggttacaggcgagcttccagtcgatccctacccgcaatcgccggccaatgctggtgcaacgcccttctcgggagacactctggccaaggcgtttggcggcaaggccggcattcgcaggttggtcgacaggttcgtggacctgaacaccaccgatccacgtatcgctccgatcttcaagaaccacgatatggtccgtttgcggcgcaccctgttcgagcagttctgctatctccttgatgctggctgcacatataccggccgagacatgaagtcctcgcacaagaatctgggcacgacgcgcgccgacctcaatgccctggtcgagaacctgcagcgtgcaatgcgtgaaaacgatgtaccgttccgcgcgcagaaccggctgctttccaagctcgcgccaatggacaaggacatcgtcgaacgctgagcggtcgcaggctctgcccgtcagggtttcggaacatgagcccccgtgggccgccgatcaccctgggggcaagccaaggttctgacgcctctgcccgaatgcgcttctcatccggtctatcagctagcgtatctgcgcttcgctgggctgcgagctgcgcagccccgtttccagcgctcgtgcaagggccgccacaccggacgcctcaagaccttgcttgagctcattctcaggtgcgcggccagcaccacagcatcgggactttcctcgatgcaagtcgggcgaaccgcgcgataaaaagtgggggccgtagcccccaccttatttggtgcaatcaggttgcttgttaacaaccagacctgcaatttctgaaggcaaatgctatcatcgcacttgctgccgtcaagatcgcacttaaaagtttgcgcgctgcaggttaggaattctggatggcaacgcgtcttggcctggacattggcaccaacagcataggctggtgccttttcaatatcgatggacagggaaagccggtcggcttgcgtgacattggtgtccgaatattctccgacggtcgtgatcccaggtcaggggcttcgcttgcggttgaccggcgcgatgcacgggcgaagcgacggcggcgcgatcgctatgttcggcgtcggtccgctctgctggacgccttgatcaacactggccttatgcctgctgacgttcaggaagccaaagccctgaccgggtgcgatccttatgttctgcgcgcgcaagcgttggacagagcgctggatgcccaccttctcggtcgagtgctcttccatctgaaccagcggcgaggcttcaaatcgaaccgcaaggctgagcgcaaagcggggggtggcgaggagggtggcaagatcgcggagggtgcaaaggcgctcgatctggcgatgcatgaagcaggcgcgcgcacctatggggagtttctggctaacagggatgcaagacgcgtgcggttgcgcgccgaaggagatggctttgatttttaccccgaacgccgccatctggaagctgagttcgatgcgatctgggccgcacaggccgcatgcaatcccgcgttgctgaccgatgctgtccgcgaccggttgcggcgcatcatctttttccagcgaccattgaaggcacccaaggtcggtggctgcgccttcttcaacgaagagccacgtctgcccaaggcccacccgctgttccaggaacggcgggtgtatgaagaggtcaatcagcttgaaatcaccagagcgggagcaccatcccgaaagctgacgctcgaccagcgcgacaagatcatcctcaagctcaagtcggcgaagacggtgactttctcgggcctggcgaaactgctgcagctcgctgatggtgagagcttcgacaaggctaccgaaaaccgcacaggtcttgtcggcgatgagatctttaccgcattcagtgacaagaaatgctttggcgatcgttgggcacatttcgatcccggcgctcaatggtcaatcatcgacacggtggcagaggaggaagacccggtgcgcctgcgcgactggttgatggcaacgcacggtgtcactgtggatcaggccgaagcaattgggcgtgtgcgcctgccagaaggccatgggcgcctcggcgaaacggccagccgattgattctcgcccaactcaagtcggggtcgaaagatggacatccgctgacatacagcgaagcagtggaagccgcgctcggaaagtcgcgcagcgatttgcgcaccggggagatacaagaccagctgccttactacggtgaaatcctcacaagggagattccgcccggctcgctcgatccgaacgacgatgacgaaatacgctggggcaagatcacaaatcccacggttcatatcggcctgaaccagcttcgccgcctgatgaatgccattatcaaggcgcatggccgccccgatgagatcgttgtcgaactggcacgcgaacttaagctcaatgagaaaaaaaaggccgaacgcaacaggcgcatcggcgcgaacactcgcgctactgaggccaggtcgaaaaaactgctcgaaagcggacagcctgataccggggcgaaccgggcgctcctgaaattgtgggaagacctcagtccgaacaatccgctcgaccggtgctgcccgttttgcggacatcacatcgagcaaatggcattgttctcaggcgaaaccgagatcgaacacatcattccgttctcgcgttgcctcgacgatagcgccgcaaacaaggttgtcgcgcatcgcagctgcaagcaggagaagggcaacaagacgccttgggaagcctggggacacactgaacgctgggcgatcatcgccgagcaagtgttacggctccataagtcaaagcaatggcgtttcgcgctcgacgcgatggagcgccttggtcagcagggcgactttatcgcgcgccaactgaccgacacgcaatatctgtcgcggatggtagggacctatctttcgagcctttatcccgacactgccggggttcatgtcatccccggtcacatgaccgcgatgctgcgacggctatgggatttgaacgagctgctgcccgatcataattacgtcgagaatccccatagcggtgcaccaaaaaatcgtttggatcatcgtcaccatgcaattgatgccgctgttgtcggggtcacgacacgcagcctgctcaaggacatttcgaaggcggcagaacgcgccgagcgtcaggatctcgaccagcttttcatcgatctaccaacgccttgggaaacattccgcgaagacctgcatgagtctctggcgcgcgtcgttgtcagtcacaaggctgagcatggccgcaagggcgttccggcaaagggcaaggatgtcaccgctgcacggctgcataacgacactgcctacggactgaccggcctcgccagcgacagcggcttgccgattgtcgtccaccgcgtgcctttgctcagcctcaaaccggatgacctctccaatcccatccgcatccccgacgctgctttgcagcgggcactgcgcgaggccactgatggcaaatcgggtaaggattttcaggcggcattggccgggttttcaagatcagatcctgtgttcaagggcatacggcatgtaagagtgcgcgaagccttgaaggtcatcccgatccgtgacgcatcgggccatgctttcaaagcctacaagggcgatgccaacgcgcgatatgacgtgtggcggatgccggacgggaaatggatatcacgctggaaggacagggacggtgcatctcgttcgagcattgtatccatgtttgaagcgcaccagaccggccagcctgcacagcgcccacacccagcggcgaagagagttttgagtttgcgccagaacgacttggtagcggtcgagccgcaaggccagccgcgcaagatcatgcgggtcgtgaaattttccagtgggggagagattaccttcgccgagcatcaggaagcagggccattgaaagcgcgacacacgacttcgcccgatattgatcctttcaaatatttctattcatctgctggcggtctgcagaaggccagcgcccggcagattcgtatcgacgaacttgggcgcatcttcgatcccgggccgcgttaacctcactatcgatgagacccgccgtgtcgtggccctcgccgaacgcggcgcaactatggtcccttgcgctgccaatcaaagtcgtcgtcatatcgccgattgatgggcatcatgcccaggcagcgaggatgcgggcgcaatgggatgcggctcgcccgctatccaaacagctttggcagggcaccattgtcgccaggatgacaacgccggcgtccttgctggcggcgtgaggcagggcagaagccaatgcactcatgctgatggcgcggcgcgtccgctccggcgaccctgacaatctgcaggcgcaggccgcgcaagaatatcggcccgctcagatgggcgctgacttccgccgcgaatcgcacgccgacagtgccaatgccctggtgaactgtggcgacaccgtcatgctatccggcgcatccaggccgatcatcggggccgggctgctacctgcacttggcgcccaccatcaatctgcttcacgggctgatcgggcatgatttgcgtctgggcgggacgatctcacctgtgtctgtggcgacccaacgtctcgctcaagcgcctgccaggcgtttcgaagatcgcaaatcggtactggctatgttcgatccgcctgatgcccatgactgggcgtcgcttgcgcagtgggtcgggcaacgaaaaaatccgaagcagttcgccacgatctggattctttgcatttcagctatgacagatggggctgtttccagtcactagtcaactggtcagccacccatctgtcatggcatttcagaaatcgcggcccagctgcaacaacagcctaagcgtcatgcgagtgacggtagtatagcattccagcaatcccggtccagcggcaacgcgatccttgacccgaatacgaggagtgggggcggcgggtatccaacccgtcccaaagcttggctctcggggcaatgagctcacttgggctggatgtaacaattcacccgaagcggggacagctgggcgctcaaatcgaagccgggcgttgcgcagccgaccagagccagcgtctttgtctcgatgagcggggctgttcggaaggcgctgtcgcccttggccgaagccgccatcgcacgccgccatccatcgcctggcctcgttcatcaatcggaccgcggatcgcaatatgcagcttccgcctagcgagagatcctcgccgcaaccagcatcgtcggctcgatgagccggcggggaaatccgtacgacactgcaaaggccgagagcttcatgaagacgttcaaagtcgaggcggtatgcccgatagccttcgagacctatgctgacggagcaactctgcttccgccattcatcgaagacgtctacaatcgccgccggctacatttggcgctgggatatctcagccagttcctggtcgatgactgtgaccaggaactggcgaatgacctttggcgtgaatgccgagggtgcgttgatcgatctggatttggaggactatcatggcgcttgggatgcacccgtctccgactgtccgtgttggcaattggctaaagacggaaatcgtggagcgtgccggggtgaacgtgatgaccttggcacagcactttggcgtctcgcggcaggcattgagtacgctgctcaatggcaacgcaagcctttctgccgatatggcgatccggtttgaaaaggcctttggcgtcagggctgatacgttgctgcggatgcagactgcctacgaactcgcgcaagcccgcgagcatgaaggcgacatcaaggttcgcagattcgcgaacgcggcctgacgccgccaatggcgacattcgcgggtgctgatcattcttcctgaacctgccgttcgttcatgccaaagatttccggctcaccgtgcaaagcgatgggccggaaacctgatcaaacttcggttcgctccgatagcgtcaaagcatcatcgacatcacgtcaggaacgggatgctgtcacccgtcgagttcgaacggcagcagattttgaaagcgcaaggcgtccagaaagccaggggctattcaatcctcttcatcgaaacctacgatccgcgtaatgatcacctgcccagattgcgatcgaaaaagcggagcattacatcgtaggcctcatgtgattccgggatgtcgggattgtagaaaaagccgtggaatagcccctcccagatgtgaagatctgccttgacgccaagagcagtgagccgcgagtgcgtttttacggccgagctgagttcgaagcctcgcgtgccggagatgatcagagttggcggaaagcggcgtagggtttcgtctgatgagcccggggaaaccagagggtcgttgggatcgcttcccttgaagtatggcaatgccgtccacggtaattcgtcattgatgggccacgatggagcagcccttgcatcgccgattgcggcggtcatgaaatcagcatcgccgccgaagccaaaagcagacgttgtgagacctgcacagaatacgccgactgcccctggacgaggaagaccatgcttctggaaccaggccgttgccattcctgtcaacatgccacccgccgagcagccatagatgccgatgttgcgcgccggataggacttcagcaactcgcgatagaccgcggccacgtcttcgcttgctgccggaaacacgtgctctgggccctgtcggtaatcgaccgatacgacgcggaccttgccaagcgcggcaattggaatggattcgagctccgcgcagccggggaagcaccccatgaagccacctccatgcagattgatgagcacgcgcctgcgattctggcgggcaatcccgtcacttgggacataatcaagaacgtggacgccagcgatctgacgttcggtcatggtatggccgaaagtctctttcgcctttgtcagataacccttcatgaacacgggcacgcccgcaatctgcttgaccttttcgggatcctgcatgtccttgaggtgctcggccatgtaggccttggcctcggggctcagcatcgaggaaacggggactgccatcgccggaacgtggacggtgccatcgctttcgaccttgatggcaggcggcggcgtgggttgtgcgcttgctgttgtgccaaggccggaaagcactgccaaagtcaggtaaaacgccaccaatcgcttgagtgcagccatcgtcgtatcctctttcggccgtcgggtgcaggccgatttttcattatggcttgcgtaatcgattgcattatcatctgcaaggtgtaagaaatcgattacgcaactgccaagactccatcagagagcatggctgggagacatgacacgtgagcttgacccgccggacattcgcaacgtcagccttggcatctgcagccatgccagtcctgttgcaggcgcgttccggcccgagacctcctgcgatcgccaaggcaagcgtcgacccgatggcgctgctcgatcccgaattgcgcgaaggggcaaggttgatactgtcacgcccgctgcctgatccccttgatcacgcagcgatcgtgggaatgcgcaaggctgcgccgccagcacctgatgtgctgccagcgcctgcgcccgcggtcgaacttcgcttgattgagggcgcgccaggccacccgcccgtcaaagtggcggtaatcggcgcgggcagaaaagcagctttgcgcccggccgtccttcacattcacggcggcggcttcatcgtcggccggatggaggatactatcccggcatcgcagcaactcgccaaggagttcgactgcgtggtggtcgaggttgactatcgcctgtcccccgagacccgctttcccggaccgctcgaggattgttgcgccgcattgacctggcttcatgccaatgccgatgttttgggcgtcgatcgcacgcgaattgcggttaaaggcgaaagcgctggaggtgggctcgccgccatggtggcgctggcggcgcgggaccgccgcagcgtgccactgtgctgccagatcctgatctatccgatgctcgacgaccggaccggatcgacgcggcgggtgccgccgttcatcggcaccatcggctggaacgaggctggcaacgtggtcggctggagcagcctgcttggccagcctgccggccaaccaaccattcctgccggaagtgttccagcgcgggcccccgatcttgcaggattgccgcgcacctttatcggtgtggggtcgattgatctcttcgtggacgaagacatcgcctatgctggccgtctggtgcaggccgggattccgaccgaactcctggttatgcccggcgctttccacggcttcgatttcgtggtgcccgaatctggcgcttcgcaagcattcaccgctgcgtggaagcgcaccctgcgcgcagctttcgccatccggccgcctgtctgacagctacgaaccatgaggcaggtagtcccgccaccgttttaccgacaattgcgtaatcgattgctcacgcaaaaaccaacaatgggaggattagcatgaaaatctatcgaaagacggcagttctgctcaacgccctgattgcctcagcggcgcttggtctggtgatgtcggccccggcccttgcccagaacgcgccgcaggatgcatcaggcgaggcaaccagcgaacctgccaatccgggcgagatcgtggtcactgccctcaagtccggctcggtccgcctcgacaaggtgccgctggcaatccaggccttcaacggtgacgtgctgaagcagcgcaacgtgcgcgacggggctgatctgatccagctgatccccggcgcatcgcaggcgcaggagatcggcgcgggctatcgcatcttctcgttccgcggatcaggcgcgggcgggccaatcggcgatggcctgatcggctactaccttgacgatacgcccttcggcgtgcccaacaaccaggccgcgccgccagtgcagtacttcgatattgaccgggtggaagtcctgcgcggaccgcagggcacgctctacggcctcggttcgtccgcaggcacgatcatctaccataccaagaacccggatctcgatcgcgcgacttacgccggcgaactcgagctttccaagacggccgaggccagcgatcccaactatcgtggtgcggcggcaatctccctgcccttggtaccaggcaagctcggtctgcgcgtgagcggcgggtacgatcgccgcgcgggcgtagccgacatctattcgggcgcacccaccggcaccccgcgcgagaaggacgccaaccacgtaacctcgaaggacattcaggccgtgctgctgtggaagccggatgaactgacttcggtgcgtacgcgcttctggtatttcgccaccgaccagaagtacctcaatgtcatcaactcgctcgatccgccgttcgcggcattccagggcgatgttgtgggcttcgacaagcgccgtgcgtggtacgcatccaacaccatcgagcgcgagttcggcggggtgacgctgaccaatgcaacgtcctaccagaagtccctgccgggtggttttcaggtcggcctcaaccttggcgcaccgctgggaacgggcgttctgataaacggcggcgacgcccgcaatttcgtgaacgaactacgtcttgccaccaacgacggcgggccgttcaagggggtagccggcgtgttctaccagaacgcccgcagcctctacaccttcagcctgaccttcccggcgttcggcctcaacgggcagactattaccaagaccgagaacgcagctgtcttctccgaggcgagctacgagctgttcgacggcaaggtcgtcccgctggtgggcctgcgctacttcaaggaccggcgcgaggcggattccatctcgaacggcgtccgtgtgcagagcaaggcccggcccgacgcgctgacctggcgcgccaaccttgcgatcaaccccagccctgactggatgctgttcttcaatgccgggacgggcttccgcagcggcatcctgcaatcgcaggcgcaggccgatgcggtgattgccgatggcgtgccgagtgatatctcgctgacgccggacaaactgcgcaaccttgaagtggggatgaagggctcgcttttcagcggtgacctgcgcgtcgctgtcagcctctacgacatcaagtacacgaacatccagagcgccttcaacacctcgatcggccttgctgcctttgccaatctgggcgacggcaaggcgcaggggatcgacatggagctaacctggcgcaccccgctcaagggcttcaccctcaacgccatcggcaacgtcaacaattccaagttcacccgcgtccgcccggcctttgccggcgcagatccgcgtatttcgaacggtctgcgcctgctcaacacgccgacgcacaacttccgtctggatgcgagctatgagcagccgatcggcaatgccacgctcttcgccaccagctcggccacgttcatcggtcgctcgcggcttggcgatgctacggtaaacgagatcaatccttacgagctttatcaggcgagcatcggcgtgcggttcgatcgctacgaagtgcgcctgttcggcgataacctgtccgatcttcgcggcccgacttctgccaatggcccgaccctgctggcagggcctcgcccgcgcacgatcggggtgactttccgcctcaacaccaattgacgcggcgcccggcgatgcctgttcccctccacccacaggtatcgcctggaaacccaaggagctgagccatgcagaggcgggatctcatccgtgctgcatccatggccggtgcggttggtctggcaccatcgatgacattgtctgcgcaggagaatgtcgtgctgcccgccgacgctgatattgataccggtctggacattaccacggcaatgaccactgccggtccggtccgaggctaccggcagggcggggtgaagatgttcaagggtgtgccctatggcgcgcccacgggcggggccggtcgtttccgcccgccgcgcccaccccgggcgtgggcagaggttcgctcgtgcctgcactatggcccgatcgcgccccaggacaagggcaccggccgcttccaagacgaggaagccttcatcttccgctggaacgatgcagtggaggacgaggactgcctgcggctcaacgtctggaccccggcgctcgacgacgcgccccgtccggtcctcgtctggctgcatggcggcggcttcgcggcgggatctggtcacgacatccccgccttcgacggcgcgaaccttgccgcgaccggcgaggccgtggtggtcacgctgaaccaccggctcaacctgctcggctttctcgacctgtcggaatggggggaggagcatgccgcatcagccaatctcggaatgctcgacatcgtcgcggccttgcgctgggtgcgcgacaatatcgcccggttcggcggtgacccaacgcgcgtaaccatcttcggccagtcaggcggtggcgcgaaagtaacggcattgatggcgatgccggaggcgaaggggctttatcatcgcgctatggtgttgagcggctctttcgcgatgttcaacacccctgataaagcgcgcaggctctcggtcctggtgctcgaggaactcggcattgcccggggcgacatgccatccttgcaggcgctgccctatgtgcggctgcgcgctgcggcagagcgggtgttggcgcggatcaatccgacattcgacggtttcgtcgacgtgcgtcagataccggacatgctgaacttcgcgcccacgctcgacgggaagattctgctgccagatccccgccatccaaaccatgccgccagcgacccgcaggttccgctgatcatcggctccacgctcaacgagttcgttaccgggatcaacgatcctgccgcattcgccatgactgacgacgaattgcggcgcaaggtggcgcggttcgtgcccgcaaatgcagaagctgcaatcgctgcccttcgcgcaacaggaccgcaggacaagccatttgcactgtggtcgcggatggccacggcgccgatccgccaggccgtgatcgatcaggcgcggcgcaggctgcaaaccggctctgcgccgacgtggctgttctggttcacgtggcagtgtccggtgttggatgggcggccgatggcctttcattgcctcgacatcccgttctggttcggtaacgcccggacttgtgcctcgatgaccggcggcggcagggaagcagtggcgctttcgggcagtatggtcagggctctgctggcatttgccgccaatggtgtgccaaaggccccggacctcccggcgtggcgcgcggtttcgggtgttgacatggcctcgctgcagttggccagcagcccggtcatggtcggtgaggtcgatgctgctgaacgagcggtccttgcatgaatgcgcgcttgctgtttgcctcacgcggcactgtgtgtaggtgtttgcaaccgcgtgcaaagcgcgtcaggcagcgataatcgaagagagtatggtcagcgtcaagaacctcaaggaatttgccgaattggcgggcgtatcgactgccactgcatcgcgggcgctgacaggttccgggcgcgtaagcgacgatacgcgcaggcgcatcgccgccttggccgagaagctcggctatcaacccaacatcgccgcgcgcaacctgcgcacgcaacggacgatgacgattggcgtgctggttcctctggggcacgaggcgctgcagcacctttcggacccgttcttcaacacgatgaccggctttctggccgatgcctttgccgaacacggctacgatatgctgctgtcgcgcgtgctgccgggcaacgaacgctggatggatcggttcatcggcagcgggcgggtcgacggcattgtcgttgtcggccagtcagaccagtttcacgtcatcgagacggtttcgcgacgctatgaacctatggtggtctggggcggctattcgccagggcagcaccactgctcgatcggttccgacaatcgcctcggtggcaggctggcggcgacgcacctgatcgagcggggctgccaacggattgcctatgccggcccggtcgaaggatcggaattcggggaacgcgtggatggtgcccggcgggcgctgctcgaagccggcatggcgcccctgctcgaactgccgacccacttcgaacccgatgccgcttatgcagacgttcgggagaaactgggcgaactggccgacatgcccgacgggatcgtcgccgggtcggacgtgacggcaatcagcgtgatccgcgccctgcgcgatctcggccagcgggtgccggacgatgtccgcgtgatcggctatgacggactgcccatcggcgagcatatgagcccgccgctgaccacgatagaccagcagcttcgccacggcgcagagctgttgacgcagacgctgctgcgccggatcggcggcgaggaaacccaatccagccagatcgaaccgcacgtcatcgtgcgcggatcgacctagagcccggcccggaccacgcgagatgtcgcgccatcgagcgcgatgcgaaagaatggcgccgggtgtccggcaaaccctgtacggcgctgtacagccgtcgtgatcgccgccggggccgcgacgcctggaaaatcggcgaaaccgatgacctgcaggtcgttcatcacccaccagctgtattcctgcgcgggggcctgctcggggttcccggcaaccagtccgctgccgttgagcagggtgtacggccccagcggcccctctgcgaccgcgccgtagagcccggtcggcccggaaggcccgccagcggcaaagaccttccgctgggtcgaccagaacaggtaatagcggccatcgacaacccgcatgtgcgggcgctcaagctcgttgttgaggcctgccgcgctcagcaccggcggcaacaggcgccaccccgaagcggcggcaccgtcggcctcggctacgccgataacgccggtccaccgcgatgacgagcgggcacatgagccggtcaggaacaggaatgt

SEQ ID NO: 3488 - DNA, 23201 bp, synthetic construct
  source 1..23201: mol_type = other DNA
  misc_feature 1..23201: note = Synthetic
ttcatgttcgccaccgagcccttcctgggcgtgcgcccggccaagcaatacaagttcgtggtgatcctcagccccgctggcaattacttcaagtcgggcgcaccggcggtctccgtctgggtttccgaatatacccgcgcggcccccggcggtaccggcgcggccaagtgcggcggcaattacgccgccagcctcgtcccgaccggagaagccttcgccaagggccatgaccaggtcgttttcctcgatgccgccggcaatggctggatcgaggagctgggcggcatgaacctgttcttcgtgttcgacgatggcagcatcatcacgccgccgctaaccggtacgatcctgcccggcatcacccgcgacagcctgctgacgctggccagggccgaggggctgaacatccgcgaggagaaatacgcaatcgaccagtggcaggaggatgcgaagtccggccgcctcgtcgaaaccttcgcttgcggcaccgccgccgtggtgacgcctgtgggccatgtggaaggccgcaagcatgacttcaccatcggcaccggcggaccgggacaggtgacctccatgctgcgcgacaagctcgtcgccatccagcgcggcagcgcgcccgacccgcatggctgggtgacgaagctgtcgtgatgctcaagcttttccgcgccattgccctgatcgagggcgtgacgaccatcgccctgttctgcatcgccatgccgctgaaatacggcgcgggaaatccggtgctggtgccgccggtggggctgacccacggcctcgcctgggtcgcttatgtgctggcgatggtggtgtgcctgccaggcaaggggttcaccatgtgggaagtggcgcgcaccttcatcgccgcgctgttccccttcggcaccttcctcaatgacgggctgatccgccgcaagcaggcggcgctggcgctacgcgacgccgcctgagcgcacccgcttcctagatgctggacggataggccggtcggatatcgaccggcaggtgagtcatgcgtgaaatcgcgtcctcaccatgcgcgtcgagcttggcgtaggtttcgaagaatgcggccgtgccgtcataatcgccggtcgcctgcagcatcagctcggtggtcagcagctcggtcagcgcgctttccatgcgttccgggtcgatcacgaaatgctcggcctcctcgtcgaagcggaaggcgcccttttccagcaggaagccatattgtgccgccgcgcccttggcgtgcgcttcctcgatcccgaagcgcatggagcggaacaggccggtgaaataggtcgcccagagctggtccttttcggccgccgggatctcgccgcgttccatcatgtagaggatgttgtagacgcccatgacgtccgccttgctctcctccagtgccgaatagagctcgcgcagttcctcgttcaccgtggttgcgcggccatcgacggtgatgctgcccggtcccagcgagtgcgagagttcgtggaacagggtgaacagctccatatacttcttctgcaccagcccagcctggctctcatgcagcacgaccgcgcccatgggctgcaggatcatgtcgtatttcgcacccagcacattggcgaggatcactttcttcgcgcccttggcttcgcgcacgcgctcgtcattgggcaggttgaaggcgatggtctgcacgccgggcacattgtcgccgccgccctgcacctggtcggccacggcgatcgggctttcgaagccgcggttgaaattgtgatgctccgccgggatcggcagattgccctccatgtcgcgcaaataggagacatagcggcgcagcgcctcgctctcctccggattgcgcagggtcacgaagctttcgaaggcggtcttcgtgccatagaggcggtcggtataaacctcatagggtccgatcgcgacttcgatgggcgtgccttcaaggtccatccacgccatttcgctttcgaaataatcgtcggtcaggaagctttcggcgcgcagggtgaggaagcgcttgaggctgggattggtggtgatttccgccgcttcgcgcagcaattgcgcggcgggttccagccaatcggcatattccaccgaataggggatcgcgacgaggttctcgccatcgcggcgcaccacggtgtaggggctgagcagggcctcgcgctggtcgggatgcgcttccagataggcgtcgaattcctcgcgcgtcaggtcggcgggatagaagcccgcgccttccggcatgggcgtgtcgccatagaagggatgaaggtcgctgccctcgtcccacgggccgaaattgcggtcatacatgtcgagcatgtcggcattgccggtcgcctcgatctcggagcgcagctcgtcatagttgggcaggcgctggtgcatgtagatcacgctcatcagccggcttgccgcgatcagcttgccgacaacctgccgctcatcctcggtgagataggaagtatccggggtcatcgcgacatcggcgatctggtcgcggctggcgatcatgtcatagccgctctcgaccgcgttatcgcccgatgtgcaggcggtggcgagaagggcgacgggcaagagggccttggcgagaaagcgcatatgcgggcatccaatcagggaacagctgtaactatcccgcctgactagcgagccggggtgccgggatcaattggaaaggcccgccggggagccggcgatcagccttcgcggtcgttgaaggtccaggcgacctcgccctgggcgctgccggtggtgaccatctggtgcgccagctgcatcgcctcggcaaaggcatcctcggccatggcgggagcagcgacgccggtcaccgcagcacgggcgcggctggacatcaggacgatgttgcgggtcgcgatgccctcggcaggaacggcgaccatcgcgcgctgtccgctcgcctcgaccatgtgatcgcccgcagcaatatcggcaaagcgataggcgccgtcggcatcgctcatcgcgcgggcatcgcccagcgccagctccacacccgccgccggaacgccgcgcgcgtcatagaccgtgcccgtcacctcacccgccgtggcggagagggaaaggcccagcgaaagggcggcggcgacaagagcggctttgcgcaaggcgggacatccgaatcattgcggcgcggaccgatttccgcaccccgttcggactccacagccgagcaatgtgacggctgcattacagtggatgacattttcgcgacgggacgtgcgcgatcagcccttcagcgccttcagcacaaggtcgctcgcccgctcgccgatcatgatcgcagtggcattggtattgccctgcggaatggtcggcatgatgctggcatcggcgacccacaggccttccacgcccttcacccggcaatctggcgtcagcaccgcatccgcatcgtcggcagcgcccatgcgcaccgtgccgaccgggtggtacatcgggatcgtcgccgcgcggacataaggcatgagcctgtccaccccgctcgcatccatgccggggcgcacctcggcggtcacctgccccaccaaagcgggctgcgccatgatgcggcgggcgatctccagcccctctaccagttgcagcgcatcgtcctcctcgccgatcagctggtggcggatcaccggcggcgcgtcgggatcgctggagccgagcagcacctcgcccctgctctccggccgcgtcagcgcgatgaaggtactgacagagctttccgcgcgcagctccagattgcccgtgggtgtcacatcgaaggcgaaggcgctgaaggccagctgcaaattcggcgcgggcaaatccgcgcggcttttcacgaaagcctgcgcatggccgatcccggtggtgagcgcgcccgaacgaccgaacaggaagcgcgcaaggctcttcaccccggccaatccccggctgtcatcgttgagcgtatgggcggacacctcgttcaccaggtgcacgccgggatgttcctgcaggttctgccccacgcccggcgcgtcaaggaccacatcgacgccatggtcacgcaaatgcgccgccggaccaatgccggaaagcatcagcaggcgcggcgaattgagcgcgcccgcgctcagcaccacgccatcattggcggtgatcgtctcggaactctcgccccgctgcacggtgacgccgcaggcgcggccatcctgcatctcgatccgcaataccttgacctcgagcatgatctcgagcgtcttgggcttcttctgaaggtaaccggcagcggtggatgagcggaggccgttcctttgcgagagctggatcaggtccacgccctcattatgttcgccattgaggtcgggcgagcggggatagcctgcctgctgcaccgccgcgatccagtcgcccgtcaccgcatagcggctgcgcacctcggaaaccgcgatcggcccgcccgtgccgcgataatcatcggagccgcgctcattatcctccatccggcggaagaatggcagcacgctgtgataatcccagcccttggcgcccagctcggcccagcggtcgtaatcgtaagagtggccgcgaatgaacatcatgccgttgatcgcgctgccgccgccgagccgcttgcccgccggccagacgtcgggcctgccgcccacgctggggtcgggttcggcagagtacatccagtcgaaatcgggcgtgtggacgatgccgctcatcagcgcaggcacgcgggagcgcacgtccttatggcccttgcccgcttccaccagcagcacacgcttgcccgcctcggccagccgcaccgccatgggaatgcccgccgatccgccgccgacaacgatgatatccggattgtggcccaagtctcgctcctctcacctcgcctgatgcggcaaaagcgccgttccccgcaaggggtcgaagcgctattccccatctcatggacgatcgggaggccatggagcgaagcgcgggagcgcggctggcgctgctggaggagagcttcgcgcaccttgccggcaggccgctggtcgcgggcggcgacgggttgtggaacgcgcccggcgcagtggtggcacatggcacgcaagacccgccgctgttcttctacggcaaccgcaccgccctcaccctcttccgcatgagcgcagagcaattcatcggcctgcccagctacaaaagtgccgaacccggcctgcgcgcggagcgcgccgcgatgctggcaaagctcgatgcggaagacgtggttaccggctatcacggcatccgcatcgccgcagacggcacgcgctttcgcatcgaggacgcggtgatctggaacctcgtcgacgcaactggtaaacgccacggccaagctgcgacgtttgggaagtgggagatggttggatgatccttgccactctaatcgccagcgcaatgcaaggagccagctccatgtcaggttttacctacttcgatgaggccgaggcggaacggcgcgcacgcgcctgtacactgtcggacgtgtcgctcgcattcgacgatctgcttcaggaaaaccttgttatcatcgccgatgaggaaatttcggacgagcagctattctgcctcgcgcaggcattcgatgccacacactatacagtccaacttcctgaggcatatcaggccgcctttgctgcaaaggccacagaactcgctgcccctagatcgcgggctacgtggattgccgaatgggaacgattgggctttcccgaacctccacactacgacccggacacgatggaggacacggacttcgcaagaaccctcgaagacttctgtgggtcgcacgcgaaaggggcatttggttcggagtttggaccgagaatgatctcgccggaatggcacgcagcgctggacccgaattctccggagcaaaggcgcgcagtgagttgcgtgatgctcggtgcccatctgtccggtttcgaaatcggcatcatcggcaatgagaaagagccggaatgacggttacattcccgtagcaaagaaaaacccggcccccgccaaactttcccttgcttgccgccatcggcgcagcctcccatctttttcgtcatcgacccacaggttcaggagaaaaccgagatgtccgacgtctacaccccgcccaaggtctgggctcccaccgaaagcggcggccagttttcgggcgtcaatcgccccactgccggcgcgcgtgagcagaaggagctgccgcagggcgagcatcccttccagctctattcgctgggcacgcccaacggggtgaaggtgacgatcatgttcgaggagctgctggaagccggcttctccgaagcggaatatgacgcgtggaagatcaagatctttgaaggcgaccagttctggtccggcttcgtcgatctcaaccccaattcgaagatcccggcgctgctggacaagagcggcgacacgcccttccgcgtcttcgaaagcggggcgatcctgatgcacctggcagaaaagttcgactacctgctgccgaaggaaaacccggcacgagccgaaacgctcagctggctgatgtggcagatgggcagcgcgcccttcatcggcggcggtttcggccatttctacgtctatgcgcccgaacgctacaagtaccccatcgaccgctacgcgatggaaaccaagcgcctgttcgacgtggcggaccagcagttggcgaagaccgaatatcttgcgggcagcgactacacgatcgccgatatcgccgcctatacctggctcggcaatctctaccacggcgcctataaccgctgcgacatcttcctctcgctggacgagtacgagaatgtcgggcgctgggtgaaggcgatcgacgcgcgccccggcgctatccgcggacggttggtcaacacgcaggcgatggacgagcgccactcggcggcggatttcgacaaggtcgaggatcgcagcctgttcgatccgttgcgcaagaaggcggatgtgtaacgctcttcgtcattgcgagcgaagcgcggcaatccagggcggcactgtgcggccctggattgccgcgtcgcttcgctcctcgcaatgacggcgaggttgcctagaaccgatagcttgcttccacgccatagatccgcggccgcgccttgaagacgaaaccgccgggtgagaattcggcattgtattcctcgtcgaagaggttggtcgcaaagccgtagagcccccagttctcgccttccacgccgatgcgcgcattcaccaggtggatcgggtcgcgcacggtcgaattgggcacgtcccaccatgtccggcccgtgcggcgataatcgacacgcagcagtgcatcgagatcctcggtcagcgccggattatattgcgcaccgacattcagcgtcgagcggctgatcagcggggcttcattgccaatcaccgaaggatcggggaactccttgatatcgctgaaggtcaggccccatgcggcgttgatctggaagtcgctcgacgggcgcagcagcgcttccagctcgacgccctggatctccacctcgcccacattgccgaggttctgcgtggagttggcggcgaggaagacgaagaaatagctgttcttcgacgtcgtgtgataggccgccgcattgaggctgagcatgcggtcgagcagctgcagcttggtgccgatctcgaacgtatcggccgtctccgcctcgtagatatcctccacgccgacaatgccgttgtcgaaggccaccgcgccaacgccggtctggttgaagccgcccgagcggaagccgcgcgagtagccgccatagagcgtcacattgctggtgggcgtgaaggtcagcgtgaccttgggctgccagtcgtcgaagctgatctcccgaacttcacccgtcgcgccttgcgggaagccggggatgttgggaagaaatgcggtcggcgtcagcgtggtctgttcgcgcttgtcatgatcgtaacgcagcgaagcatccacgcggaaagcgtcggagaactggtatcccacattgccgaacagcgcccaggcgaaattgtcctgcgaatccgccaggaacgtgctctgcggattgagcggattggtgctcggttcgcggtagacggggaacacgccctcgcccagatcgaccatattaccggtggagatgtagcggtccgtcgcgatcaaatagccgccgaacatccagaacaggtcttgatcggccgggctttcgaaacgcacttcctggctgaaggcctcgacgtccagatactggctctggttgaggtcgatcccgaggcccaggccgaagccgaagggcgaatccggcgggcgaaagaagaagctttcctcgatcggcaggaagtcgaaagcatcgccggtgaggatctcctccagcgtgtcatagctggtgaccgaggtgacggtgaaagcgtcggtttcgacagtcagcttggccgagacattatagatgtcgcgatcgttctgaccggcattgttcacccgcaccggcaagctggtatcgttcacatcctcgacgatgttgaaatagagcgcctgcgtgcgcagctggtccatcgatgcgcgcaggtccagctcgacattgtcggcaaggtcgaacagcagacgtccgcgcagcgagaggttctcgaccgggtcggcctcctcgccgaggaattcgttgtcgatatagccatcagtatcctgccacgatcccgacaggcggaaggcggcattgtcgctgagcgggccggagacgccgccgcgcatgtaatagccgaagccattgtcgatcccagcggtcacgctgccttccagctggtcggacggctcgcgcgtggtgacgatgatcgcgccgccaatggcgttacggccatagagcgcgccctgcgggcccttcatcacctcgatctgctcgatatcgaacagctgctggttgaactgcgccgggttcacctgcagcacgccgtccaccacgacggcgacggacggttcggaattgcgcgcctgggtgatgccgcgaatgatgacgaaggcattgcccgcgttctgcgtctcgaccaggttcacgttcggcgtgaggttgacgaaatcggccgggcggatgatccgcgcatgctcgatcgcctgcgcaccgaatgcggtgatggcgacgggcgtgtcctgcaattcgttggcgcggcgcaggccggtgacgacgatggtgttgccgttcgtttcttcttcagagttgtcggtgccagcctcgtcctgtgcgagtgccggggccgccattgccagcgatgtcgccagcgccaatgcggatacgaccgggcgcgagaccctcctcaaagtgctcatcagttcctccccaattttttatgttctgggaggcacataatgcctgaaaacgggcagaagcgccatgcggcttttggtcaccccttcccatctgcgccgggcgcgttatatgggcgcctctcccgcgcaagcgccgggtgatgctggggcgtcgccaagtggtaaggcagcggcttttggtgccgccattcgcaggttcgaatcctgccgccccagccaacatctcccgaccacttaactaattgaaaataaatcaaaatccctgcgattcaaaatcagtggctatctgtgctggtattagctcttggcccctgagctgcatagagatgcagctgatctgagacgttcgcaatacgataggattgggcgatccacagtctaaacgtagcagcaagtagacttgggagagtacgacggtagtcctcagcgacctatgcctgcggcaatggcagcaacgcgccctaatttcggtcattcacgccgtgcgagcggaatcccaaaaccggacgtcgcccaggcgaactgattcccaacccaaaacaggaagcgggggccgcagcccccgccttatttggtgcagtcaagctgcttgttcacaaccggacctgcgatttctgaaggcataagagtagacgcaaaagtgaggaggtgcaattgtctttccccgcgatcaggtttggaggggggagttggatgaggacacgcctgggtctcgacatcggcaccaactcgatcgggtggtgcctgtacgatggcgacactattcgaaacataggtgtgcgtattttccccgatggtcgcgatcccaagtccggggccagtctggcggtcgacaggcgcgatgcgcgggcgatgcggcggcggcgagatcgctatctcgggcggcgttcagcgctggtcgaggtgctggtagaacacggcctgctgccccaagacaagcaggaggcacaggctctccatggcgaagatccctatgcgttgcgcgcgcgtgcgctcgacgaaaagctcactccccaacagatcggacgtgcgctgttccacctcaaccagcggcgcggcttcaagtccaaccgcaaggccgatcgtgtcgcgaaagtcaatgacgatggcaagatcgccagcgggacaaaggcgctcgatcaggcgatggcggatgccggtgcccgcacattgggcgagtttctgcttttgcgcgacccggacaagggcgaggccaaacgcgtgcggatgcggcccgatgccaatggctatgatttctaccccgaccgccgacattatgagaacgaattcgaggcgatctgggccaagcaggcggagtatcaccctgatttcctgacaattgaagccaaggccgcgatccaccgcgtgatcttctttcaacgtccgttgaaggcgcaagttgttggcaaatgcagcttcgccggatggtatggcattcccggtgatgaaaagcgtctgccaaaggcgcatccacttttccagcagcgccgcctctttgaagaagtgaaccagcttgaggtcgtctccgcgggggcgccagcgcgcaagctgaccctggatgaacgccacaaactgatcctgaaactgcaggacaagaagaaggttacattcaagacgctgggtcgcctgatcaagctgaaggaaggcgaacgcttcaacaaggagagcgaaaaccgcaaggacctgatcggtgacgaagtgcgcgccgagatgatgcacgcggaccgtttcggcccggactggacgacgttctccactgggaagcagtgggcgatcatcgagcggctgctggaggaggaagataccgagaagctgctcgcttggctgcaatcggagcatgggctgtaccgcgaaacggcagaagctatcgccaatgcccatctgcctgacgggcatggccgctttggcctgactgccaccacggctttgctcgaacaactcaaggcccatgtcgttacctatgctcaagcggcggagcgcgcgggctatcaccacagtgaccatcgcaccggagaatgccacgcagcgctgccctattatggcgagattctcgcccgcgagatcgctccgggcaaggacgactattccgacgagctcgaacgccagtggggcaagatcacaaatcccaccgtccatatcggcctcaaccaactgcgcaggctggtgaatgcaatcctccgccaatacgggcggccggattatatttatgttgaactggcgcgtgagctgaagctcaacgaaaagcagaaagccgagcataaccggcgtatcaggcagaccaccgatgaggcagcggcccgcagcaagaagcttgcggaaatcggcgagcgcgattcaggcggcaaccgcatgctgctgcgcatctgggagcagctcaatcccgccaatccgctcgaccgccgctgcccttattgcggcgagatgatttccatcgagatgcttatgaacggatcggccgatatcgatcatatcatcccctattcgcgctgccttgatgacagcgtgggcaacaaggtcgtcagccacacccattgcaaccgacagaagggtaacaagactccgtgggaacgatggggtgaaaccgaccgctggcccgttatccaggatcaggttgcacggctgcacaagtccaagcagtggcgtttcggccccgatgcgatggagcgggttgagcgcggtgggggcttcgtcgcccggcagctgaccgacacgcaatatctgtcgcgcatcgcaggcaaatatctctccagcctctacacgccggacgagggacgccgggtctatgccgtgaccgggcggatgaccgccatgctccgccgcctgtgggggctgaacgatatcctgctcgatcacaactgggtggagaacgagcattccaacgcgcccaagaaccgtctcgatcatcgccatcatgcgatcgacgcggcggttgtaggggcgaccgatgccgcgatgatccagaagatcgctactgccgcggggcgtgccgaagaccaggatctggatcgtcagttcctcgacttgccacacccgtgggagggctttcgcgaggacctacgtgacaagctctatactaccaccgtcagtttcaagcctgatcacggccgcaagggcaggccaaagaaggaccgcgatatcacctcgggccgcttgcacaacgataccgcctatggcctgaccggacggaccaatgccaaaggcgtgccgatcgtcgtcacccgcaagccactgctgagcctgaagcccggtgatctgaccgatccggacaggatgcccgatcgcgatctacaggaggcgctgtataccgcaacacgcggaacaagcggcaaggagttcgagaagtcgttgcgcgactttgccacccgcgacggaccttacaacggcatccgccgcgttcgtctgaccgaaccactcaacgtcatcctgatccgtgacaaagaaggccgcgcctacaaggcggtgaagggcgatgccaatgcccggttcgacgtttggcgcctgcccgatggcaagtgggtgaccaagtggaaggatctcgagggccaggaacattccagcatcatctcgatgtttgacgcccaccagtgtgatttcgttgaagcccggccgcatccggcggcgaaaaaggtgctcagcctgcggcagaatgatttgattgcggtggagcacgatggcggggagcgggagatcatgcgggtggtgaagtttgccgccagaggtgaaattacatttgcgaagcacaatgaaacgggagctttgaagtcacgtcatgaagcaggcgatgatccatttcgttacttcacctcgtctccctctggtttgaaagcatcgaaggcccggcaagtgcggatagacgagcttggccgtattcacgatcccggcccgcgtgactgacagacatcccggttaacggcctggccaaggcccgccttacctcattgctttccgccgacctggatctgcaaggctcaacgacaccgaccagcactgccatccagcgcttggcccagtcgctggcgaccagtttcgaacaggggcgtgtcgagctggccctgttccagcctccagatccgctcgcttggaatgccattgcccagcacatccccgctgccgaaatgcagtgaagctccgtggcgacgctcatcttagcgggtatcggctgatgtggattctggtgatgttcgacttacctgtcgggacgaaggaggaatgccgggctgcgacaaagtttcgcgagtatcttctcggcgaaggcttcgaaatgagccagttttcgatctatgcccggttctgttccggcaaggaacaatacgaagcttatgtgaggcggatcgaacgcaacctgccagacaagggcgacgtccacattctgggtttcacggatcggcaatatgaaaacatcatacgattcaacggccagtcacgccgccgtcagcgcaaaaatcccggtcagcttgccttgttctgaaggtttcggaaacccgttttactgtcctcgatgcctcacaaatacattcgtattcaatgccttgagagaacatcgaggatagcaggtcagaaatcgcggtccagctgcaacttccgcacataatacagaacaccgtccgcaaggatagcagttcagaaatcgcggtccagctgcaacgcgatcaggaaggacaccagcatgtcgcgcaggatagcagttcagaaatcgcggtccagctgcaactcaaggcatccattcaagaggaggaataagaggatagcacttcagaaatcgcggtccagctgcaactgtcagatggagatagaagaatgagccttgaggatagcagttcagaaatcgcggtccggctgcaactacaccgtcatctgacacttaacagaaaaaggatagcagttcagaaatcgcggtccagctgcaaccatccacaggtgcaggtgatgcggtaagggaggatagcagttcagaaatcgcggtccagctgcaactacagcagacaatgatctagtggaggcgcgaggatagcagttcagaaatcgcggtccagctgcaacttgccaacacaaggtcaggatcaacatcatcaggatagcagttcagaaatcgcggtccagctgcaacccaatgaactagaggaagtaagaggggcgcaggatagcagttcagaaatcgcggtccagtttcggaatgtccgatgtgtactgtcggctcaagcaaagctgcctttctccttccggcccacgagctgtccgactaattgggcatgagcgccagtcagcaatgtgccttctcaatttccactggtcacctgattcgccgacggacccaaaagctgccatttgcttatccaggaatgctaaaaccatacagcctggccaaatcgagaaggtgaagacctgactatgagcgttcgcgcccttcacgcgcttcctaagctaacgccgagctgccgatgaccgatctatcgcgcatcggtgccgtgctgattcacccgcgcggcgaccatatgggtaacttgctctggccgggggtactccctgctgatcaagcggcagcgttggcggcgtcaatcgctgcggtaagggcgcaaggctattgggccagcccctttcctgaaggtgatggcgtcaccttcaagcgatatggcgagagcagccatgatgctgcggcttgcctcgccgacttcgaggcggctttcgcttttttggagattgaggaactcgatgcggccgaaggcagagccagcgctctcgctcgcctcgctgcggggcgcacgatcatgtgtacctacctcgtgccggtcgaggcgctgcggctcgagcgcccgttcttgctcggcgatacacgcttccacgcgcccgtcgacggggaggaagttcggctcgccaatcatgcctggcagtcgctgtgcgacgtgccgggcgccgacgtggacccaagctgggtaccgagcgcacgggcgtcagggacgaccgagttgctcggctatccgctaatcgagcgcagcgtcgaagtgccgctatcggtgttctacgaagcccaggcgtcgttcgaccgccaatccccgctgttgcggttggtgatggaggacgccgatcatgcgctcgatccgatccgctacgatctttgtcactatcggcggctcgaatatcttccggcgaagcccggctggatcggtgagacggcgattgcctatgtcatgcccgagggtcgcgtggtgaagccccggctgctgcagggtaaaccttatgtgctgcgtgtttcgaacaattggctgggactggaagtggacccgagcggcttttcctgggccgagccactcgccagcatggtcgtcgacgacaagagcggcgacgaagttgcgttggcgctcaaggcggcgcttcgcgcgttcaaccgggccttctatctggtcgagctggaggcatcgtttctgcatctggtttatgcgatcgacgccttgtgcgagccggacaagctacgcggcgatcgacaccgattgtggatcagcgcgttcggagccagcggcgatcccggccgctttgcgacgctgctgggagatttcgaccggcgctatggcgtgcgcaatcgcatcgtccatgagggcgcgaccttcgcggggctagggctcaagggcgaagaacagtgccagttcatgctggggctgcttggtgcctgcatccagattttcgtgcgcgaaggtttcacaacccggcgcgaggcggcggactatgccttcgatttcctgacgtcgtcgcccgtcacgacgcatgtgacggcgatggcgtcggagcatttcaagctgcccctcgcgaccgacaagggttttcgggagcatatgcagccgtaaggaggatcgcagagcctgcgactatttggtccaggcgcggcccatgttagctcgacgcatggctgggagaatcacatcgagcgatactgtcagtgcgctgggtcggtttaccggaccgaacctgaccgccacgctttcgcgtctcgaggcggcggtgcaaggcgtgacggcgaccgactgccagatgttccttgatggggcgcaggccggtcgggaggctttgagcgctgccggcgaactgaaacgacaggccgcccagatcaatgtgacgatccatgcgctcggcatcctgtggtgccttccgcatctactcgagcctggcgagcgcgtcgaatatgtgtcgctgggcgccggcaacaccggccgcgctttcgatctcgaggccaatctgcgcgtcgccgagttcaagttcatcaattggcgcgggggctcggaggcgatccggcagaatggcgtattcaaggattatctgctgctggcgctgagcccgcccataaagcgcaaatatctctatctgctcggtacggatcacgcggttaaattcctgcagggcggccgcgtgctcagcagcatactcagccacaacgacaagctgcagcgcaccttcacggagcgatttggcgacagctatcgcacggtcgatgctcattatgcagaccatgccgacgcggttcggatcgaggacgtgtcgtcttggctgtcggatctcgccgagcatcttatccctggtacagggccatgagcatggggatccttcgatgcaatatgcgctagtcgacggcctgcgctgtgaggccgttccaggcgatcgcggactttgcccgacgtgtggcgcagcgatgatcgccaaatgcggtccgcggcgccttcaccattgggcgcatgccggacggcgcaattgcgacccatggtgggagaatgagaccgagtggcatcgggggtggaagaacctcttcccagccgagtgtcgggagatttcgcatttggccgccgacggtgagatccaccgagccgatatcaagacaccgaccggcatcgtcatcgaagtccagcattccgcgatgaccgacgccgaacggcaggcccgcgaagccttttacggcaatctcgtttgggtgatcgacgggcgcggctttcgggacaatttcgacatctatcatctgcttccagacccgcaggcagacgttgcgcaagacttggtgtgggtaaaagcaagccggccgatgcaaggcacagcgcgcggaatctttttccggctctcggagtgccgagcggaatttcctgaggaggtcgttaccaaggcgacgctacgcggcggcttctatcatttcatccatgagatcgaggccgaggtccgtcaatcctaccgaggtcatcatcaatatgactgggtgcggcctcggcgaacctggctggacgcagcctgcccagtctatatcgatttcggcgacgatcgcttggtgcggctcgacacatacgatgagtccggcctgcgctgcattcggctggtcgccaagcgcaaatttgtgcacgacgtgatggttgagaccgatgcgcgcgcgatcgccacgcgcttctacccaattggcggagataccgaggcgtttcgatgagctcgtacaaggatcagctaccccgcgtcttccaggcgaacctggcgcgcctgtacgaccgggtgatcctcccggtcatggatagcatgccgtaccatggtgacttggagaccggcgaggctgcgagcctcgaccagtttctcgaccgcgcgaaagcccaggtcgacaactataccggcaatgaggtagccaaggcgttcgtgctgacgctggcgggcgtgttcgagcgccagctgagcatctgggcgcggtccatccaggacgcgggcatggcccacatgactaagctccggggatatgagccgttgctcggcagctgcgcgaaggttgccggtatcgacctcgcctgcgatggtctcggagacgagctgacacaaatgtttgtcgtcgccaatgtcgtgcggcacggcgaggggcaatcgtgcgaccgacttcgagcgttggcgccccaactctgggacgatgcctcgacgaattattttgacctcctgccgggcacgcccgttgctagtgagcatctgcgtattcgaaagagagacgtcatccgctacatcagagctacgacccgtttctggggcctcgccgaccctcttcccatggcggtaaccgatccgccatattggaatgaatgatcgcgtcagcgggcagccggttcgtgattgtgaaagtgaagtcgcgggggaaacaaaagatggccgagcggacgctgccgaagcgcctctacaaatatcgaagtttcagcaatctgacgcttgggatgctcgtcgaggacaccgtctattttgccgatccgtcgacgttcaatgatccgctcgacaccaagccagcgctggataccgacatcagtgccgaagcgctcgaagcgatcctttcgcagatgatcgaggcacgaacccaggcagagatgtccgctgcggcgaagacgatccgttatcgaggccccaagacgctcgatcacatcgcccgtcagagccgcagggcagcagagcgccttctggcggacattcgctacaacgcgaccaatcccgattacaagatggacgatcctgagcgcttcctcttcgggcagtatgtccaggaggaactgcttcggcggtacgacaagggcgtgttttccttggcggagcgcgccaactgcccattgatgtggagccattatggcgaccaacatcgtgggctgtgcctaggctattccgttcccgatgcggcgaccggcgatattcagaaaattcgatatggcggcggccggctcgtccaggccagtgacgtagcggctatgctgacaggcgatgtggaggcccggcaccgtgtcgatgaggcggttctgcttaagaaggccaaaccctgggcgtatgagcgggaatggcgcctgatcggtccgcgcggcgagcagaattcgcccctcgaactcgaggaggtggtgtttggcatgcgttgcccgtcggccgtcatctatggggtggtccaggcgttggccaagcgcgatctaccggtccgtttcttcgagatccgcgagcagtggggtcgtttcctgctggtcaagcgtaccgtcgatacagatgagctgcacgcaagtctgccccgtcgcaatcgatcgtttgaccatatgttcgacgatctgaccgatattaagccgcctagtgcacaagcgggagatcgtgcagcgcattgagcttcgaggcgtcgccattcttgcgccaccacaagagccacggcacagttcgttatgcccaagactgacgagagactccagccgaccccgtctatcgcggaggctggccttggatgaacgcctgccctgctttgagccgcgtttgcgcttgcccttagtgcatgagtttggtcattgaaacctgcggtcgacaagtggcgtgggggagtggacaatgccaaccgccaacgtctgcttccctgcttggtggcactgcaagccgccagaccggtcacggcccagcttcttcctatgctcaaggaccaaaattgggggtggaagcagacattggctattcagcgagtggatcgcggtttgatgcccaggccgtccagaatgcgccgccaaaagatggtaatgccgcttgcacctctctcgcgagtagtagcatctacacaggctagatcgctctcagctggggcgctatcgtcacctgtactgcgtggaaatctattggagtcacattcttggaatgcataacgcgggtgttgaagctctgggcggtccttcagtgtaccgctgatcccgtctggaaatagacgagagaacacgaacctgcgcatgtttggatttgcaaagaacggaaagcctgcgcctccattagcacgcccaaattcgcggcgggatgcatcgtctggcacggcctgcccatttgagcgagcgtaaggcagtccaaagcgctgccactgatggttgccgtcgattgaccggagcatgtccgataagatcgtatatctttcctgtgtttcgctgggcaactccaactcattcggattggcaccgagccgccaagccaaacggcgcaactccgaaggggatagaagtgccaacgcacttaacgtcctgccatgccgaattgcggggaagcgggagggatcaagcacaccagcttctacaaatgcgtctgcctgcacattcgcagccatgtcggaaaaggtaagaaggtctttcccacctgagtcaccaacttctgcaaaaattcgattcagagttgatcggtctacgttctgttcaacgaaaagaagttcaaggaagtcttccgtcgttccatcaggtgaacccaacttgattagttcaaccgttgcatcatcgacgactgattccagttcctcgcgaataaggattcgaagtccgagatactcgtcgtaaatcgaacgaaacggctcaggaagtgcgtcaattacgatctgatcgatctctgaccgaacttcgttgtagaaagtttcagcttcgcagattttggccgacacctgtaagggctgcggcgtgtaagcgctgccgtggcacttcagccaatcacgatatcgaccaagagtgcccccttcgccactgacaatcccaatgctggattgtagcgcaacttcaatgtaggcgtcgccggaatcttcgagcgtgttccgccaattgttggcaaaaccggaaatgatattcgagccatcgaccagctcttggatcttttcccttaggcggtctttatcaagaaaatcctctcgaaggctggctagctccgtttggatgttctcgacaagctctcgcgcatcttcggttagcgcgagctccgcctcatatcttaaacgaacgggttcaaatgccagctgggcagcgcttcgcgttgcagacagaccagcagcctgtgcttcacccagaattttcccttccaaagcattggctcgttttgcttgttcagccgcaatgtttgtagtctcggtttgaattctccgtttgaggttcgtcaggctgttctccactcgcgagatctcattgtttaatcgacgccaagcaccattaacgccttcgcatccgcggtagcagctgttcctacacctccgacgttctcgactaaatggaatgccgttgcagctcaggcgacatgcaccgtgacagatttcgttggttactcgcctgggaacatcccgaatacgccgtttcaggtcattcaatcgagactcaaggtttgcctgctcccgtgtgaagctgttcaaggcgctctgcgctgcgtcaatggcacgatcggcggcctcaattcttgcgttactagtaacaacaagaaggtcgttctcttcgactgcgtcaattgcatcgtcgagagcctttttcgcggaatcataggcttgcttttcgactcttaggcgcgcctctcgaatatccaatgcagcctcggcagcactcaaagaggtctcaccagttgcaatctttgcctggacgtcgataagctcaacggcgagatcagcgatgcctcttgcagctaagccttcaactttctcaagttggcgttcaagttcgaccactccaaaccaaacttccgacattgcagaaatgtgcaaagcgatgcccgatcggcgggcttcacgcccggcatctctcgaatgcaccaatttatcgcgcaagaacgaggtcggaacggtcatgagctctgggtctggaactccgctcggaaggatggaatcaatgtatttttcaagagcgaagtggcgtctttcgaccgcgcgctcatctgctagctcaaaggtgtcgcccgcatacgcattcacgtaagtatgggcaaacgcatcgctggctgcgtgcatcaaatacccagctgcaaacgctaactcttcctcagagttcgcgttcgcgagcagatactgcaaccaatcgtgagtctgccagccgccttcgatccccggatgggtggtaacttggccagttatgaggtcagggtaggcgtcggggcctaagttgcccgcgagaaacgcccccggattgttcttgattgcgttgcaaagcggctcatcaatccttgtatcaactcctgccaatctcacttcacagtcgtcgctaatgtccacaaggagagactggccgatccagagatgggtcttcaagccaaatgccgatgcaggcacggccatcaagcaacagacggcgacacaaatggatacgactactgattgcctcattaccctgtcccccaacagtgtaaagtacgaccgcccggaagactgagatcttcttggcaagttcaagttattgtacggggtcatttatattcgtcaatgcgactctaatagaaagtgacaaattctgggtcgggagcagaacgtcggctttcgattgtctgccgtcgagaaccagacagtccgtaaacggcccaagagtagccgatttgtcgttggttgactgccaactgtgcacggcgtattttcccggcgaaaatcatcatggctcagataaactactacgacccggccttgcgccgagctgagaaggagcgtcagcgcgagtctgatgaggagggcctgcgttcgggaagggtctcgccggaagagctgaacaggcgcaatggttttttcgcgtccttagagatcattgagtcgcaggtcatttgccaagaagaattcttctgaacgaatgactgattgccgtgatgatcgggtttcacggttcagttaggctcacctgctaacatccgggcgatgggagttccgccatggtgttacgctgcattctcactttgctatgcttctggctcgcttcgccagccgccgcgaacgagcagatcctgcgaggccctgccacagccattgacggcgacacgcttgccatgggtgatctccgggttcgcctggccgacattgacgctcctgagaccgctcaaacctgtaaccgcgacggcgaggattgggcatgcggtgcagaggccggcgaagtgcttgctgagctcgtcgccgacagaacggtgatatgccggacgc

SEQ ID NO: 3489 - DNA, 23195 bp, synthetic construct
  source 1..23195: mol_type = other DNA
  misc_feature 1..23195: note = Synthetic
ggttttgagggtgagagacagatcatcgagatttaccccaagatcggatgcacggcggcggtcaattttcaccgaaagctggggttggttgggttggtaggagatgtcgggattggaaaggatatcggaatcccggtcaattgcctcggccaaagcctgcgctgaaacatagatatgctgatattgcgcaccggccagcgccacctcaataccagcgtcaccgccgccaaagctcagtgtccctcggcctctggcattgatgcgtgatcctggaatttccttcagtggcttgcccatagcctcgacgatttcagtctggctgcggttgcgttgcccccaatcggacagttcggtcctcacctgcacgcggttggggtcatagcgcccaacgatagagaaaaccgactttacctcgccactgctgacaaagggagcaagcacgtcttcaatttcatgcaattccttgtccatgaaatcgatgccaacaccgtccgggccgctggccatgatgacgatggagccacggtcttcatcgggcaccagttcattatcgagcagcccgtagagaagtgccgccaggcaggctgcgacaagtgaaatgccgatggttattcggggatgatcaaggcagcgcttaaggcctctttcatatgatttgccgatttttccgccccattgggtgaggcggctattctcattatcatcggtccgcagattgagccgcgcggcgagcgctgggacaagcgacagggctacgaaggaagagaggatcaccgccacggccagcacaaagccaaattcgcggaaaaggcgtccggcctccgaagggaggaaagatatgggcacgaagaccgaggccagaactgccgttgttgcgatcacagcaaagaacacttgccttgtgccgatcaccgctgccgcccttcggccaaggcccatattttgcaacctctgagcattttcgagaacaacgatggcatcgtccacgatcaggcccgttgccagaacaagcgccagaagcgtcagcaaattgatcgaaaaacccatcagccagatcgctgcaatcaccccgatcaaagcgaccggaatagtcgtgctgggaataatcgtgggcggtactgcacggaaaaacagcaacatggttgcgatcaccacaccgatcgtgaaggccagtgtgaccagaacttccttcacggaaactttgatgaaatccgcatcatcggagacgacattgatctctatgtcatcgaagcgggcgttgacccggtcaaccgctgcatgaatggcgtcagaaatctcgatcgtattggaactggcctgacgaaccacacccatgccgattacggtttccccatccacgcggacgaaattggtggcatctgctggggcaaaattggcatccgccacatcaccaatccgggtcgtgccagaaatgatgatgtttttaatgaggtctggtgtggtggcactggcttctgcccgcactaccaattcctgcgcgtcagagcggaagctgccaatgggaacatcataaggggcggtgtccagcgcagtcgcaacgtcagaaatcgtgaggccaaagcggttcaatcgcgccggatcgaccgtgatacgcatctgccgtgggcgcgagccgaattgcacaatgctggccacgccgtctgcggtcagtaattcgggaataatatcattttcgacaatgttggaaagcgcagcctgatcgtagcggttgctggagaccgccagtgtcatgatggggctggcatcttcatccgccttgaccacggttacctgttcaaccctctcaggcaggcggcgcgtgacccggctcactgcctctcgcacatcggacgcggctgtatcgagatcagtgcccggggaaaattccacgcgaatgcgagtgttgttttcttcgctggatgaattgatctgacgaatgccggagacccgtgccacggcatcctcaagaatgctggtgacttccgtatccattgtttctggtgcagcgccggggaaagtggcggtgaccgacacgatcggccggtccacatccggcagttcgcgcacttcgataccaatcagtgcggcgatacccgcaatcacgatcagcaggttgagaacccatatcagcagcggccgcttaaccgccagcatcggaaggtcagaacgctcagccgtcattattgcctaccgcatcgcccttcttctggcgcgtcagagtggcgtcgcgggcaggtggtgggctgggcttcaggatgcgaacatcctgcccttcgcgcatcttctgcactccttcgatcacaatcatttctgtggaggataatttggcatcgacaaaagccataccatcgcggcgtgatgtgatggtcaccggaacacgatgggctttcccatcgcggactgtccagatgtaagagccttcaccgccccagacaatagcttgttctggaacggctgggcgagggttgccttgtgtcgaaaaggtgacgcggaagctcatacccggccgcaggctgtcgtctgcattattgatccgcgtgcggacaataaagctacgctggtctgccgatacagaggaatctgtggcaatgaccttggcatctattgtccggcctgtatctgtgaatggcgttactgttacgctctgaccgggccgcaattgggcgaaaattccttcaggagcggaaaagtctacataaagcgcgctgcgttgatccaattgagcaatcgcagtcgtgctcgttacccggtctcccgtgtcgacatcggtgatgccgatatggccggaaaagggggcgcgcacggtgcggtcagcgagatttgtctgggcctgctgcaattccaccttggctgaggcgagggcagtctcgcctgcttcaatctgactggcagacaacgcaccagtatcttcaatccggcgataacgggtgagcaactggctggcttcctgcacccgaaccttagcaaggtcgactgcaagcttttcccggcgggaatccacttcgaccagccgctgtcctttgcgaacataatctccggcagagaagagaacccgccgaacttgtccggcagtttcagggaagatttgtgccgaggtcatcgcacgagccgtgccgacggcttccacctcgttcttttccggcagaaagctaattgtctgcgcgacgataggcactgcctcatcgcccttcttgtcgtcattatctgcgcaagaggtgatgaacaggagaataggcatgaggaaggcacgaggtgtcaaagccataaattgtagctactacctctcataatccggtcccttccgtcgcaaaattgtgtccatgcgcgtccaattccggggcaaaatatgctccggtcagtgaatcggtaaatttttaagtgcctacagtcctttgatatgacggaggatataccaaaagcctcacctgccaatggtaatcaggagagaatttttaagttctcccgattttacatagaaaaaaggcctgcactcgcttgaagtgcaggcctccgttaaaatgataggtatacttttttctatactgatgtggctgcgaagtcggaagctgccatcgcttggaagatgcaggcgtcacattttaagcttcatgcttgaccacgtccgtaggccgtggctggagaagagcattctcgcgcttttccgggcggatatagatggatgtgagttgcggtacgcgtttcttcatttcggtttcgaaattctcgatcaatgtttcaccttcgcccatcggcacatcatcggcaaagtcagcgctgatcgcgacgaacacttcatcaggagatgtatggatcgttcgtatatggttgaccgaggtgatttgcggcgcgctgtccagcaagctccacacggcttcaacgatctcaggatcggcactttctccgatcagcagccctttcgcttcacgcgacagaagaatggccacgcaagccaacacgatgccaatgataaccgacgccacgccgtccaattgtggattgttgaaatagtgactggcccagacgccggcgcctgcaaccatcagaccgacaagtgcggcgctgtcttcaaacaaaacgatgaaattggctgggtccttcgaacggcgaactgatctccaccaatgttcttttccgcgagtggaattgaattcgcggaccgccagaacccatgatgtaccctccagcagaatagcgatgcccagcacgatatagttgatcgtcggatcgtgtagtggctcgggtgtgacgatatggagcacgccttcatagatcgacacaccagcacccagcgcaaagatcaaaatcgcaaccacaaaagcccagaaatacaattcccggccatatccaaaggggtgcatggcatcggcagggcgcttggctttggcctgtccatacagcagcagcacttgattaccgctatcgacgagcgagtgcacgccttctgtcagcatggcagaggaaccggtgatcgccgaagcgacaaatttggcaatggcaatgcccaaattggccagaagcgcgccatagaggacaatattctttcggaaatggctggctgtgtctgaaggggtcacgaaaggctgctcgctgtttgagaaagtaaaattatgcgtgctccagtgagaatcgcaaattattatctgtcaggagtgttttatgaagcgaagacactgagcagcaaaaagccccgggaagcaatgctttccgaggcttttgaatgctggagctatataatggctccccgagttggggcaacagaccggctcaactctggtttttccggtgtctaactgagcttcagcgttaaccaaaacctgccgtgccctacgcggcgtggacaaatttgagccagtatctggcgatggcgagatggaccattccgaggaagctgttggccagttggtcatatcgggtggcgatggcgcggttgatcttgagctgctcgaacatgcgcttgatgcggttgcgctgcttgtagagcgcccggttatgctcgatcttcacgcggcggcttgatcgaccgggaatgacagcctcgatctttcgttcgccgaggtcggcgcggatagcgtcggcatcatagcctttgtcggcgagcaaagcgtccggcgtgcgctcgggtaaatcgatcagggcgtcatatgctttacaatctgccgcttctccaccagtcagaatgaaggcaagcggtcgtccgagggcatcagccaggcagtgaagcttactggtgaacccgccccgcgagcggccaagagcgcgtcgatgagtcccccttttccgcccgctgccgaaacgtgggcgcggactgtggtgctgtcgatgctgtagtggccgctgtccgccatgatcttggctagcgtcacggcaacggtctcccagaccccgacctcgctccagcgtcggaaccgccgatagatggtgttccaactgccatatttgggcgggacatcgcgccatggcgctccgcaccggagccgccagagaatgccgttgatgatcgagcggttctgttcgggtggcctgcctcgaccacggttcccaggttcgatgggcagcaagcctttcaaaatgcgccattctgcttcggtcagatcgccccggctcaagcctacctccaaaaagcaggcttgaatcaaccatctgcctcgacgtcaatcaaatctcgatgcagcgaatagcatgttgcggccgtgcgcgaggcgactattcttcatgtatggagcattcttcccttatcgcatttttgaatggagatttcgcgcccgaagccttcgggcgcgaaatctcgaacgaggtcaatgcctgcgagcatggcttcaagactgagggcatgggctacatcatggtgcctgacggacctacccaagtgatcacgcacgcaggctccttgaagcgatgttttcggaccaactgacctttctcgcggcgaactacaccgccgattgcctgatgatgagcgacaattttgactttgccgatgaggctgttgccgatgcgatagcgtttgttgcggacgacagcagaccgccaacgcacgatgaaacagaaaccgcgattgcagcgctcagctaggctggaatttgtccacgacgcctagactaaacgtctaacgtgatattttgcagttttgttgggaagcgcgcgtcgaaaaaattgctctttggaaggccattgtaccattacgccaggatcttgtggttgctgaggctgaatttttaatttcgacttttcagatgtttgtttctcgatttaggaaatttgagccattttaaaatattaaccattaaaattatatggctggcacgctatacgtagcttaaggctattaaacactcgccattcaatagaattgtgagatgcttttaacttaatcagccaagagggtcgcatctctttgcgtggttaattttcatgaagaaaaaaatctgctattatctcggtcataaaatagatcgtaagcacgtgtcgcataacggcgcggattatagaactacttgcatgcgctgcaaaaagccgatgatccgagattgggatggttggcgtgaagaatacatcacactctctcagcgggaggcctgaagcgccagacggcttttcaatccgccgctgccattcattgaatgctcggcctcttcgacgatccaactgcgcgcatcgacctcagatttgaagcctgtgagcgtgatcggccgctctggaaagagatccggccgccccagaggcagatctagcgtgatacgcgctttggcccggccgatgcggctatcttcagcttgcgctgcctgccgggcatcggcctcgttcgcatataccttgcgtagacgcttcggcttgccggtttcgccaccgccgacttgaactgtcttgcgctcaccgctggccttgtcatgccagacggccgtgacaaggccatagctttcgcgctcgatgcgctggtagtctgctgaagcggttgccgcgcgctctatggtttcaatgggcaggcttttgccgccggtgctcattccgctgccgaccggcccgaagataagccggccagccttgaccgtggcgacggcatcgaagcgtttgcccagtgccagaaggagtgcggcatcgctctttgcacccggcccgagggcgggaatgacccggctgcccagattagcatcaagtgttagtgcaagcccattgtcaccagcgatcgcacccagaatttcactcagcgctttgccgacaaaggatcggtcccggcgcaccctgaaggcatcggtaaagtcagcgctgcgggcgcggattgttatgtgatcgggtgggccttgccattgagcctcatcgactttgaagctgcccttggcgactagccccttgggcagaccagagcctttttcccagcccatgctgactgtcaggcgcgcgccggaaggaggaagttccatcaagccatcgctatcgtgcatgacgatatcgagctggtcgacctcttcggctcgcttttcacggatgctggcagagatcaggcgcggattaattttggcggtcagatcctcaccatcaagctcgacgcgccagctggcaacgggaaggctgaaagcgtcagccatcggcacgctcaagcgaaagagtaaagtcactggcacgcggcgcgccatcgacaaagaacagcgattgcgtaacttcaaggctacgaatgaagaaggtgcccaggatctcgccatagcctgatgtgagtgtgtaagcttcgcccttatcagccatcgtcctgattgtttcggtcgaggaataggatccgatattctcgcccgggtaaagcttgccggttacctccaccgtttccgtgctcggtcccagaaactggctggctgggcgcacaccatagcgttcgccttcaccatagcgccattccgagcggcggcgcagttcctgatagggcagggtgcccgtttcaaaaacgaacatgtcgagtgtcatcagcatgaggttttatccatcgtcatcatcggcaaaggtggagcggttttgcgcggctcagcttcagcgattatcgctcgagcgcacccggcgcttcgggttaatatctatttcagttgccttaggctgaatggtcagtcttcttcagcgacctcgatggcagctattagtagttttcttgaaaaagccgacatcccggacacgacctcgttgcggacgtgacccaaacggctataaatgcttcgaaacaaaggaatggtgagcttggggcgcatcgtaacatttcggaacttcgctgttgttgtcgggctctgcttgaccgcatccgcgtgtatggcgctggctcctctcgtcaatccgcatgtggcactcttcccattcatcgcagtcaattgggtgctttggattctcgtagcgggtgtctttcgccgctctaaggcagaatgggtctcacatgtagaaagcgtttggtgggatagacttacgtcactcgcgttagtctcgttcacactggcaggtttcttcgcaatttatcacggggacactctcattcacgctggagaccttgcgcagtcgcaatgaggtaaatcagttcgagcagcgcaatggcggctttccacgacctttctgccgttaacccgatcggcccgtaaatttgaaagcagactaaccgaaaacactacgcgcttctctcgcttagcgcatggacaaacaccgattgaagttttgctgcctttccactatgtaagttcgagatttatgcagtcagcaacgtgctctggcatgtgaggagttggttatggtcgcgctgaaaaaagaacaggaaccggcgaagccaactttccctgcgcaccctgctgtgaaagatgtttgcgcagaagatctgttccgccgcacgatggatcgcttccccaaaacgatggcccgccttggtgaatgagcctcgctggttaagcgttgatgacctgatcacattcaaccggctcgccgtccaacagactggcgagccgttttcgatacgtgaccagaagttgcttgaaagcgcttgggcgaaaccacaaaaccacaaaaccacaaaaccacaaaaccactggcactatggcgagcaggacattgtgctgctggctgttcaactgcttctcgacattgcccgcgatcacccttttgagcagggaaataagcgaaccgcattcgccgctgctgacgcattcctatatctgaatggctatgaaatgcatgcgccggacggcaccccgctagcagacttgatcgttcaagccatcacgggcgatgtcgacgaagccatgctcatctctgccgtcgcgtggtccactaaggcgatctgacagccaccttcgctggggcaatcctcacgctcgcagccagccttctgccatactacctccacatacttagcgtcgcgctatagcggcagcgacagtaaaccgatctccaattgcaacccccagcaaacgcaattcactccccccttgcctgcctgctttttgtgtgggttttcgtgcagtgaggaatttatcttgcggaacgggaaagctgaattctcaggttcgattgcagttttatgcgaattgcgaattcgcgcaccgaacggcagatttgctcttagaatttggctatttgataaagccataatgcatcagatgaaacgggggccgtagcccccgccttatttggtgcagttaagctgcttgttcacaaccagacctgcgatttctgaagtttcaaatctcgtcaatcgccagcttaaagtcaagagacaaataaactggcctggatgcaactacatcacctgctacaatcaaaatagattccagagatctgtttttagtcggaagcagttgtggacgctgtttcctcataatacgcattgttttcccaaactatcatcaacatattttggtagccgcgagaggtaaggcttgaaatccttacctctcgcggcgcaatcttccattgacactgcaacctaaggccgtaaaaatagaagtcaacataaaattgattgtagtcaggtgatatagggggtgaaatgaagcgtggatccattcgtctcggtcttgatattggcactaattctatagggtggtgcctatatgacggcgatacaattcgtgacatcggggtgcgaatattttctgatggacgggatcctaaatctggtgccagtctggcagttgaccggcgtgatgcgcgagcgatgcggcggcggcgtgatcgctatttagggcggcgttcggcactggttgagcaactcgtagtgaggggcttgctgccgaaagagaaagaggcggcaactgatcttcatggtgaagacccatatacccttcgtgtacgggccttagacgaaaaactcgaacctcatcagattggacgtgcgctgttccatttgaaccagcgccgtgggttcaaatccaaccggaaagcggaccgtgtttcaaacgccaatgaggatggcaagattgcgagtggcactaaagcgcttgaccaggcgatgatggatgctggcgcgcgtacattgggcgagttcttgcatggccgcgaaacaaaacgtgtgcgaatgcggcctgaggctgatggatatgacttttacccagatcgcaagcattacgaacaggagttcgaggcaatctggagtgcgcaggcaccatactatccagctctgttgagtaaggaagaaaaagctgcgatccatcgcatcatctttttccaacgacctttgaaagctcaagttgtaggaaaatgcagctttgccggatggtatggtattcctgatgatgagaggcgcttgcctaaggcgcatcctctgtttcagcagcgccgattgtatgaagaggtcaaccagctcgaagtggtgtcagctggcgctccttcgcgcaagctgacgctggacgaacgcgataagctcattctgaagttgcaggataagaaaaaggttacttttaaggcgcttggaaaactcattaagctcaaagaagcagagcgtttcaataaagaaagtgagaatcgtaaggaactgatcggagacgaaatccgcgccgaactgatggataaaaaacggttcggtccgcgctggacaaccttttcagctgatcagcagtggaaaattatcgatcggctgatgaatgaggaaagtaccgagcggctgctggcctggttgaaagaaaactatggcctggatcaggaggtggcagaatccgtggcaaatgcccatcttccagaagggtatgggcggtttggaattactgcaaccaccgcacttctagaccagcttcgggctaatgtcgtcacatattcccaagctgccgaaggcgcaggttatcaccatagtgatttccgcgatggtcaggaacaccgggaattgccttattacggtgaggtgcttgctcgtgaaatcgcaccgggtaaagaggattatacggataagcttgagcgccaatggggcaagatcaccaatccaaccgttcacattggcctcaaccaattgcgcaagctggtgaatgcgatcgtccgtaaatatggccggcccgactatatctatgtcgaactggcacgtgaactgaagctaaacgaaaaacagaaagccgagcataatcgccgcatcaagcaaaccaccgatgctgcggcagcgcggagcgagaagctgaaagaaatcggccagcgcgataatggtggcaaccgaatgttgctacgcatctgggaacagctaaaccctgctaatccgctcgatcggcgctgtccctattgcggggaaatgatctcgctggaaatgttgatgaatggatcggcggatgtcgatcatatcattccctattcccgctgccttgatgacagtgtggggaataaggttgtttcgcatacgcactgcaatcggcagaagggcaatcgtactccatgggaacaatggggccaaacggagcgctggccgattgttcaggatcaggtcgcaaggttgcacaaatccaaacaatggcgtttcggcccggatgcaatggagcgggtggaccgcgacggcgggtttattgcccgccagttgaccgacacccaatatctctcccgcttggcaggtaaatatctttcaagcctttatacgcctgacgaaggccgccgggtctacgccataaccgggcggatgaccgcgatgctgcgtcgcctgtgggggttaaacgatattctgcctgatcataattgggtagaaaatgaacatagcaatgcgccgaaaaatcgtctcgatcaccgccatcacgcgattgacgcggcagtggttgggataacagatgcggcgatgatccaaaaaattgcaacggctgcggggcgtgcagaggagcgtgatcttgatcgccagtttcttgatcttgaacgcccatgggatggttttcgggaagatctgcgcgaaaagctgtttgcaacgacggtcagcttcaagcctgaccacgggcgaaaaggtaagcccgagaaggatcatgatgttacatccggccgcctgcataacgatacagcctacggattaaccggccggacaaatgccaagggtgtgcccatcgtggtaacacgtaaacccttgctcagcctgaagccgaaagacctgatcgatcccgaacgtatgcctgacagccatttgcaggaagccttatatgaagcgacccgcggcaccagtggcaaggcgtttgaaaatgctttgcgccaatttgcaaagcaagacggccctttcaaaggcatccggcgtgtccggttaacggagccgctcaatgttattccaatccgggataaagagggccgggcctacaaggcggtcaaaggtgatgccaacgctcggtttgacgtgtggcgcctgcctgatggaaaatgggtgacaaagtggaaagatcgcgatggtcaggaacaatcaagcatcatctcgatgttcgatgcacatcagcgcaatttcaagccagccaaaccgcatccagcggcaaagaaggtactgagtttacgccagaatgatttgctggcggtggaacgcgatggcgacaaacctgagattatgagagtgataaagtttggagggaatggtcagatatttttagctgaagacaatgaggccggagcgttaaaaaatagagacgcggattcacaagatccttttaagtacacaagcgcaatggcgggatcgttgaagaaaatgaaagcccgccaaatccggattgatgaactcggccatattcatgacccggggccgcgtgattgatattagatagtttaaccgatcacttactttattctcataaagtttgcctgaaggcagtaaggcgagcggatgaaacatggatcgtatcgttgatgtcgctactgataaggttcatctgtctgcgtatcgcggattgctgattgtcacccttgatcatgaagagattggtcgcgtagcgctggatgacatcgcagccattattgtccacgctcatggtgtgacctggacaaccaatctggttgtgaaattggctgaacgtggtgcgttgatggtactttgtgcggccaatcacgcacctgttgcgatgacgatcccgatcgaagggcaccatgcccagaatgcccggtttcgagcgcagtgggaatctactctacctttccgcaaacaggcttggaaaactgtggtgcaagccaaaattcgtaatcagggtagtttgctgagtgcgctcggccgtgaagagggtgaggcattagggcatattgctgaccgggtacgttcaggagatagcgccaacgcggaagctcaagctgcacggcgatattggccggcgctgcttggccgtgatttcaggcgagatcgggatgccggcggtgccaatgcattgctcaattatggctatacagtgatgcgtgccgccgttactcgagcgattgtcgcggcaggtctgcatcccaccatcgggctgcaccatgccaatcggctcaatgcttttgcccttgcagatgatctggtggagccgttcaggccactggtggatgcggctgtccagcaaatgacaagcagcggcgatagtgagttgaacgggctggcaaaggcgcgtttggcggcgcttctttccgctgatttggacatgcagggtagtaatacgcctgtcattgtagcgatgcagcgtctggcccagtctctggcaatgagctttgagcagaagaaacaaaatctcacattatttcaaccactcactccactggcctggaatgcggttgcatctcacattcccgattcagcgatacggtgatggcctatgacgatatgcatcttagcgggtatcgactgatgtggattctggtaatgttcgacttgcctgttggcactcgggaggaatcgcgcgcagccacaaagttccgagaatatttgctcgacgaaggctttgaaatgagccagttttctatctatgttcgcttctgctcgggtaaagaacaatatgaagcttatgtcaggcgaattgagcgcaatcttcccgataagggcgacattcacattctgggttttacggaccggcaatatgaaaacatcatacgcttcaatggccaatcacgaaggcggcagcgcaagaatcccggtcagcttgcccttttttgatgattcagcgcttttttactatccccgatgtggcggaaaaagatttattttcaatcttttagtgccacatcgagcatagcagttcagaaatcgcggtccagctgcaaccacatatggcagcactgacacatccatcgtagcatagcagttcagaaatcgcggtccagctgcaacacgatcgaacgcgaggaaagcgactggatcagcatagcagttcagaaatcgcggtccagctgcaacccggcaaggtcatcacctgcaactgcggcgagcatagcagttcagaaatcgcggtccagctgcaactcaaagggagagcaaaaggatcgccttcaaagcatagcagttcagaaatcgcggtccagctgcaacagggggaccgttcctgcgccaggcgctcaagcatagcagttcagaaatcgcggtccagctgcaactttgggctatccttggccatttcctgagcaagcatagcagttcagaaatcgcggtccagctgcaactcaccagtggtgagggtaaagtccctatccagcatagcagttcagaaatcgcggtccagctgcaacatgctgggcaatgagcgagtggaacgagagagcatagcagttcagaaatcgcggtccagctgcaaccttcagccccaagggcaacgcatacaaatagcatagcagttcagaaatcgcggtccagctgcaactggagatcgagcatcgttataaaatatattagcatagcagttcagaaatcgcggtccagctgcaacttactcgatgcgaaatgcgaaaaaggatgaagcatagcagttcagaaatcgcggtccagctgcaacagctgagcagctgcgccagcgcatagatcgagcatagcagttcagaaatcgcggtccagctgcaactgagatatggctttccagcaccatcgctctagcatagcagttcagaaatcgcggtccagctgcaacgcgccgacggaacgggatcaccgcgcgtccagcatagcagttcagaaatcgcggtccagctgcaacagtaattttgtggggtggttgtgctgcacgagcatagcagttcagaaatcgcggtccagctgcaaccgccaggttctggagagatattcggcccaagcatagcagttcagaaatcgcggtccagctgcaacaaatctggcttgtttgcccaatgcgcggaaagcatagcagttcagaaatcgcggtccagctgcaaccagtaaaatgtggagaatatcatcatggacagcatagcagttcagaaatcgcggtccagctgcaacaaaggtcacagcgaggacgtgtaagcgcccagcatagcagttcagaaatcgcggtccagctgcaacttcaaaactgagcctaccgactttgtgcggagcatagcagttcagaaattgtaattcaccttgactgctgtttccatatcaagtggcgagcacgagatatgacgaactcgcgctttgccttgaacggtaagggtgctttgagaacctctgctggcgttggtatgaatgtcgctcggcctagcagtgctgtgacaccgttctgcagatcaacctttgcaacgtgcttcagcaccattttgaatatgtcgaggagggcgagagcttcttcctttgatggtcgcttgcctgatattgctagcgacagcaggctgatctgctgttcaatatctgtctcactcgccaatggcagctctggaatgttgtccaggtactcctgcagccgctgagctgtttttggacctatcacagggctttcaccgctgagcagcagatcttgcagtttgggcggcaagtgtggccaggacgaagggatcgctgggtccgtctgtgtcgttgggggctcagcatatgagccgccacaacaaagcgcacagcgccactgaacccgcttccgataccgcctgtgcaacgatctgagccgaagctgcccgttcgccgtgcgaaacccggcacgctcgatgacttggttgattattactacagccccatcacgcgccttgggccgacccagatcacgcaacagaaggtgatggcggtgatcgaagatttccgcaaagggcggggcgatcggatggtgaaggacgttcgctttcatcaccttgatgcgatcatcgctaaaaagcgtgaagagaccattggttcaaacgaaggccggaatacggccgaccggtggtgtgcacgctgcacgcaaattacgcaaagagctgatccgcctattcggcttcgccaagaagatcggcatgatcgatcacaacccggctgaagacaccgatatcgttcgggagcgccgggaagaaaaaactggcggcttccattgctggacagaagaagagatcaacacatttcgcgcacgttggccaattggcagccgtgaacgtttgggcatggaattgattctctggaccgatcagcgccgaagcgatgtcgtgcgcatggggagggagcagatcaaggatggccgtattcctgtggtgcaggaaaagaccggcaagcgcctgtggttgccgctggcaccgcaactggttgaagcgattgtggctatgaagccgcatgagacgagcccgtcctgctttctcatcaccaaaaaggggacgccattcaccaaagagagctttggcaacttcttccgccgggcatgttctgaagcgggtttagatcattgctcagcccatgggctgcgcaaagctactctgcgtcgtatggctgagctggaaatggcaaattcatccatgaagtctgtcagcggtcagacgcgtgatgaaacgctggcggaatatatccgcacggctaatcagaaggcacttgcagagagtgcgatcaaccaactttcaaagtgggagaaagctcaaagtgtctaacttgatgaagaagttagacactgaaggggctgcaaagggctggaacactacactttcagagaaagtgtggctccccgagttggattcgaaccaacgaccaagtgattaacagtcacctactctaccgctgagctatcggggagcagcccctgcgggtggagcggcgtatatgggggggtgaaagttttgacaagggggtttttgcgagaatttcactcagacgatgaattgttctgtcacgatccgctcatcgaggctgtggccagggtcgaaaagtaatgtaagttcttgagtttgtgagatttctaaatgaacttcggcaatgtcacgaatttcccattggtccgcaacagcggcaacagggcgcttgtcaggttcccggatacgaaaggtcactttgctacgatcaggaagaatcgcaccgcgccagcgtcgtgggcggaatggactgataggggtgagggccagcatatgggaatccagcggaagaatcggaccgttggcggacaggttatacgctgtagatccggctggtgtggccagaagaatcccatcacaggctaattctgcgatgcgtggcttgccattcacgagcacttcgatcttggccgtctgccgcgtttcgcgcagcaaagacacttcattgatagcgcaatattgatgactttcaccgtcctgagtgatggcagtcataaccagaggtgaaaccgctatggatcgcgctttggcaattttttgcgttggtgtgcggctactatgatagcgattcatgagaaagccgactgtgccaaggttcagcccgtaagctggtatcacacggttttcgcgcaacatcttatgcagaacatgcagcatgaagccatctccaccaagcacgaccacagcgtcagcctcttcgaccggaacccaatcgcctgagcgcttcagttcggtagcggcattttgtgcacgttcggatggcgatgccagcagggccagcttttcgtagtgattcttgttgccagaggacatgaatcccctcctttcccagggttcccccttactgtagcgccgtcccgatttgcaacgcactcactattgttagagatttttgtcccgatgtcggcaaccacattctgatgttgagccccatcatgtatgacgatgaactgcagcgtgatttgttgaccggtttggtttccggcttttccgctatggaagcaatcgattcctggcgcggagaagcgggggagcgtcccttcgttcatgctacgctgattgggctcaaccggtttgatacggtcaatcttgcttatggcgaagaagctggtgacagtgctttggttgaagtggctgcccgtatccagcgatttgctgaaggtgacgcggttgggcctgtgttggtttcgcggatcaagggcggcagtttcctgctcgccagctccaagccttgcagccgggaacggtggcaatggctggcggaagaactgttggagcgtattgcggttccgatccgtaatcctgaagcaggaatcgtcagattgtcacctcgtgcagtgctttatggcggcgtgatagattctgcgggtgagatgtttgcccacctcgaagacgcgcaaaggagcctgcaggttcaatcgggtgcgcgattattatgggctgatcgcaatatcatgttagcagggcggccaacgcaattgctcgaagccgatcttttgacggcgctcgaccgggatgaaattcaaatcttctaccagccacaattctctgcggctgatgggaagttgctgggagcagaagcgctggcgcgttggcaacatcctgaattagggcgcatcggtgccacggctctgtttgccatagctgagcgggccgaccatgtgagccaattatcccgccatattgttcgcaaggcgattgctggggcagtgccctggcccaaatccttgcgcctttcactcaatgtcacgcctgctgatctggcgtcgggcaattttgcggaagagtttatcgcgacagtcaatgatgctggctttccgattgaacgccttaccctggaaattaccgaacatacgctggtgaccgagttggatcgttcagccatgcaattggcgcaattggcagcattgggaatgcggattgcattggatgatttcggtgctggattctgcaattttcgctatctcaagcaattgccgctccattatttgaagcttgaccgctcaatggtggaaggcatcacccatgatgcacgcgaccttgcggtgtttcgtggtatcatcgccatggcccaagcgctcgaccttctcgtcatagctgaggggatcgagactgccgagcaactcagtgtcatcgcagaagaaggctgtgagagttatcagggtttcctgagcgcaaggccgatgacaggggaagattttcaaaggcttgtggcgaagacttcactgtgacttgagcgactgtaggccatcggcatcaggcgctggcttccgctttggcctgacgcttttttgccttgcgggcgaccccgctcaaacccttggtgagttggtataatccgttcaggcggctctgcgggtcgccccatgcccggttgatgacaagcttcatatccggccgcaatttggcggtccctttcaaccggtccacataggcgatcaggccggcaggatcggggaagtcgtcattgtggaaggttaccagcgtgccccgtgccccgacatcgatcttcgcaatatgcgcatcgatagcctgatgcttgatttcgatcaggcggataaggtttgatgttgcactcggcaaagcgccgaagcggtcgatcatttcggcggccatgctttcaacctcggccttggtgtcggcatcgttcagacggcgataaagcgccatacggacggcgagatcaggcacataatcatccgggatcatgatcggcgcatcgacagtgatctgtggtgacaggccggacgtgctcttttccaacccatgatcgccagcctttacggctaaaatggcgtcctccagcatggattggtacagttcgaagccaacttccttgatatggccggactgttcatcacccaccagattgccggctccgcgaatgtcgagatcatggctggcgagctggaagcctgcaccaagactgtcgagatcaccgagaaccttcaggcgcttttcggccacttctggcagtgtttggtctttgggcgtggtgagataggcataggcacgcaatttagaacggcccacacggcccctcaactgatagagctgggcgaggccgaaacgatccgcacggtggatgatgatggtgttggcagacggaatatccaggccactttccacaatggtagtggagagaagcacatcatatttcttttcgtagaaggcgctcatccgctcttccacttcggtgggcgtcatctgaccatgggcggtgacgactttcacttccggcaccgtattgccgatccattcttccaactcagccatgtcggaaatgcgcggcacgataatgaagctctggccgccgcgatgatgttcgcgcagcagcgcttcgcgcatcaccatttcatcccattccatcacataggttcgcacagcaaggcgatcgactggcggggtctggatggtggagaggttacgcaggccggtcatagccatttgcagcgtgcgcggaatcggcgtggcagtgagcgtgaggacgtgcacatctgcccgcaattgctttagcttctccttgtggttcacgccaaaacgctgttcttcgtcaacaattacaaggcctaagcgattgaactttacgctctttgataagatagcatgtgttccaaccacaatgtcgatcgtgccgttttcgaggccttcgcgcgtttccttggcttccttggcgggcaccaggcgggagaggcggccaatgttgagcgggaaggtggaaaagcggtcgcagaagttctgataatgctggcgagcgagcagggtggtgggggcaatcatcaccacctgatatccggccatcgccgctatgaaggctgcacgcagggctacttcagtcttgccgaaacctacatcaccgcagacgaggcggtccatcggtttgccatcgcccaagtcgcccatgacatcctggatagccgcttcctgatcttccgtttcattccagggaaagcgatcaacaaattgattataagagctttcttccggttgaatgacgggagcttgtttcagcgcgcgccttgcagcggtggccagaagttcacccgcaatggcctgaatacgctctttcagtttcgctcggcgtttttgccatgcctcaccgccgagacggtcaagcccaacgccttcttcactgctcccatagcgcgagaggacgtcgatgttctcaaccgggatatagagcttatcgccgccatgatattgcagcatcacgcaatcatgctggctcttgccaaccgaaacaggttcaaggccgagatatttgccgatgccatggtccatatggaccaccagatcaccccgactgagcgcttgtagctcggccagaaaagcgtcggaatccttcttcttcttgcgccggcggaccaggcgatcacccagcagatcctgctctgtgatgacttcaatctgatcgttggaaaagccggtgtcgagcggcaggatcatcgctgccgctttgcccttggccgatgcgccgagcgcttcctgccaactctcgaccagtgcaagcggcgtgcctgcttcctcaatgatcgaagcaatgcggctgcgcgaacccttggaataggcggccagcagtggtctgcggccctgaacgcctacgcctttgaggaattttgctgccgcttcatagacattcacgccttgcgagcgttcaggggtgaaatcgcgggccgatttgaacccgaaatccatcacccggtcgctttccggttcggcaaagatgccggtgcggtggactggccattcgccaattttggccgcaaattcttccgggctgagatagagcgcatcctgtggtagcgggcggtaggagccggctgcctggcctgccgtatcggcacgttgcttgcggtaatcggcaatgtcggtgaagcgctcttcaccggcttgaagcgcaccattatcaatcacaatcacgtcattcgaggcaaggtgatcgaataaagtggcgagcttttcttcgaacatgggcagccaatgttccatgcccgcaaggcggcggccttcgctcaccgcctgatagagcggatcgccggtcgcattggcgccgaatttctcccgatagcggctgcggaagcgtttgatcgtgtcatcatcgagcaaggcttcgctggccggaagcagcaggtgatggtccagtgtggcagtggtacgctgagtggccggatcgaacaggcgcaggctttccagctcatcaccaaagaaatcgagccgcaaaccctgatccagaccggacgggtaaatgtcaaagatagacccgcgcacggcgaaatcgcctgcatccaccaccgtatccacccgcgcatagccttggcgacggagcaggccggtcaggctttcatgaccgatctcaacgcccgctttcagctcccgcacatattcacggatgcggaaaggtgtgaggacacgctgggtaacggcattgaccgtggttacgacaagttgtgcgcccgttgagcctgcttgcaggcggtgcagggcggacagacggcgggctgagacggacagcgcggggctggcgcggtcataagggaggcaatcccaagccggaaattcgatcacat

SEQ ID NO: 3490 - DNA, 23189 bp, synthetic construct
  source 1..23189: mol_type = other DNA
  misc_feature 1..23189: note = Synthetic
ccgtgttcgataccgcggccagcgccgcccagcacaagctctggtcgcttcagggcagacgacggacatggttctgcggagcatggttcggcgcgggcttccacgaggatggcctgcaagcgggacttgccgtggcagagcagctcggcaacctgcgccgcccatggacggtcgagaacgaatccggccgcatccatgttttcccgcggccagcaccggaacgggtgcttgaaccggcatgatcgggccgcccgcgctctatcacggcaatgtcctgcaccggcggctgcggccgtgtctgcacaccctgcgttaccgggtgttccacctcttgctggatattgaccggatcagcgaactggctgcacggctgcgcctgttctcgcacaaccgcttcaatctgatttccttccatgaccgcgaccatgcccgcaatagctcgctgcgcgatcatgccgaagcgctgctggcagaagccggcatcgtgcccgacggcggccccatcaggctgctgacgatgccccgcctgctcggctatgccttcaatccgctcagcatgtggttctgccatggcgccgatggcagcttgcaggcggtgatatatgccgtttcgaacaccttcggagagcggcacaactacgtgattcctgcccgcagcgcagcggggacaggggcaagcggggcaaacgtgctgcaccagcaggcaggcaaggcattccacgtatctccgttcctgccgatggacctgcactacgccttccgcgtcatgcctcccggcccgcgcatcgccattggcatcagcgtttcggacgggaagggcccggtcatggccgcagtccacacgggccgccgcgaggagctgagtgatcgggcccttatcaaagcggcggtgcgctatccgctttcaactctcaaggtcacggccgcgatccattgggaagcgctgcgtctctggctgaagcgcgcgcccttcttccgcaagccgccaccgccgcccacgcggctcaccgtcgggcaataggcatcacaaccagccgatccgccggaaccgcagccacagaccaccgcagatcagcaggatcgccccccagaccgtgaaatagccatagcgccattccagttcgggcatgtgggcaaagttcatgccatagattccggcaatcgccgtgggcaccgccagaatcgccgcccatgcggccagcgcccgcgtcatttcgccctgccggtgctgttccagcaggcttgccgtctccacgatggccgccagcgtctccttgagcgagcgcatccgcgccatcgcccggcggacatggtcgagcacatcgcgaaaccagatcctggcggcgggatcgatgcacggcagatcagcctcgaccagccgcgcgcacatttcctccatcgggccgatcacgcgctcgaaccgccgaagctggcggcgcaggcggaagatgcggcggatcacggcctgttcgggaaacacgtctatggccgcctcctccatctcctgcgcgatttcctcaagctggtcgagcagcggcagatagccatcaacgatgaaatcgagcaccgcatggagcacatagtccggcccttcggccagccgttccacctgtccttccagttcggcgcgcaaggcactgtgcgcccgcgtgctgccaaagcgcacgctgaccagaaagcccggccccacgaacaaggcggtttgtccgtaggtgatttcctcgtctgctccagactcgcctgcacccggcccactgttctgcaactgcgcggtgcgcgccaccacgaacagcccggaaccatagacctccaccttgggcaactggcgcgggttcagcgcatcttccaccgccagcgggtgcaggccatacttgcgctggaccatggccatctccgccgcatcgggttcgtgcagccctatccagtcgaacgcatcgggcggcaggtcggtctccggcggcccggacagatcaagccgatcaaggctgatccggccatggcggtagcggcgggcggcaatgatggtcatgccccgcatcactggcaaatgcgcaaggctctggcaatcgcatgtgaaagtgctaacatttctgtaaatagacatgggagagcagcagtgggtgcagagcagaccgccatcagggcggcacagcctgattacgatgtcctcatcgttggcgccgggatttcgggtatcggcatggccgcgcacatgcagatgctctgcccggaccgcagctatgccatcgtcgaacgccgcgaccagatcggcggcacctgggatcttttccgttatcccggtgtccggtccgattccgacatgcatacgctgggcttcgtgttcgagccgtggaagcacgagaagtcgatcgccgatggccccgcgatcctcgaatacctcaaccgcattgccgacgaacgcgacatccgccgccacatccgctttggccgcaaggtgctcagcgccgacttcgacagcgcggccgcgcagtgggtcgtcactctggaaagcgaggatggccagcgcagccggatgaccgcccgctggctctatctcggttccggctactacgattacgacaacccccacgaagccgagtttccgggccgggatgatttcaagggcgagatcgtccatccgcagttctggcctgagaacttcgattatgcgggcaagcgggtggtcgtgatcggatcgggcgcaactgcggtcacgatcgtcccgtcgatggccagaacggcggcccacgtcaccatgctgcaacgcacgcccacttggtatgcaacgcgccctgccaaggatgggctggccaatttcctgcgcaagatcctgcccgaagatctcgcctatcgcatcacccgcttcaagaacgtgcggctccagaactacttctacaagcgcgctcgcacccggcccgacaaggtccgcgcgttcctcaccaagaggctcaaggcgctgctgggcgacaaatacgacgccaaggctttcaccccgccctacaacccgtgggaacagcggctgtgccttgtgcccgatgccgatctgttcgaagcgatcaaggcaggcaaggccagcgtcgtgaccgaccggatcgagcggttcgacgccactggtatcctgctcaaatcgggccagcatctcgatgccgacgtgatcgtgacagcaaccgggctgaagatggtcatggcgggcaaaatcgcgatcagcgtcgatggcgttccggtcgatttcgcagagcgctattactacaagggcgtgatgttctcgaacctgcccaatctggcggcggtgttcggctatctcaatgcctcgtggacactgcgcgccgatatcaacgcgcgctacatctgcgatgtgctcaatgcgatgaaggccaagggcgcggacattgcagtgccgcggctggcacccaaccacggccttgacgaggacaacatctacgacttctcctcaggctacatcgaacgcgcacgccacctcctgcccaagagcgcaagcgacatgcgctggcggctcaatcaggattacgtgcgcgatgtggcgtggatgcgcgaagacccgatcgaggacggcgtgctgcaactcgatcacgctcgccctgccgttgccggaacaggaccgcacaaagagcatgtccgcgcggcgcaatagcgcttttgcggcacggggccttggtctatccctttaggggatgactgacgaatcccgcatatggacagccgcgctggtcgtggtcggtgacgagatcctctccggccgcacccaggacaagaacatcgcccagatcgccacatggcttggcgtgcagggcatccgcctgcgtgaagtgcgtgtcgtccccgatgacatggatgccatcatcgaggcggttaatgcgttgcgccagcgcaacgattacctgttcaccacaggcggcatcggccccacacatgatgacataacggtcgatgccgtggcagccgcgctgggcgtggacgtggtgatccatcccaaggcgcgcgccattctcgaagcctactatgccccgcgcggggggctgaacgaggcacgtctgcgcatggcgcgggttcccgatggcgcagacctcatcgaaaaccgcgtttcgggcgcgccgggcatccgcatcggcaacgtgttcctgatggcaggcgttccggcgatcacggcgcagatgctcgatggcctcaccggccagcttgaaggcggcctgccgctcctgtcggccacggttggctgctgggtggcggaaagcgagattgccgatctcctgcgcgaaaccgaaaaggctttcgaaggctgccagatcggcagctatcccttcttccgcgaaggccggaccggggccaactttgtcatccgctcggtcagcgccgaaacgctcggcgccgttgccaaggcgctggaagatggccttgtcgcgcttggccgcacgccggttgccggggggatctgacgccatgctcagccgccgtcctgttctgctgacatccctgcttgcgccactggccgtcatgctggtggcggcagcacctgcaaagaagcgcgtggcgccccctcgcgcggcggcggcacctgcctatcctgcgccatccaccgcccccttgcccgataccgtgcgcatcgcgctggatacagaggctggccgcatcgtggtggcggtcgacgtgaagcacgcgcctgccagcgccaccaatttcgtgcgctatgccgaaacacggcgcttcgatggcacaacgttctaccgcgccatgcatctcaactggggcgagcagcccaatggcctcattcaggcgggcacgcgcggtgatccccggcgcaatctggctccgatcccgcacgagccgacagaccagaccggcattctccacaaggccggaacgctttccatggcccgctatgcgccgggcacggccaccggcgatttctcgatcatggtatcggaccagcccggccttgatgcccagcccgattccgccgatcccgaagcgaaggcaggctatgccgccttcggtcaggtgatcgaaggcatggacgtggtgcgcgccatctttgcagcaccgatttcggaaaccgaaggcgaagggatcatgcgcggccagattctggcccagccggtgaagatcatcaccgcccgccgcctgcctgatgatgcgcctcctgcgccctgaggcagccctgctggcagggctgatccttggcggctgcaccgcgcgcggccttgccgatttcgaacaaacgcttgccagcagcgacagcgcaacgatcgcgctcagccgatggtgcgaagcccgcaccatcgcgcagccacccgtcatccgcgcccttgccgaccgtcaggcgtccatggccgcctctccggcggtgcgtgaagcgcttggcctcggccccgacgatacggccgcctaccggcacgtcagcctcgtctgcggcaaccgggtgctgtccgtcgcgcacaactggtatgtgccatcgcggctgacgaccgaaatgaaccacaggcttgcaaccaccgacgcgcccttcggcaaggtcgtcgcgcctctgggcttccggcggcagcggctggccagcctgcgcggcgccatggccgaatgtccgcaggggacggtgctttcgcaccgcgccgtcctgcgtctggcggatgggcgcgcgatcagtctcgtggtggaatgctatacgcgggcgaaccttgcgcctgcgccgcgcgtcagcggggattgaccgtccagtcaccctccgcgccgtttgccgccgccgcggcataggcttccagttcgcgccagtgccggtcccagccgggaccgcgcttttccggcgggatcacggcttccacctgcaggcgggcggcagtaaccgggttttgcggtgcttcaggatcggccatgccttccgctctagccctgttgtccgcacagaaaaagggccagagaggtttccctccccggccctgtttccctgttaacggcgtggctggcgtcagccgccgtgcacctgcgccacgtcgatcttgaggcccggccccatcgacgaggacagacccaccttgcgcagatacttgcccttggcgcccgcaggcttggccttgacgatggcatcgacgaatgcgtcgaagttggcgcgcagcgcctcatccgagaacgagagcttgccgatgccgccgtggatgatcccggccttttcgacgcggaactcgatctggccgcccttggccgccttgaccgcttcggccacgttcggcgtgacagtgcccagcttggggttcggcatcaggcccttggggccaagcaccttgcccagacggccgacgatgcccatcatgtcgggcgtcgcaatgacgcggccgtaatcgaggttgccggcctgcatgtcttcgagcaggtcttcggcgcccaccttgtcggcaccggcggcaagcgcggcttcagccttgtcgccgcgggcgaacacggccaccttcacgtccttgcccgtgcccgaaggcagcgtgaccatgccgcgcaccatctggtcggcgtggcgcggatcgacgccgaggttgagcgaaacttcgagcgtttcgtcgaacttggcggacttcaggtccttgagaagcgcgatggcttcatcgacgccatagagcttctgattgtcacccagcttggcggcgagggccttctgcttcttggtctgcttggccatgatctcagccctccaccacggtgaggcccatcgcgcgtgcggagccttcgatgatcttcgttgcggcgtcgatgtcgttcgcgttcagatccttcatcttggcctgggcgatttccgccagctgcgaacgcttgatcgtgccggccgaagccttgccgggggtcttcgaacccgacttgatgccggcggccttcttgatgaagaacgtggcgggcggagtcttggtgacgaaggtgaacgaacggtcggcatagaccgtgatcacggtgggcagcggcgtgcccttctcgatttcctgcgtggcagcgttgaactgcttgcagaactccatgatgttgacgccgcgctgacccagcgcaggaccgatcggcggagcgggctttgcttcaccggctgcaacctgcagcttgatatagccttcaatcttcttggccacgatggcctcctttcttcctgtcggcaggccccttacggggccgaacctcagagtgagcggtcaatcgccccggccggatgaccggaactcccgcacggaaccttccggcgaatcgcccgaagggaagcgcgcggataatgccatccgcacgcgaaagcaatggatttggccgaggataaggccgcctcagcggaccagttcaacctcctcgaagcccagttccaccggcgttgcgcggccgaagatggaaaccgaaaccttcacgcggctcttgtcgaagtccagttcctcgaccaccccgttgaacgaggcaaacgggcctgcattgaccttgaccgaatcgccgatctcgtaatcgaccgccacgtccttgcgcggtgccgcagcggcctgttcgaccgttccgaaatagcgcgcggcttccttgtcggaaatcggctggggcttgttgttggtgccaaggaagcccgtcaccttcggggtattcttgacgaggtggtagatgtcgtcattcatcgtcagcttggcgagaacatagccgggcatgaacttgcgctcgacctgcaccttcttgccgcgcttcacttcggtgacggtttcggtgggcacttccaccgcctcgacaagctgcgaaaggccgatgcgttcggcctcggcgatgatcgcatcgcggaccttgttctcgaaaccggaataggcgtggatgatataccagcgggccatgacgtattctttcggatcctgtgggtttgcgatcaggcgagcgagagcaggaacttgacgatcatgccgaacagcgaatcgatgccaaggaagaacaccgcgagcagcagcatcatgatgccgacgaagatcgccgtggtggtggtttcctgacgggtcggccagacgaccttgcgcgcttcggccttcacctgattgaagaactcgccggggctgggcttcgccattgctctcgtgccttgcttgctgcggcgcgtgccgcgttgaaactcgtctcttccgcctaggggccagcgccgccccggacaggtccgggaggggcaagcgataactccgatgtcggaaagtcgcccatatctagtcgccaagccgccccttggcaagggttgcggcaatcggcccgatcacctgatcgggatcaccgcatcggcatgggcgccaagggcaagcgatgaagcgagcctaactttcgatagggtgagtatcagaacggaacccgtccggaccttcaggacttgtcctcatgcaaagtcgctgactttccgctcacgcaacaaagggtctgaaaccatgaagaagatgctgctcctcccgctcgctccgctgctcgccgttgccgcagccggcgccgtccatgcacagacggtcccggccgacgggcagcccccggtcgaaaccgaagcgcccagcgacggcggcactcccaccgaccagcctgcccccacggacgcaggcacgaccgacgcgcagtaattcccgcgccgacagttccgaaacaagagggggcggtccgcaaggatcgcccccttcagttttgccccggcatggcaggatgaatgccccgtgcagcgcccgatggcccttgcatcacctgcaatacccggaaaactctcagcgaatgggggaaggtggcaggagtggagggactgcaaaaatctctatttttcagcgccatatgttggctaaccatgtagaatatgcccgagcaaatctgcggcgttcagcagtcatgggctaaccttttcagccacctgtcgcaactaaagagactgtgcggtctcctacgcctgcgcgcggcaggcttaaaaagtgcaggggcctgtcgggaagcgcattacattcatcacattggcggatttctgcgggtttgaggcatcacaaacggcattacctcaacatcacatggtaatgaaaacgcgacattacatcttagaacgaagaaatggcggatttctgcgggtttcagaaaaggtaaggtcacatgtaagaataggtgatgttgtgagcatcacattttaatgccgtaaaaacagtgatttatagttctggaagctaggatgtgatgaatgtaatgcgcttcccgatatgaccatttccaaggcggaaagccgcgcttgatcggctgcatcccgcctcctcgttttcgttcgtaggtctgcaattgaacgcacttctcgaaagcgcgcaggaagatgccgacggcatcaagtcgagggcgatgagctggagtgtgtcaatctgcgcaattccagtgcttgaagcgaggaggcggggcgtgggggcaagcgcagcgcgtggggtcgaggcgtggcaccttcgccaatggggtgttagggtggcaggatgagcgcgttcatgacccttgcggcggccgccagcgtctgtgtggcgcgggtttctgatggtgacagcctgcggctttgcgatggcgagcgggtgcgtctgcttggcatagacgcacctgagttgaggggatcatcgcgctgctcccctgcggcgctggcgcggctgcggaacagccggaacccgccctggtgcgatcatgccagaggcgagcaggcccgcgccgcgctggcgcgtttcattgcaggtgggccggtccagatcgagcggcgcggcattgatgcttacggacgcacgctggcgcgcgtcaaagtcaacggcatcgacgctggccgctggatgatggatcaaggactggcacgcgagtggcgctgaaacaaaaaagcgagggccgcagcccccgccttatttggtgcagtcaagctgcttgttaacaactggacctgcgatttctgaagagttcaatatacacgaagtttctcaagatacaattgattcgcgcacgtcgctgcgtaatttatacggcgaaaggagttcctatggagaagcgcctgggactggatatcgggacaaactcgatcggttggtgcctgtatgaaggcgacagcattctcgatatcggcgtgagaatcttctcggacggacgagacccgaaatccggggcaagtcttgccgttgatcgccggaatgcgcgtgccatgcgtcggcgccgcgatcgttatcttggtcgtcgatccgctctcatcaaggcgctcaaagcccatggccttttccccgcagaacaggatgcggcaaaggcgctcgaacgcgaggatccatacagcttgagggttcgtgcgctcgatcatcggctggatccgcatcagatcggcagggcgatctttcacctgaaccagcgtcgtggtttccgctctaaccgcaaggccgacagggtattgggcgatcaggaaagcggactgatttccaccgccactcgtgttctggatgaggcgatggccaaaagcggcgcgcgcaccctcggcgagtttctcgcttcacgcgacacccgcagagtgcgcatgcggcctgacgtcaagggctatgatttctatcctaatcggcaacactatctcgaagagttcgagaagatctgggacgcgcaatcgcaataccaccccgatctgctgagccaacaggcgaaatccgccatccaccgaatcatctttcaccagcgcccgcttaagccgcaggctgtcggcacatgcactttcgccgggttacacggcatccctggcgatgaaacgcgcttgcccaaagcccatcccctgttccagcagcgcaggctttacgaggaagtcaaccagcttgagatcgtttgtgcaagcgcccctgcccgcaagctgacgcgcgacgaacgcgatgccctcatcctcaagctgcaggacaaaaagaaggtcactttctccaccctcgcgcgcaccataagattgaaggagggtgaacgcttcaacaaggaaagcgagaaccggaaggatctggcaggcgacgaagtgcgtgccgagatgagtgacaagacgcgctttggcaggcgatggtttcacctttcccttgatgagcagtggtctgttatcgaccgcttgctgaacgaggaaagcaccgaagacctgctggcctggctcgaaaaggaatggtcgctgcccagcgatgtcgccgaggcagtagccaatgcgcatctgccagacggccatggcaggtttggccttactgccaccgttcgcctgttggaacacctcaaggctgacgtggtgacttatgccgaagcagcaagacgtgcaggcttccaccacagcgactttcgcgatggcgcgtgctacgatgagcttccctactacggggagatactttcccgcgagatcgcgccaggcaaggacgaatacggcgatccgctggaacggcaatggggcaagattaccaatcccaccgttcacatcggactgaaccagttgcgacggctgatcaacgcgcttgtcagacggcacggtcgtcccgatttcattttcgtcgaactggcgcgtgagctgaagctgaacgaaaagcagaaggccgaccacaagcgccggatcaagcagacaaccgatgccgcccgcgccagggcagaaaagctgcgcgagatcggccagcgcgacagtggcagcaaccggatgctcctgcgcatatgggaagaactgaatccctccaatccacttgaccggcggtgcccctattgcgccgaacccatttcgatcgagatgctgatgagcggatcagccgatatcgatcacattgttccctattcgcgttgccttgatgacagcgccgcgaacaaggttgtcgcgcataaccactgcaatcggcagaaaggaaaccgcaccccatgggaacaatgggggcaaacgacgcgctggcccttgatccaggagcaggtcgctcgcatgcatcggtccaagcaatggcgctttggccccgatgcgatggaacgggtggaccgggatggtggcttcatcgctcgccagcttaccgacacccagtatctttcgcgcattgcggcgcagtatctttccgctctctatacacccgatgagggacggcgggtctatgccgtgactggccggttgacggcgatgctccgccgactgtggggactgaatgacatcctgcccgatcacaactgggttctgaacccgcacagcaacgcacccaagaaccggcttgatcaccgccaccatgccattgatgctgcggtggttggtgccacaactccggcaatgatccagcaggttgctagagcggcagcacgcgcggaagagcaggatcttgaccggctctttgccgatctgccaccgccatggccaggcttccgcgaggaactgcagggccgcatcatggccgctgttgtcagtcacaagccggatcatgggcgcaaggggcgtccccttccagggcgagacagcacctcaggccgcctgcacaacgatacggcctatggcttcaccggaaggcgcaatgccaagggcatgccgatcgtggtcacgcgaaagccgctgctggccctcaagcccgaagacctgaccgatccggaaagaatacccgacccggcactgcagggcgcgttgtttgaagccacgcggggcgcaaccggcaaggactttgaaaaggcgctgcgcgacttttcgcgaagggacggcccttatcagggcatccggcgcatacggttgaccgaagcgctcaacgtgattccgatccgtgatcgaacaggacacgcctataagggtgtaaagggcgatgccaatgcgcgtttcgatgtctggcggcttcctgatggcaaatggatcacgcggtggaaggaccgggacggcatcgaacattccggcatagtatcgctgttcgatgcacatcagccgagccaagtctatcaccgcccccaccctgccgcgaagaaggtgcttagcctgcggcagaatgatctcgttgcggttgaacacgatggcgacccaggcaagatcatgcgtgtggtcaagttttctgccaatggctcgatcaccttcgccccacataacgaagccgggccgctaaagacgcgtgataccgaccctgccgatccgttccgttatgtcaccactgttgcgagcggactgaagaagatgcgcgcgcggcaggtgcggatcgacgaactaggaaaagtccacgatccggggccgcgcgaagactgaaccgggctgcttaaccggatgccaaccttggcacggcatgatcgcgtcctgcaaccatgcggcggagcagatcatggaccgtatagttgacattactaccgacaacgtgcacctacgcgcgcaccgcggcttcgtcatcgtcatgcttggcgaacgggaactcggccggatcgctctggatgatgtggcggccctgattgtccacgctcacggggtaacatggaccaccagcctcgctgtgagacttgccgaacggggcgcggtcatggtcctgtgtgccgccaaccatgcccccgtggcttggatcttgccggtagaagggcaccacgcccaaaatgctcggatgcgggcgcagtggaacgctccactgccgctcagcaaacaggcatggaaggcgctggtcgttgccaagatcgcttgtcaggccagcctgctatcggcatgcgggcggcaggaaggcgaagcccttggcctgctagcgcggcgagtgcgctctggcgatcccgacaatcttgaggctcaggctgcccgtcgttactggccagtcctgatggggccggacttccggcgggatcgctcatcaggtggtgtgaacgccctcctgaactatggctacactgtgcttcgcgcggccacggcccgtgcggtcctcgcttccgggttgcaccccacaatcggtgtgcatcacgccaaccggctgaatacctttgcgcttgccgatgacctgatggaacctttcagaccctttgtcgatgccgtggttcatcaactggtgaatgaaggtcaggacgtcctcgatggagcgacaaaggcccgacttgctgccctgcttgcaactgatgttgatcttgcgggaatgacatcgcccctctcggtcgccattcagcgcctggcccaatcgctcgcggcaagtttcgaactgggtcggctgtccctggcgctcttcacaccgcccacggcactcggttggcgtgcgatttccacccgtcatcctgtcggggaatacgtgatgccggaaaggcatgatgcgtgaggaaggctcccaactcagcgggtatcggctgatgtggatactggtgatgttcgatcttccggtgcgaacgcgtgaagaggcccgcgcggcgacacagttccgcgagtatctgcttgatgaaggcttcgagatgagccagctttctatctacgcaaggttctgctctggaaaagaacagttcgaagcccatgtgcggcgaatcgagtcaaacctgccggaaaaaggcgacgtgcacattctcagcttcaccgaccgacaatatgagaacatcatccgcttcaatggccaaaggcgtcggcgccaacgccaaaatcctgctcaacttgcactattctgacgattcgctgcgggatttgcactactggatgccgatttttctctttcccgtcaaagagttgtatcgacatccagcatagcagttcagaaatcgcggtccagcggcaacggcgctgacctttcatcagtgcgagatgatagcatagcagttcagaaatcgcggtccagcggcaacgcctgcgcgaactgggcctttgggacgcggagcatagcagttcagaaatcgcggtccagcggcaacgcagaaggtgagcgcccagatctgatcggcagcatagcagttcagaaatcgcggtccagcggcaaccgaactccgccccgtcttgttgcagctggtagcatagcagttcagaaatcgcggtccagcggcaactgtcgcgcgagggcacctacatcgacgccaagcatagcagttcagaaatcgcggtccagcggcaacggcgaactgttcggcgtccttcctgatctgagcatagcagttcagaaatcgcggtccagcggcaacgcgccgcacgcgatgcgaatggcatcgatcagcatagcagttcagaaatcgcggtccagcggcaaccgcctgtgccatcggcaaagctctccaccaagcatagcagttcagaaatcgcggtccagcggcaaccgtggtggcattgttgcccaagtcatagaagcatagcagttcagaaatcgcggtccagcggcaacatcggaacagatgcgtcaacacgctgcaccagcatagcagttcagaaatcgcggtccagcggcaactgaagtgccccatgggcctgcatggcgtggagcatagcagttcagaaatcgcggtccagcggcaactcagcacgcccgtgctgtccagatcaccaaagcatagcagttcagaaatcgcggtccagcggcaactggcgatgtcggcttcggcctgcttcgcgtagcatagcagttcagaaatcgcggtccagcggcaacggcaggaaaagttggccaaggagcaggagcagcatagcagttcagaaatcgcggtccagcggcaactctcgccgaaaccttgctgcatgaccggcttagcatagcagttcagaaatcgcggtccagcggcaacgcacgaatggccgcacgctacgcggcttggagcatagcagttcagaaatcgcggtccagcggcaacgatccgatctatgtggagtgatggcgtgacagcatagcagttcagaaatcgcggtccagcggcaactgcgtggctgaaactgtcgaggatcagcacagcatagcagttcagaaatcgcggtccagcggcaactgtcgccgaaaccttgctgcatgaccggctagcatagcagttcagaaatcgcggtccagcggcaactgtgtctatcaagactgtcggaactttataagcatagcagttcagaaatcgcggtccagcggcaacgaaagaactgcatcatgacaatccattcaaagcatagcagttcagaaatcgcggtccagcggcaacttggcattgccggaaactccaagccgcccgagcatagcagttcagaaatcgcggtccagcggcaacttgtcgcgggtcatatcaatgcccgatggaagcatagcagttcagaaatcgcggtccagcggcaacaagcgcagctccggagcgtgctggaggataagcatagcagttcagaaatcgcggtccagcggcaactgcttggggattgccggtgatgaggcccacagcatagcagttcagaaatcgcggtccagcggcaactccacctgatagcggcggatggcatcggctagcatagcagttcagaaatcgcggtccagcggcaactgatgcaggcaccctgtccggttccggctaagcatagcagttcagaaatcgcggtccagcggcaacggccggaggtgaggaaaccatcgcggccgtagcatagcagttcagaaatcgcggtccagcggcaacgtttcgtcggcagaaagatagaccgactggagcatagcagttcagaaatcgcggtccagcggcaactgcagcggccaatgcagcgtccagtgcagcagcatagcagttcagaaatcgcggtccagcggcaacctggcggctcccaagtggtggcgtccacttcgacccgaacgtctgattatggccggttgatggcggggggcgccccccgcgacctttcgtcagttcgagatgatcacctcgccggctattttcgaattgtccatgccgcccacctgataacgcactttcgcctcttcgatcgcgaagccatcgaatattcgccgcactgctggatgatcgttgagcgacaggatgaaccgcccgcgaatggctcgcagcttgtcggccatcacctcgaactcatcgcgcccgaacatgtcgcggccatagtcggtctcgcagccgtagtagggcggatctagatagaacagagtccccggacggtcataccgatcgatgaactcccgccatggcagccgctcgatgatgaccccggcgagcctctcatggaccgcctcgatcattggcgcgatcttggttacatcgaagcgcgcgccgctgcccagcacaacgccgaagccgcgcccgttcactttcccgccaaaggcaagccgctggagataaaggaaccgcgccgaacgctgcatgtcggtcagagatgccgggttcatggccaaaagcttctcaaagcccgcgcggctcgtgatctggaagcgcatcatatcaaggaatggcacgtaatggtgctgcaccacccggaagaatgtcgccacgtcctctgaccagtcattaatgacctcacctttcggcctgcgatcgcgccgcaggaaaacgccgcccatccctacaaagacttcagcgtaggtctggtggggcacggcgttgatccgctgcaccaggcgccgggccagattgcgctttccgccgatatagggcgcaagcggcctgaccggcgctactggcaaaaggtctggatactctttcaacatggaactggactccgtcttaatgttctttatccgttccactcccggccgggaggcgggacggatcgattcggccgcatgacgcgtccggaccgttcggttcgcggcggaagtccagtccgccgggaggggctggttccagcagcccttcccccgccttggcgggggtgctcccctatcccgccgccagcgcaatcgcgggccgttcgaagcgcacggcttccacgcccagccattcgttgatcgccagcatccggcgctggatgggaaggatttccatttcatagaacacggccgccgcatcgttcacgttgccgaagccgccggtgttcttgggcacgatccccagaagctgcggcggcacgcggtgggcggccaggaggtcttcggcggtcacgctcttgatgttcaggaactcgtccttcgatcccacttcggcgatgggcagcagcttgatgccatcgggcttgcccttgggcgaatggatgaacaggttgcggaaattgcccatgcccttggccccgcgcagcgccttgcgcacggcctcgatgctggcatcgctcatcccttcgtcggaaaggtagaggatgaagcccgcgtggcttccgttgaggtaatagcgccgccggaagatcgtcgctgcctcgttcagcaggcccgattgcagcgccgatagatattcgggcattccgtagatttcctgcatgggatcaggttctttgaggtgcaggatcgtgcccggccggtattcggtggcatcgctgatccacccggtgcgcggcacccagaagaactgccccggcgccagccccacccgcgtccatgccgccttggaacagcgcaggcccagcggccttccggccagattgtcggcgcgttcgagataggcattgcccatcaccagccagtcgagcgcgaacagctcgaactcggccatggaaaaccagcgcgaaggcacgaagctggcggtgagcaggttgcgcttcaagaggatcgcgctctggtgatggggggccatgcgataggcgcggccaagcccggcaaggctgacgggcggttcataccagcggttgttgtgcgccacctcgaacatgtcgaagatttcgcgccggtcgatcacgctttccggatcgccgaaggtgaaggccacctcgcgcgcgggttcaggtgtcacggcaggaaggcttccggccggagctgcggccagatttccggccagatgtccggcaggcggcgcggtttcggtttcaggcatcgtcgaagatctccacggtggtcccgccgctggcaggctcggtaatgtcaagcggttcgaaagcgagcgcgtgcatcaccgcccaggccagatcggcgtggccggtatcgcccgcgcggctcgccacgtatgtcacctgggtgccgccgcgcgtgatttcggggcggatcgccatgaaggcctgcatcaggtccagccacccggcatcgaactcaagcctgcccgatgagatgacgttcttggccttcagcaccatctgggtcttggtggccaccgaataggtgatggcgtgggccatggggaaccacttgctcaccagctggtgaaccgccttgcccgcgccggtcacatcgatgccgatcttggtgacgttgtatttgtcgtgcatctcgcgcacggcttcggcctgcgcggcgaaatccagccccttgaggcgcttcttttccagcacgcggaacttggcgccgatctttgccggggccgccacggccaccagcgcggcatcatcgccggttccgctctcgctggcattgggatcgtatcccagccagacctcgccttcataggggcgcagggcatagggctggaagtcatgcgcccaggcatcccagctatcgaccatgcagcgccgcatgagctggaagggaaacatgctctggctgtcgtccaggaaaacgcagcggaacaggttgtcgaactcttccagcgaatactgctgctgaagctgcgcgggatcgaccagatcgaagcctgcctcaaccgcatcgtggatcgtcacgatctggcgccacacgccatcggcgccaagctgcccctccttcagcgcttcgtggctgatgtcgatctgcacctgatcggccttgggccgcctgcggttgtatcgcgcgccgctccacagcggataggcttcgtgcgccagggtgctgggggtggaaaacagggtgatcgaatattgcttctgcgtggccatggcgctcgccactttgaacagttcttcaaagccatagatccagaagcactcgtcgatgatgacatcgccgtgatagccctgcgcggtgcgatagttcgtgcccaggaagtgcagctcaaaggggtccaatgcctcgatgggatcaccttcggcgctccctggcacggcacctctttgcaccacgatgggatcgcccttgagtgtgacgccgcacaccttctgcacccactgcacgatataggcgcggaagatgttggcctgggcgcggcttgccgagatgaagatctggttcttgccggtttccagccccaccagaaagcgctcgcgcgcgaaataccaggtggccccgatctgccgcgatttcaggatcatgcgcgtgcggaacgcggtgctggtcagcagccatcccttctgccggccatgaagctggccttccatgtcggcgcgcagccttgccgccatttccggcgtgataaggttcttcgcctcctgcttcttcgcgttcgcggcgcgcgcgccatggcggcgcttcgggttcagatcggcctcgttgccgccttcgcgatagcgttcaatgcgggccaggcgctccatctggcggcccagcaggtcgatctccttgtaatcgctgccggttttcttgtccttgtcgatcagcgccagatagcgttccagcgtgccttcggccgcccgcgcgatcggcggggcatcatcccacttgtgccgcgtcttccagcttgccacggtcgaatagggcacggccagttcatcggcgatttgctgcatggtccagtgccgccagtagagcgcgcgcgccttcagccgggtgtgctcgcccggcccgcgcggcgcacgccctgcctcatccccgccggatggggcctgcgccaattgatcctggtcttcgcgctgctccatggcggtgcacgctatggcgcttggccgcgcccgcgcgcccccgccgtgttgtgaccctggcgcgcacaacgcgcccgcgttgcgaataggccagcgcgcccgtcttttgtggacctgtcagatcagccggaagcgcccgcacgagcgaccggccccaccaaaggaccggagccgaagcaatggcgaagacgcgattttaccgggtggccgtggaaggccagaccaccgatggccgcaccatcgaacgccagtggctgattgatgccgccgccacctataaccgcgaaacctatgccgcgcggatcaacatggagcacgtgcgcggcatcaccgcggacaagcccttcaaggcctatggcgatgtgctcagcctcaagaccgaggaagtcgagatcgagctggcgggccggaaggaaaagcgcctcgcgctctttgccgaactcgacgtgaccgacgaactgctggccatcaacaaggaccggcagaagctctacacctcgatcgagatcaaccccaacttcgcccagaccgggaaggcctatctcgtcggccttgccgtgaccgacagccccgccagcctcggcaccgagatgctccagtttgccgccagccagggcgaaaacaacccgctggccgcgcgcaagcaggacaagggcaatctcttcaccgccgcgaccgagttcgagatcgtgctggcagaagagcctgctgaaaatcctgatccaaccggcgtcttcgcctcgatcaaggcgttcttcgatgggctggtcaagcctgccgcgcaggcccctgccgccccggcgccagcggatgccccggctgcccctgccccggctgaacctgcgcccgccgcccctgccccagatgccgccagcttcgccgccatcggcgcgctgatgacgcagatggccaccagcatgaccgaactggcgaatggcaccaaggccgaaatcgccaggctcaccgccgatgtgaaggccctggccgaaaagctcgaaggcacccctgccgccgtccccggcacgaatgcgcagggctttgtccagcgcgccgccgccaccgggggcaacgtcaacgccgcccggaccgattgctgatcggcccggcgcccatttcccgaaacccgcgcccacccctcccccagatttgaggaaatcccatgaagaacgaaaccagggccaggttcaacgcgatggtcggccagatcgcgctgctcaacggcatcgatgccgccaccgcgcagaccaccaagttcacggtcgaaccttcggtgcagcagcgccttgagcagcgcatccaggacagcagccagttcctgtcgatgatcaacatcgcgccggtcgatgagatgcagggcgaactgatcggcctgggcatcggctccaccatcgcgggccgcaccaatacggctgcgggcaaccgccgcaacggcatcgatccttcggcgatggacggccgcacctatacctgcgtgcagaccaacttcgacgtgtccgcccgctatgccaaggtcgacatgtgggccaagttccccgatttcgagacgatctggcgcgataacgtggtgcagcgcatcgcgcttgaccgcatcctgatcggcttcaacggcaccagcgcggcggccgccaccgatcgcgatgccaatcccgcgcttcaggatgtgaacgtgggatggctccagaagatgcgccttgaaaacgccgcccgtgtcatggacgaaggcagcgatctggcgggcaaggtcacctatggcagccatgccgatgccgattacaggacgcttgatgcgctggtctgggatgccaaggaaacgctcctggccgaatgggcgaagaacgataccgaactggtggccatcgtcggcagcgatctgctgcacgacaagtatttccccatggtcaacgccgatgaaaagcccaccgagcagctcgcccgcgatgtcatcatgagcacgaagcgcctcggcggccttcccgccatgcgcgtgccgggcttccccggcggcacggtgctcatcacccggcccgataacctctcgatctactatcaggatggcaagcgccgccgcctgatcaaggacgagccggaatacgaccgcgtgaccgattatcagtcctctaacgaggcctacgtgatcgaaaacctcgaatatgcctgcatggtggaaaacatcgaggcgcacgacgcataaaagcccccgtgcccggcctgctcctcctggcgggccgggcatcccccttttcgccgcagaaacggaaagccgcagccatgatttcgcccgccaaggccagcttccagcgcaagctcgcatcgcaggccagcccgatccccggcgcgatccccggcccggagccgcgccgggatgcgatctggcgcgatggctttccggaccctgccccggcccgccccatgcccgaaagcggcccggtggcatccgaatatcagcagcttctggccgcgctccagcttgacatgaaccgcctgcgccagatccagagcaccg

SEQ ID NO: 3491 - DNA, 23183 bp, synthetic construct
  misc_feature 1..23183: note = Synthetic
  source 1..23183: mol_type = other DNA
gaacacggccgatcgcgcctcgcccggcgcggcccagccgccggtgatgacgccggaggtcgcgttcacattgttgcggatcgccgtgaagtaatgctcgtcggtcacattctgcacgttcagctgcgcggtcaggcccggcgcgaacggataggcgacgtacagccggtgcaccagatagtcgtcggaccggtattgtatccgctgcagcagcgtccgctggttgagcgcaaagctgccctgataggtcaggccgtagccgagctcgagcccgaacgggaaacggtagctggtgaacaggctgccggaatgctccggcgtctggaccagctcgtcgcctcgctgcgggtccgggatcgccgcgctgttccggcaatccgcgctcgggctggcgagacatgtgtcggagacgctctgcagcaccttgctgtcgagataggtgtagttggcgaagatcgtccaaccctcggcgatcgttccggtcagccccagcgccacgccatcgacgcgcgagcgcccgtcgagcacctgcagcccggccggctgcgccgggtcgttggagggcacgcggaaattggtccgctcgttgcggaacagcgccgccgtggcctgcactccgtgcagcaggtcggccttgacgcccacttcgtaggtgcgggccttttcgggcgcgacgtcgcagaaattgacgaagttcgcgcccgatccgctgctgcagccgagccgcaccgtcgccgatgacggcgtcttcgaattgccgaaggcggcatacaggctgaccgtctcgaccggcttgaacaccgcgccgaggcgataggaaaagaggttctcgcggctccgctgcacggccagctccgcgggggtcggcacccggtcgccgggcgcgtggaagggcagcggaatcggccggaactgcgcccggtcctgctcgtagcggacggcgccgttcagctcgaaccgcccgatctcgagattgtcgaacagatagacggctcgattgcggctttcgctcttcgactgcgcggtgacggtataattgatcgggccggaatagaccgtcaccggatcgatgacccgctcgatcggcagcgtcacggcggacccgtcggggttccgcggcagcgacgcggtctcgatccgataatcctcccaggtgaaggaggcgccgaccaccagcgtgttgcgcagcccgcccttctcgcccgccacccagcgcaggtcggtctggttgtagagcagctggttttcctgatcgcgcaccagcccgcgcgggccggacggctgccagaagccgggtgccagccccgccggacacgccgcgccgaccgcgtcgttcgcgctcgccgacaccggctgccgcccggtttcggccaggcagaaagtcccctgcggcgcgctggtctggctgtattgcttcacccgctgccagcgcgtcaggttccgcacctcggcgccgccgccgaaatcgtggcggaacgtcgccgtcagccgatcgacccggatgtcctgctcgtccaggttgcgatagccgtaatagtcgctcgggctggtccccggcagcggcccgtcgttcagctggttcctgaaataaggcacgccatagatcggcgtgttgtcatcctgctggtgcagataggcgagggtcaggctggtcgggccgtccatgccgatcgtcgccgacggcgcgatgccccagcgccggtaccgctccacgtcgcggcccggcacgtcgttgcggtgggccatcgcgttcagccggaccgcgatcaggtcgctcgcccgccagttcgaatccaccgtcgcgcggtaataatcgtcggtgccggcgctgccctgcacgatcgtcaggtcgttcggctgcggcgccttggacacgaggttgatcgtgccgccgaccgatccggcgccgttgaataccgaattggcgccgttatagacctcgacctgctgcaggttgaaaggatcggtgcggctgtattgcgcgctgtcgcgcacgccgtcctgggtcaggtcgttattggccgaaaagccgcgcaggttgatgctgtcgccatagccgcccccgccctccccggcgccgaaggtgatgcctgggatggtggagagcgcgtcgcgcaggctcagcaggttctgcttgcggatgacctggtcgctgatgacggtgacggtctgcggcgtgtcgagcagcggcgcaactgccttgggactctccagctcgccagacgacgatccgttgacgatgatcgcctgcatgtcggcggcgctcgccagcatgacctgcgcgtcggcggcatcggctgccgcggctggcgcggctggcgcggtcgccagaaagccgatgcaccccaaggcgaggtaggcaccgtttgcggcggtggaatgagacacgagctgaaccccttcacgcgctgttgcgctttgttgaggtcgctattgctaatcattcgcaatagagtcaagtcgcgcggcgcgaaaaaagcctgtcctacatcgcgccggctatgctaactgttccctatatgttcccgctcgcgcctctcctgatcgttccactcgatcaaacgcgcgggattgatcgagcggattctttccgcacgccgaactttcctaaccttccgccgctcacgcccggccgccgccggcggctcgggctggccggggcgcctcgctacttgggcgcggtcagcgacttgccgagcgtctggatcgccattgccgatccctgaacccgtttggcgcagctggtcatggtcgggcctgcattctcggcagtgatcgtcggcgcctgcgccttgagcgcggccgatagctgcgcgccggacaggcgtgcgtcgacgcggccgagataataataggaggagagcaccgcgacctggtgcttgcccgggtccttttccgctttcacgaacaggttcgcggccagcaggcacttcacgtcgtcgctggcggtctgcgccgccgcgggcgcactcgtcaaagccagggccagtcccgccgcggcgaacgcatcacgcaattccatcgatactctcccgtccatcggcaaggccaagcgcttgcgccgccatcccgttccgcggctgtagcgaaaccgcgcttgcgtgtcgcgcccgctctgggcaggaaggccggacccccttcatcaacggagttaagcttcatggatcgtcgcgcatttcttctgtcgggcggagcggtcgcggcgatcggcctgatgccggaggcgctggcgcagacggcgccgggcgcagccgatacggagctgcgcgcgctgctcgaccgcttcttctacgaccggctgcaggacagtccggaacaggcgaccagcctcggcctcgacaagggcgagcgcgcggcgcttcgcgcgcgcctcagcgacaattcggccgccggccaggcgcgccacctcgcccgcacccgagcggaacgcgcggcgctcggcaagatcgaccggaccggcctcagctttaacggtcaggtcgattacgacgtcgtccagtatcagctcgatcgcaccatcgcgggcgcgcgctttccctatggcgacggcttttcgccctatatcctcagccagcagaacggcgcctatcaggacgttccggacttcctcgacaacgcgcaccgggtgacgaacgccgccgatgcggacgcctatctggcgcgcctgtcgcagatggcgaaggcagtggacaacgacaccgaccgccagcgcgccgataccgccaagggcgtgttcgcgcctgactatatcctcgacacgacgctgaagctgctgggcgatgtgcgcgatgtcgagccgaccaagacggtgatggtcgcctcgttcgcgaagaagctggccgacgccaagctgccgcccgcccgcgccgcggaggcggagaagatcgtgcgcgagcaggtcttccccgcgctcgaccggcagcgcgcgctggtgcgggagctgcgggcgaaggcgacgcacgatgccggcgtgtggcgcctgccggaaggcgaagcctattacgcggtcgctgccgagggctatacgaccgtgtcgatgaccggcgacgagatccacaagctcgggctcgagcaggtcgccgagatcgagggccgcatcgacgcgatcctgaaggccgaggggatgagccagggcacggtcggcgagcggctggttgcgctcaacaagcggccggaccagctctacccgaacaccgacgaaggcaaggaagcgctgctgaaccagctccgcgcccaggtcgcggcgatgtacaagcggctgccggaagcgttcgcgacgctgcccaaggcgccggtcgaggtgcgccgcgtgccgccgtcgatccaggcgggcgcgccgggcggctattaccagaacgccacgctcgacggctcgcggcccggcatctatttcatcaacctgcgcgacacgttcgaccggcccaaattcggcctcgccaccctgtcgcaccatgaggcggtgccgggtcatcacatgcaggtgatgctggcgatggaatcgaccgaaatcccgctgatccgccgccgcggctttttctccggctatggcgagggctgggcgctctacaccgagcagctggccgacgagatgggcatgttcgatggcgatccgctgggccgcgtcggctatctccagtccttcctgttccgcgcgactcgcctggtggtcgactccggcatgcacgtgaagcgctggagccgggagcaggcgaccgactggttcatggcgcataccggcattgcccgcggccgcagccagggcgagatcgaccgctatacgatccgtcccggccaggcgtgcagctacaagatcggacacaccgtctgggcccgcctgcgcgacgagaccagggcacggcagggcgaccgcttcgatctgaagcagttccacgacgtgctgaaactgggcgcgatgccgctcagcgtgctggagcgggtggtacgcgaacgctacgtgtgacgcgttcccctccccaaaagggaagggaatagcttcgcccgcttgcaatcgcgttccccattccgcaattgcgaagggctatggcgcagaaatggactcccgacagctggcgccggcacgaagcccgccagctcccgacctatcccgacgcggcggcgctggccgccgccgaggaggagctgcgccactatccgccgctagtcttcgccggggaggcgcgcgagctgaagcgcgacctggccgaggttgcggagggcaaggcgttcctgctccagggcggcgactgcgccgaaagcttcgccgagttccaccccaacaacatccgggacacgttccgcgtgatcctgcagatggcggtggtcctcaccttcgcctcgaagctgccggtggtgaaggtcggccggatggcgggccagttcgcgaaaccgcgctcggccgataccgaggaacagggcggcgtcgccctcccctcctatcgcggcgacaatgtcaacgacatcgcattcacgccggaggcgcgccgccccgacccgcagcgaatggtcaaggcttacagccagtcggcggcgacgctgaacctgctccgcgccttcgcccagggcggctatgcgaacctgcaccaggtccatcgctggacccacgacttcatgggccgcagcccttggacccggaaatatacagaccttgccgaccgcatcggcgaggcgctggacttcatggccgcctgcggcatcaacccggacacggtgccacagctgaagggcacgaccttctacaccagccacgaggcgctgctgcttccctacgagcaggcgctgacccggcaggacagcctgaccggcgattggtacgacacgtcggcgcacttcctctggatcggcgaccgcacccgtttcgacggctcggcccatgtcgagttcatgcgcgggatcggcaatccgatcggcatcaagtgcggaccgagcctcgagcccgacgcgctgctgcgcctgctcgacgcgctcaatccggcgcgcgaggccgggcgcgtcacgctgatcagccgctacggctatgacaagatcgaggcgggcctaccgccgctggtccgcgccgtgcgccgcgaaggccatccggtcgtctggagctgcgacccgatgcacggcaacgtcgtcaaggccgccaacggctacaagacgcggccgttcgagcggatcctggcggaagtgcgcggcttcttcgccgtccaccgcgccgaaggcagcttcggcggcggcatccattgcgagatgaccggccagaacgtgaccgaatgcaccggcggcgcggtcgccgtgaccgagcaggcgctggccgaccgctaccacacccattgcgacccgcgtctcaatgcggcgcagagcttggagctggccttcctgctcgccgaaatgctgaaccaggaactggccgagcggcgcaaggccgcggcctgacggtcaggcggcgctgggcggcgggggctccggccctctctcgtcccggaccggcagcggccggcgagggaacgggatcacgcgtgccggccgccgcggctccggtcgctgtgctcggtcgtcatcggccatcggcttctccattctcgaccgccagcacttccagggttgcgagacggccgtcgtcgcccggccagagcacggcctgccccgcctccagcccgatcagcccggcgccgagcaggctggtcacgtccagcccctcgcatccggtcgcggacgggtggcagagccgggcctggcccgccgctccccggccgtgccgataggcgacgcggctttcgagccgggcgacccgcggcggcagcccgggacgatcggtgacccgcgccagccgcaccttcttcagcagcaggtgcgcggcgacatcgtcctcggccgagagggcaagcgcgatcaggcagtgccgctcgcattcagccaggtggaacggcgtgtccttgtgcagggccgcccagagctcggcctggccatgcgcggcgagcgcaacgctctccagcatcgcaactctcctctcaacaaggccggggcctgaggccgcggcggatcgggacgcggcggcgcgtcttgcgcccggttcgcgtcacttgccccatcagcccgcggacgcgcgggaacacgcgcccttccagcgcgccgaaatcggggtccgaggcgaagaagcgaaagccgccctcgccacgcacggcgacgcccacgggccgacgctcgaactcgaccaggaaacgatctgacacattgcctccatcaccacgccctcggggagacggcggcaccgggccgcccgtcgggctccgcgagggaaaagagcgacccgatcgggccgcatcacggcgagccttggcccgcccggcgatcgaccccgggccgcgtccggctcagcgcgccgcgcggcccggggcaggcaggcgtgccgtgctgctcccggcatgcaattcgttgcgaaaagggcagaaattgcgggtcatcgttgatccaacatggctgcttcccgggggaagtcaagcagccggccgggagccgaaatgccgccggcgagttgctcttgccatgaagcctctcgccccgcttttgctggccgttctggccgcctgcagcgcccccgcgccctccgaacagaacgaagccgatccgctcgccgcgctggcttcgccggccgccagcccgacaccaccatcgagcccgacgcccgccgctcagccggtgcccctccccgaaggcgcgatcgacaaggacagcgcgcaaggcgccgcccaggtcgtccagacctatttcgcgctgatcgagtccggccgctacgaccaggccttggcgctctggtccgatggcgggcgcgccagcggcatggccgcggacgcattcgcccgaagcttcgccaaatatgccgaatatcatgccgagaccggcgcgccgggccgcatcgaaggcgctgccggctcgctctatgtcgacgtgccggtggtcgcctatggccggctcaagtcgggcgagccgttccggatgaaagggccggtgacgctgcgccgctgcaacgacgtgcccggctgcaccgcagagcagcgcgcatggcacatcgcctcgaccggattgaaaccggccccgaacgagtgacgccgctcagtgctgcgcggcgctgctgattccaccctcttcggtgaactcgatgcggatgcgcacccaggcgccgatcaccggcttgccgtcgatccgcggcgggcggaccaggaattgccacgcggcctgccggattgcccgcgcgaggcccgagcctggcggagagtcgccgagcgtccggcaattgtcgacatggtagcgttcgaccgtctggcaggcgatcatggcccagccaacgacgcggcccggcggcagataataggaaagttccgccgaagtcggttcgcgataccattcggcggcgtagaggcgggcgccgcctggaccttcgccgggtccataggcagcggcactgtcgcgaccttgatccgcggccgcggtatcggtcgcgctcgagcgtacctggcgaagatcgaaatgctccaaccccgggacgaggtacggcattgccggtgcaggcagcgggggcggcttctcgggcgacgcaggcggcgccttgccggcgcgctttacctcgccggcggcgcgccggggccgctcccccttcggcagatcgggcgagagctggaacgtgatcgggccgatctcctgcctgcggcgcacccagtccggcggcgacaacttcagcagcatcagcaacagcagcaggtggacgagcagcgtcagcaggagcgcaggcgcgcgccgtcgatcaagcgagcgatccggggccggcggaaaggcatacgcggaacgcatcgcgcctctcgcctagccgagccgcgacggtgcgacaaccggacggctttcgttcatccgcgcttcatcgcgcggggcacaggccttggcgcgtgacccagtttctccccgcgctcgcgctcgccctgatcgccaccgccgcatcggcccagaccgcggaaccgttcgattcctcccaggtccgtcgcctctctccggaggagaaggagcgcatcctcgccgacaacgagcgccgcgcgaaggaggcggagttcgacgccgccctcggcaacgcaaacccgcgcccgagcggcatccacggcgagatcggcggagtgatcggcaccggcggcacgcgcggcatcttcggcaccgcactcgtcccgctcggcgacagcggctcggcgatcttctcgttcgaggacttccgcaccggcacgctcgaccgccctaacgcaaggcgccgcgccgcgcccaaatgaaaagcgggggccgtagcccccgcctgatttggtgcagttcagactgcttgttaacagccggcctgcgatttctgaggcgcacaggttcgttcggccggccgcgattgtcaatacgccgtgcgttcacaccaacgcgcccacgcgatttgcctcgcgtgcggtttggggctaattgccctgccttttcggcaccgaaacgaaagcaatgcttacccttcgcccaacccgacgcaagctgctcggcctgcttggcgcagcgccgatcgcggcgacggccaagccggcccgggccgcgcggccaccggtgctgctgctcaagacgcgcgtgaatggcgaatgctattacgacgcggcgctggctatcggcggcttggcagtgggcgatcccgtccagcttcggcgcgagccgaccaatcgctatgacagccgtgcaatcgaggtgctcgaccgaaaaggtcgtaagctcggctacattgcgcgcgtcgacaactccgcggctgcgcgtctgatcgacgctggcgaggcactccgcgcgaccgtcgctcggctggacaagccgtcgctcgatatccgtatcgacgtggaatggctgccgggctgaaaacccgcgcttggtaatggcagaccccggactgcggttcgaccgaatcggcgactttgccgattgcctccgcctcccttcgctgcaaacatgagcgtgagggggtaagcacatgaggaggcttggactcgatatcggcaccaacagcatcggctggtgcctgatcgaagacgacgcgcggatcgtcgacatcggcgtccgcatcttcagcgacgggcgcgatccgaagtccggcgcttcgctcgcggtcgaccgtcgggcggcgcgagccatgcggcggcggcgggatcggtatctcgggcggcgcgcggccttcctgaaggcactgaagcgccacggcctgatgccggcggacgagagcgcggcgaagttgctcgccgatcgcgacccctatgagctccgcgcccgcgcgctctacgagcggctggagccgtacgagatcgggcgcgcgctgtttcacctgaaccagcgccgcgggttcaaatcgaaccgcaaagcggagcgcaagaccaaggatgccgaggacggcaagatcgccagcggagcgaaggcgctcgaccaggccatggccgaagagggcgccgaaacgctgggccagtttctcgccggccgcgacaccaagcgtgttcgcatgggcagcgatgcgcagggctatgatttctatccgcagcgccggcatgtcggatatgagttcgagacaatctgggagcgtcagaagccgcaccacccggccctgctcaccgacgaagcgcacaagcaactccacgacaccctgttcttccagcgaccgctgaaggaacaggaagtcggcgtctgcaccttcgtgcacaacgaacgccggctaccgaaggcacatccgctgttccaggaacgccgcctctacgaagaggtcaaccagctggagatcaccacgcccggtgcgcccaatcgcaagctgaggatgggcgaacgcgacgcgctgatcctcgaactgcgcagccgcagggaacggagcttcgatgcgcttgccaagcggctgaagctggagccggggcagagcttcaacaaggcgagcgagagccgaaccgatctgaagggcgatgaagtctatgccgtgatggcggacaagaagcgcttcggcggtcgctggccgcacctcgaccgcgaccgacaatggtcgatcatcgagcggatcatcgacgaggaagacccggacaagctccacgctttcctgaccggcgaatgcggactgacgcacgaccaagccgtcgcaactgccagggcgccgctaccggagctttacgggcggctcggcccaaccgccaccgcacggattctggatgagctgaagaaaggcgtcgtcacctatgacgaggcggtgaagcgggccggatggcatcattccgacgatcgcaccggcgaaatcctgccccagctcccctattatggcgagctgctgacccgcgagattccgcccggcacgcaggacccgaacgacccgcccgaacagcgctggggcaagatcaccaaccccaccgtccatatcggcctccgccagctcgaaaagctggtgaacgcgatcatcaaggtctacggccgcccggaccagatcgttgtcgaactcgcccgcgaactgaagctgaacgagaaggacaaggaagagcataaccgccgcatccgccgagacaccgcggcggcgcagctccgctcctccaagctgcagagcgaaggcatccctgacacgggcgccaaccgcatgctgctgcgcatgtgggaagagctgaacccgaacgaagtgctcgaccgccgctgcccctattgcggcgagcaggtaggcatgcggatgctgttcaccggcgaggcggatatcgaccacatcattccctattcccgctcgctcgacgacagcaccggcaacaaggtggtcgcgcatcgcaactgcaaccgcgtcaagggcaaccgtacgccttacgagaaatggggccacgatcccggccgatgggagatcatctccactcaggtcgcgcggctgcacaaatcgaagcaatggcgcttcgggccggacgcaatggcgcgggtggaaaaggatggcggcttcatcgcccgccagctcaccgacacgcaatatctgtcgcgactggctgggcgttatctgtccagcctctatccgaccaaggacgacggcagcgtctatgtgatccccggccggatgacggccatgctgcgccgcctttggggactcaacagcctgttgccggaccataacttcgtcgagaaccagcatagcaacgcgccgaagaatcggctcgatcatcgccaccatgcgatcgacgcagcagtggtggcagtcacgacgcgcggcctgctgcaggaaatcgcccacgtggccggcagggccgaggacaaggacctcgatcgcctgttcgaggacttgccgcagccgtgggacggcttccgcgaagaacttggggaacgcctcgcccgcgtgaccgtcagccataagcccgatcacggacgcaaaggcgtgccgcccaaggatcgcgatgtgacggccggccggctccacaacgacaccgcctatggcctgactggcgatgttgcgaccgacgggaggacaccgatcgtcgtgcaccgcgtcccattgatgagcatcaagcccgccgatatctccgatccggatcggattcccgatcccacccttcgcgcagcactgcatcgggccaccgatggtctgagcggcaaggcctatgaagcggccctcgctggcttcgcgaaaacccatccgcaattcgccggcatccgtcgcgttcgcgttcgcgaacctcttaacgtgatccggatccacgataggaacggcaagccgtacaaggcctacaaaggcgatgcgaatgcccgctacgatgtctggcaaatgccgaacggcaagtggatgcacgacatcgtctcgatgttcgacgcgcatcagcggccgcatgagctcacggaagaggagaaggcggcaggcaaaaaggtgcaaccgaagcgaccgcatcctgccgccaagaaggtcttgagccttcgtcagaacgatatgcttgcgatcgagcgtaacggcggcgcgccggagatcgtgcgcgtggtcaagttctcgaccatcggagcgatcgcactggccctccaccaggaaggcggcgcgctcaaggcccgcgatgccgccccatcagaggtggacccgttcaaatatatctattcctctggcggcggactgaagaacctgaaagcccgtcaagtgcggattgatccattagggaggattttcgatcccggcccgcgctgacaaagggcgctgatttccatagcttccccagaagggggagcatggaccgcatcgtcgacatcgccaccgacggccggcatctggcgctgtttcgcggcttcatggttgtgaagcaggacggcgaggaaatcggccgcgtcgcgctcgacgatatccacgcgctgatcgtccacgcgcacggcaccacctggagcgcgaacctggtcgccgccctcgccgagcgcggcgcgccaatcgtcttttgcggcacgaaccacagcccggtcgcggttacgctgccgctggaagggcaccatgcgcagggcgcccgaatccaggcgcagtggaacgcctcgcgcccgctcgccaagcagttgtggcggctggtggtggtcgcgaaggtccgaacccaggcgtcgctgctggaagcgcgcggcgtgcgcgaggccgaggcgctgcaattcctcgcccgccgcgtccgctccggcgacccggacaatatcgaggcgcaggccgcgaagcgctattggccgctgctgatggggcgggatttccggcgcgatcgcgaccaggacggcgcgaacgccctgctgaactatggctatgccgtcatgcgcgcgtccgtcgctcgcgccgtcgtcgcggccggtctgcacccgacgatcggcgttcaccacgccaatcgcggcaacgccttcgcgctcgcggacgacctggtcgagccgtttcggccgctggtcgacgcgctggtttgcggcatggtgcaggacggcgtgacggccctcgatcccgccgccaagcgccgtttcgcgcgcctgatcgctttcgatctgcgcgtcgagggcgaggcctcgcccgtctccatggcggcggcacgactcgcccagtcgctcgcccgcagcttcgaaaccggcgcgcccgcgctggcactgttcgacccgccaagcccgatcgaatgggggagcctcccgcgctcgaccctggccgaggccgcatgaatgcccggccggccagctatctcagcgggtaccggctgatgtggattttcgtgatgttcgacctgccggtcggcaccaagaaacagatgcgggaagccaccaaattccgtgagttcctgctcgacgagggcttcgaaatgagccagttttccgtctatgcccgcttctgcaacggccaggacagctttcaggcgcacctcaagcgcatcgaacgcaacctacccgaaaagggcgacatccacgtcctcaccttcaccgaccggcagtatgagaatatcgtccgattctcgagccagcgccgcaggaagcagcgcaaaaaccctgatcagctggcgatgttttgaaatgggggggcatttttgctggaccggatgtgtcgctttgtcattccagaagaacgacttagcgacacacccggcctagcagctcagaaatcgcaggccaaccgcaaccgtaggtggccgttcccatcgctccccaaaggcctagcagctcagaaatcgcaggccaaccgcaacgcaatcgaggtcgcccgcgtcgaggtcgagggcctagcagctcagaaatcgcaggccaaccgcaacggctcgagcgatgacgagaaatcgccatcgggcctagcagctcagaaatcgcaggccaaccgcaactgccgcagccgtcgtggctgcgctggctctggcctagcagctcagaaatcgcaggccaaccgcaacccggcggagaagaagacgcgccctcgcaggggcctagcagctcagaaatcgcaggccaaccgcaacacaggcatctggcacgcgaagcgcgggaagggcctagcagctcagaaatcgcaggccaaccgcaaccgcccgccgcactggcaatcgccgacctgcggcctagcagctcagaaatcgcaggccaaccgcaactcgccgtgggtatagtcgtacacctcgatcggcctagcagctcagaaatcgcaggccaaccgcaacgattggctggttgacgccttccgcgacgacggcctagcagctcagaaatcgcaggccaaccgcaaccgatacgctcggcagcatgcccgacccgatggcctagcagctcagaaatcgcaggccaaccgcaacgtgcgcgtctcacggctctggtccacataggcctagcagcccagaaatcgcaggccaaccgcaacgggttcttcggcccgggcgagccgggacgaagaacccgtggcgctgccgcgccggctcggcatgggcttggtcgccgcttcgggtcagccgaggattgccgtgagcatcgctgccagatcggcgtggcggaagggctttgcgaggcggggcaggtcggcgtcgatgccgcccgcgtcggcatagccggaaatgatcagcaccggggtgcctgcaccgcgcgcgcggatcgtccgtgcgagttcggcgcccgtcatgcccggcatcaggtgatcggtgacgaccagatcgacggcaaggccgccggccaggcgcgccgccgcttcgtcggccgattccagcgcgatgacggtaaatcccagatcctccagcatctcggcggtcgaagcgcggacgagcggctcgtcgtcgaccagcagcgcggtgccggcgcccgctatcgcgcgcggcgactgggcctgcgcggccgcagccggaagagccgccgcgcagggcagccaaagctgcacctccgtgccctgcccgggcgcgctcctcagccgcagggcgccgcccaactgcgcggcgagcccgtgcaccattgacaggccaaggccggtgccgcgcccgatccccttggtcgagaagaagggctcgatcgcgcgcgcggccaccgcttcgtccatgccgcaaccggtgtccgcgaccgacagacgcacataattgccgggcgcgaggtcctccgcctcctcacccgcctgctcgaccgcggcggcgatgcggagagtgccgccgtccggcatcgcgtcgcgcgcgttcacgctcaggttcagcagcgccatctcgacctggttcggatcggccaggcacggcggcaggccggcgggaacgtccagctcgagccggatgcgcgggcccacggtcgatccgatcagctcggccatgccttcgatcagccgcccggcatcgacgggcgccggctgcagcggctggcggcgcgcaaaggcaagcaggcgctgcaccagcgtcttcgcgcgctccgccgcctgcaaggccgacgcgaccgtctgctgcgcgcgcgggtcgccgatgccgcggcgctgcatcaggtcgaggccgccgatgatcggcgacagaagattgttgaaatcatgggcgacgccgccggtcagctggcccattgcctcaaccttctgcgcctgccgcagcgcctcctcagtgcgcttgcggccggtcacgtcgacgatcgcggccatggtccggacgaaccggccctcactgtcatgccatggccgcgaggagacgagcacatccgcgatctcaccgtcgcgcttgacgacgcggtattcggaatccctgacctcgcgtcccgccagcagggccgcccaatcatgctccaggaatcgctcgccgctgcctggcgccgcgaaatcgagcgaggggcggccgatcacctggtcgcggctgtcgaagcccatgaactccaaccatcggtcggaaacgctgacgagccgcccctcggcatcctgcgactgcaggatcgtcggcgtcttgttgtacagggcttccagctcggcggtgcgttcggcgacctgtcgctgcaacgccagctcggcttccttggcgatggtgatatcgaaagccacgccgataaagccggtatgttcgccggcggtgccccagcgcggctgggaataggagcggatccagcaatagtccccgtcggccttacggtagcgtgcctccagcgcgaacggctgaagggcagcctccttctccacctgctccttgaggatccggccgatatcgtcggggtggatgatgccgcgccagtcgaatacgagcgcatcctcatagctcacgcccagaaaatcgacataggctcggttgacgaaccagcgcgtgcgatcgatcgacgtgacccacatcggcaccggcgcggaatcggcgatcaggcggaaccgcgcttcgctctcgcgcaccgtgcgctcggcacgccggccttcggtcacgtcgttgaacacgatcgcgatgccgccgcccggcagcggcgatgccgtcagggacacgtcacggtcgggaaaggcagttgattccgcttcgaaggatattgtctcgcctgccgcggcgcgacggaagttcgtctcaaatgcggtgcccgcgacggtcgggatcgcatcccagaacaggcgcccgagcatctcggcgcggtcgcaggcgaagaacgcctcggcggcgcgattgaagcttcggatgcgccagtcgcgatcgacgatgcaatagccttcgggaacggcatcgaggatcgcgtccagccggatgccggaggcgtcctcgccgccaatcgcgctgtcgccaccccggtgcatgtgcttcacctaacccgcttttccgatgggagtaagccgcttgtgcggctaacggcgctgcatgtcccgcgcttccggcgggatgcggacggtcagctggtcgagcagttcggtcaggtagatctggcaagcgagccggctgtgccgggtggcgcccgcggcaaggtccagcatgtcctcctccggctcggatgcgggcggcagcttcgcgaaatcggccgcgtcgacgatcacgtggcaggtcgaacaggccatctggccttcgcacgtgccttcgagcggctggccatcggcctgggcgacatcgagcagccgctcgcccggcgcggcatcgacctcgcggacggtcgccccgtctgcgctcacgaaccggacccgcgtcacgcggccttcagcccctgtgcggctgccgcttccaggaccaggtcgagcgcgcggtccagttcatcctcggtcgtatagcggccaaagccgaggcggatgctcgaccgcgcctcggcatccgacaagtcgatcgccttcagtacatggctggggcgaccggagccgctggcgcaggccgaaccggccgagaaggcgacggtgcgcacgtcggagatcaggcgcgccgcgtcgaggccatcggcgcggacgttcagattgccgcggtagcgatgctcggtcgaaccgttgatcgtccagccgcgcagcttcgcggtgccaagggaccagagccgatcgatatgcgcggcatcctgatcgtaccgcttttgcgcaagcgcggctgccgcgccgaagcccgagcacagcgccgagctgagcgtccccgatcggatgcccgcttcctgcgcgccgccgtgcatcagcggctccagcgcgacgccatcgcgcacccacagggcaccgatgcctttcggaccgaacagcttgtgagccgaaaccgcgatcaggtcggcatccggcaaggccgttcgcccgagcccctgcaccgcgtcacagaagaacagcgcccctgcctcgcgcgcgatgcggccgatctcggccaccggctggatcacgccgatctcgttgttgaccagcatcgccgccacgatcgcggtgcggtcgtcgaccgactgacgcacgctatccaggtccaccagcccctcgcggccgaccggcagcacctccgcttcgaagccgtggctgcccagccagagcaccgtatcgagcacgcaggcgtgctcggtcgcgagcgtgacgatcttgcggcgggcggcgggtgcggcccaggcggcgcctttcagcgcgaggttggcggcttcggtcgcgccggaggtgaagacaacatgcccttgccgaagccccagcaatgacgaaagctgatcgcgagccaccgcgaccgccgccttcgcttcccggcccatccggtggggcgaatggggattgccgaacttctcgtccagccagggctccatcgcggcgcgggcttcgggcgcgagcggggtggtcgcctgatagtccagatagatcggggtcatcaggctgcccggctgcgggcactttccgcgatccgtttccaggcctccacgaagcggtagatgtcggcgcggctcgtctccgggccgaagctggcgcggatcacctgccctgcctctgcctcgccccagcccatggcggaaagaacgtggctggtcttcagcgtcccggacgagcaggcgctgccggccgagatcgcgatgccggcgaggtcgagctggatcagctgcgccgacgcagcgacgcccggcatccgataggcgccgatcgtggccagccggggcgaacgcctggccacgacctcgccgcccgcggcctcgatcgcgccgtcaaggtgcgcgcgcaggtcggcggcgcggtcgacccagccgcggccttcctccagcgccgcggccatcgcgacgacgcccggcaggttctcggtgccggcgcgatagcccttttcctgcccgccgctcgcttccagcacgcccagatcgcggaccagcagcgcccccacaccgggcggccccccgaatttgtgcgcggagatcgcgatcagatcagcatcgggcagcggcgccttgccggcgctctgggcgcaatcggcgaacaacaggccccccgccttgcggacgatcggcgccagccggtcgagcggctggcagacgccggtttcgttgttgacggactggatcgcgaccaacggcgccttggccccgagcgcgcccaaccggccggtgagcgcatcgggcagcaccgtcccgtcctgctgcaccggcaggaagaaggcgtcgctggcgacacggtgaaccgcctcgtgctcgaccgccgagacgaggcgcgcgtcgcaccgggtccgggtcagcgcgatgcggatcgcttcgctggcgccgctggtcaggatgatgtctccctcccagccgagcgccttggcgatccgggcgcgggcatcctccagcatcgcccgcgccgcccgtccttcggcatggggggacgacggattggcccagcgcgcgatcgccgcgcgcatcgcctcgcgtgcggcaagcaccatcggcgtggtcgcggcgtggtcgagatagagacgctggctcaactgttgcggactcgtttgcgaaattgcgcggcaatcctatatagcgccgcaactcagcgccacctttccgggcgcattttcgatcaaggtgctatgcccgaagtgatttttcccggcccggagggccgcctcgagggtcgtttcgctcccccgccccgcccccgcgcgccggtcgcgatgatcctgcacccgcatccgcaggcgatggggacgatgaacaaccgcatcgtgcaggcgctgtaccagaccttcgcgcgtcgcggcttcgcgaccctgcggttcaatttccgcggcgtcggcaagagccagggcacgttcgacaacggcgtcggcgagctgtcggacgccgccgccgcgctcgactgggtgcagagcttccatcccgaggcgcagcagacctgggtcgccggcgtcagcttcggcgcgtggatcggcatgcagcttctgatgcggcggcccgaggtgcgcggcttcatctcgatcgcgccgccggcgaacatgtacgatttcagcttcctcgcgccctgcccagcctccggcatcatcgtgcagggcgaggccgacgaagtggtgacgccgtcggccgtgcagaagctggtcgacaagctacgcacgcagaagcacatcaccatccaccacgacaccatcccgggcgcgaaccacttcttcgaacatgagatgccgcagctgatgggcagcgtggaccggtatctcgacttccggctggatccgagctgcccgatccggtgagcctgcggggaggcgcgtcatggccgatcgcgaaaagctgctgctggacctgttcaccgagatcgcggtggtcgagcacctggtgcgcaaccatctcggcacgatcgaggtctccggcctgaccgccggccagttcggcgcgctcaattacttcatccgcaacaaccgccagcaggagcgcaagtcgatcctcgcttggatgttccaggtcacggtcgaggagatggacgtgcatctgggcgcgctggagcagctgggcctggtcggccggatcggcgaaggcgacgggcagatcgtcggcatcaccgcggccggccgttccgcccacgccgcggcagtggcccggatggcgccggagatcgaaccgctgatgtccgagttcgccgacgaagacctggcacggaccgtcgaggtgctccaggagatccgtcgcgtgttcgacaacctgccggagcgcgccgcggcctccgcctgagcggaaggttaggaaggttcggcgtgcggcaaaaatccgctctatcaatccaagccgattgatcgatccgctcgatcaacagcgcgtgcgtgcgtcctgtcgcgaatccgaacattccgggaacatcgcacatcggacccggtgtaggacagctaaatcgtccagatcaggacgttgccgaccagcacggcggtcatcaccagcatcagccagccgcgccgttccttgcggcgaagttgcgcgatgccgccgaacgccagcgcgacggcggcaagcatcaggacggacaatatccagggcggcgggccggtcatgcagtcccgatagcaaccgcgcgcttgcgccgcgagcccgcgcgcttgcggccgcgctcggtccagaagctccagaccgcgaagctgccgagcatcgtcagcgtcaggcccgccagcgtaatcagcaggcgatacagcgtcccgccgatcttgcccgagtggagcggataggccttgttgaaccattgcgcgccggtcggcatggcaagcgcgtcgcgagccgcgacgatccggccggtcgcgggatcgacccacacgccggtgcggccgttgggcagccactccgcgcggcgcttgagccggatcgagacgagatcgccgggctttttgggaagcgcgatgacgcgcagctccgcatcgggatagcgggccagcgcttcaggcacgatccggcgccagtcgagcgccgcgcgatcgatcgcgccgcctttgactttcgggggagcaagggtcgcggcgacctcgccgggcggcgagatcgggcgcagcaccagctcggcgaacgggcggaacaccatcatcgtgccggtcgtcatcgagagcagcaacagcggcgccatcaccatgccgagatcgcggtggtgagtgacgatcgccgggcggctcatccgctttgggaccaggcggaagcggaaggtgcgccgcgtccgccaccagagcaggatgccggtcacgacgaagccgatcccgatcaggccggcgatcccggcgatcgtctcgccggtctcgccactgaacaggtaatgatggaaatcgaacagccacagctccggccggccccacaccgagtcccagcgcgcaacgacttggccggcctggtcgaaataggcgccgcgctcaccgaagttcacgcgattgaggccgaagctgtcgctcgcgaacaggaccgaggccggcgcttccgccatcaggcgcgcggtcaggtcacccagcgccgccgggtcggtcacccgcgcgtccgccgctccaggcagcgtccagcgcagccaggcgtccttccacagcaggatcgtcccgctcagcccgagcagcgccagcagcaggccgatcaggccgcccgtccagcggtggagcaggtcgatccagcgcatcagaagcgataatcccagccaagggtgaaggtgcggccgcggccggcgaagaagcgcgagcggtcgcccgcacgagtcgtgtcgctgctatagtcgatatattgccggtcgaagaggttctggacggcgaaggtcagctgccccaggccggtatcatagcccagataggcgtcggcgaccgcatagccttcgaagtcattttcgggcacgcgcaccttccccgtgaagctgcggccgagatagaattgggtctgcagccgcgccgtgaacggcccgcgcgcatagcttgcggcca

SEQ ID NO: 3492 - DNA, 23180 bp, synthetic construct
  misc_feature 1..23180: note = Synthetic
  source 1..23180: mol_type = other DNA
gctattcaaacaagcatcatgatgagcaaattgggccgccattataaacgagccgattaccagacaatgcggatattgacttgcgctgtcaagattgcaatgaacggtatatgcggcgacaagcatccattggcctgtggggagtaggattgatatgaacgggaacgggaccccgcgcgcaaccatgatggatgtcgcccgaaaggccggcgtttcgctcaaaagcgtttcccgcgtcatcaatggtgaagatcatgtctcgcaaaaattacgggacaaagtgaaaacagcgatagaggcgatgggctatgtgccggatgtggccgcccggtctttggcagggaatcgcaatttcactattggcttgctgtttgataacccatctgccaattatcggatgaaaatacaggcgggcgcttatgaagcatgccgtaatgcaggctatcatctacggatagacagcctgagcgcacaggccgaaggagccgatttggaacagcaaatcgccgctgttgtgcgccagaatcgatgcgacgggctggtactgacaccgcccctgaccgataatctgcaaatattggatatattggaacgcagccaaattccatatgttcgcatcgccccggtgctggcccccgggcggtcaaaagccgtagaaatggatgattatcaggcgggctgtgatgttgcgcggatgctccatgccttggggcatcgccatttcgcggtcattaacggcccgctttatcatggccgggcaggctatcgccgcaacggctttgtcgaaaccttccggtctttatgtcccgatgccgaaataatggaagagccgggcgatttcactttttacagtgggatgatcgcgggaaagaaaattcttagccgctccaatgggccgattgcgatatttgcgactaatgatgacatggcggcaggtgcgctcaatgctgcgcagcaaatgggccttcgtgtgccagaggatgtttctgtttgcggtttcgatgatggtatcatcgccatgaccgtctggccttatcttaccaccattcatcagcctattgccgaaatggccgaggttgccgttcagatgttgattgactgggctgataaagaacccagcctacgtcatattgattatcatatggtagagcgtgattccgtcgccgcgcccggcgaaaacagtaatagcatatcatcgcagccataacatagcagagacagggcgatagcaccctgccccaaccattcccacaggagaaacaggatgcccgatacgtcaccagccagaaagccatcaaaagcaaaaatgacagcgctgtttattgcaacatcattgggggcaacaatggtcgcagaaaatgctcaggcatcctctgatgctccgacacagcagatcatattaggcagcaaacataaacctgtcattaaacaggatggtctgtcctttcgtgatctggatggcgacggcaaactctccccttttgaggactggcgcctccctgccaatcgccgttcagcggatcttgtcacacggatgacgctggaggaaaaagcaggcgcgctgctgcatggcacattgccgggcaatgtcggtcgttttaacgggacggataccgcttatgatcttgctgctgtcgataaaagcttaaatagtcagcatgtcaccagctatatcagccgcctgaacattgccccacaattgctagccgagcaaaataatgcagtgcaggaagttgcggaaaaaagccgcctttctattcccgtcaccatcagcaccgacccgcgcaaccattttcaatatgttctgggtgcgagcgaagtgggcggtggtttctcgcaatggccggaattgctggggtttgcagctattggcgatcgtgatctggtacgccgctttgccgatatggcgcggcaggaatatcgcgccgtgggtattcacatgaccctgtcaccgcaggcagaccttgccacagaaccacaatggccgcgtcaggcgggtacttttggtagtgattccgccctcaccagcgcactggccgggggctatgtggaagggtttcagggcggagccaatggcctgacccccaatggcgttatcagcgtcattaagcatttcgcgggctatggcgctcagccagatggttgggacgggcataatcattatggccgctttgctgatctcgataacacatcctttgccaatcatgtggcggcctttgacggtgcgttcaaggtgaaggtggcgggggtaatgcccgcttacccgatattgcgcggcgtcactgtaaacggaaaaccgctggagccggttggggcaggctatagcaagctgttgctgacggatgtgctgcgcggtcagcttggctataagggaattatcctttctgactgggccattacccgcgactgcaccgaagaatgcatcaacccaacggcggaaaaaccgcaattaccgcaatatatcgcaacatcctggggcgttgaacatctgagcgaaacggagcgctatgcgctggcaatggatgcgggcatggatcagtttggcggtgtagacgaccccaaaccgattttagacgccgtagccgctggcaagctgaccgaagatcgtatcaacgcctctgtcgcgcgaataatgaccagcaaatttgaactgggcctgtttgataatccctatgtcgatccggcaaaggccgcaaccatattgggcaatgccgattttgcacgggttgcagcagatacacaacgccgatcacagattgagctaaagcgttctgccaaagtatctgccagtaacctgacaggcaaaaaggtttatctttacggtgttgatgcaaaggcggcggaagctgctggcctgacggttgtatcctcccccaaacaagccgatttcgccattatccgcaccgaaaccgcgtctgaaatgctgcacccccatcatttctttggccagcgccagaaggaaggaaggctggattatcgcaagggtgacgccccttatgatgaaatgctgaaagccgcaaagcatgtgccggtcgtcgtatcgatcttccttgaccggcccgccatcctcaccaacatcattggcaaagtggatggcattattgccaatttcggcgcgagtgatgacgcggtgctggacgtcgtccttggcaaggcgcaggcgcagggcagactgcccttcgaacttccctcctccatgcaggaagtgaaactacaaaaacctggcatgcccgatgacacgaaaaacccgttattcccgcgtggctgggcggcgggtgatccggtccgttactgacggaatataggctgcgccctgaaatgagggcgcagccattccaccagagcgccaaagatcaccagagcgtcagcagccaccaaagcatcagagggacgccgcaaaaaggggacttaacgcccccttttccaatatatgcctctgtcaatcaggatgagccgtcaggccaccagagcagcagccttgtgtgccatatcggtgatcgcagcaacatcgggctgccccttaggtacgagccagcttccgcccacgcacagcacctgctttaatgccagccattccggtgcgttatcctgcgtaatcccaccggtgggacagagtttaatatcagcaaaaggaccggtcagcgcctttagcgcgggaacgccaccgctggtggctgccgggaagaatttgaaatgcccaaggccaaggtccagcccgcgcatgatgtcacccgcattggcgacaccgggcaggaatggcactttacgctctatcgctgcccggcccaacccgtcggtcagccccggtgaaacgatgaaccgcgccccggcttccattgcctgatcgagctgcgcctcattcaacacagtccctgcgccgacaaccgccccttcaacctttgccatctcggcaatcgcctccagcgccgccggggtacgcaatgtcacctccagcgcgaacaagccgcccgctacgagggcctccgccaccgggcgggcatgggccgcatcttctatcacaatcaccggaacgaccggtgccagacgcatgatagtttcaatgctcatgaagatgctcctgtgcaaaagccgccgccgcgcccaacaggccgggttgcggatgggtaatgagccgaaccggcagacggttcatcattgcttcaaagcggcccttggcggtaaaacgttcctgaaaaccggaatggggaagatggttcgccagtcgatagcccaaaccacccgcgatgaccatggcagacgcgccctgaaccaatgcgacatcccccgcaactgaaccaaggctaaggcagaaacgatccagagccgccaccgccaatgcgtcactgccatccagcgccgccgcccacaatgccttatcatccggcagcgtgatggcacggccttctatcgccgccagcgtttcataaatattcacgaggccggggccggagaggatacgttccaccgatacgcgccggaaacgcgggcgcagccgtcgggcaatggcatcttcgatactatcgagcggcgcaaattcgatatgcccgccttcactgggcagcacatgataatccgccccgccagcccccgccccggtgcgcaggagaccaccaacaccaaggcccgttccgggaccgacaatgccaatcacccctttatctggcaaaggcacatccggcccgcagatatgatgcaaatggccctcctccacctgcgcaacggcatgggccacggccgcaaaatcattaacgaggctgaggcggtccacgcccagttgttcaggcaggcgggcggggtgaatgacccacgggttgttagtgagcttcagcacatctccgctgatcgggcaggcaacgcagattgccgcagcccgtggcaaaggccgtccggcttcctcgccaaaatgctcccacgccagttgaaagctggcatgtcccgccgtcttcagcgtgacttcaggactgagggagagaatctgaccgccttcaattgtagcaatagcaaaacgagtatgagttccgccaatatcgacggcaacgatttctgtcataaatgggcctctgccagcaggggactggccccttgttccgcgctatcggcggatttgcgcattaatgcgaataattcacggcccataccaaaggccggtgcaggtggcgtagcgggttcccgcgcctgccatatggcatcgtccaccagcacatcaaggctgccatgctcagcgcataggcgaaccatatcgccatcgcgcagccgggcaatcgggccgtcattggcggcctccgggctgacatggatggcggcaggaaccttgccggatgcgccggacatacgcccatcggtaacaagcgcaacgcggaaacccttgtcctgaagcacacccaaaggcggcgttagtttgtggagttccggcatgccattagcgcgcggcccctgaaaccgcaccacgacaatgacgtcgcggtccagctcccctgccttgaacgcggccagcacctcattctgatcggcaaagacgcgcacgggcgcctcgatcgtccagcgatctggcgcaaccgcactgtttttaaaggtcgcccgccccagattgccctgcaccagacgcatgccgccattgggctgaaacgggcgggaaacaggccgcagcatatcctcattgcgggactgcgtaaccggctcactccaccgtaattcatcgtcgatcaattgcggggcgcgggcataatcgcccatatccctgccacctacggttataatatcccggtgcagcaatccggcgtccagtaatgccgatatggtaaaggccatgccgcctgcggcctcaaactcattcacatcaccggggccattgggatagacattggcgatgagcggcacggcggaggacagccggtcgagatcttcccaatcaatgatgatccccgccgcacgcgctatggcgggcaaatgaatggcatgattggtagagccaccggtggccagcaggccaatggcagcgttcacaatcgccttttcatcaacacagtggccgatggggcgataatcatcaccgcgatccccaatggcagcaagacgatgcacggcagcgcgggtcagttcctgccgcaatttcgtgccgggcatcacaaaggcactgcccggcatatggaggcccatcatctccatcatcatctgattgctattggcagtgccgtaaaaggtgcaggtgcccggcgcatgatagctcgcgctttccgacgccagcaactcatcgcggctcgccttgccctcggcatagcgttggcggacctccaccttctgcttattggggatacccgatggcatcgggccggaggggatcagcagcatcggcaaatgaccgaaacgcagtgcccccatcagcaatccgggcacgatcttgtcgcaaataccgaggagcgccgcaccctcaaacatcgcatggctcagcgcaacggcagtggatagtgcgatggtatcacgagagaaaagcgacagttccatgccgctctgcccctgtgtgacaccatcgcacatcgcaggcacgccgccggcaacctgtgcagtggcaccgacttcgcgcgcgaatatctttatctgttccgggtaacggccataaggctgatgcgcagacagcatatcattataggcagtgacgatgccgatattcatcgcccgcccgctttggatgacaggtttatccccctcagcggctgcaaaaccatgggcgagattgccgcaggagaggctgggacggtgaacgccattttcgcgctctcgccggataaggtcgagatagaccgtgcgcgatgatgcgctgcggctgatgatacggtccgttaccgcagatatgacagggtggagggccgtcatgactgactccaataaatatggggggtattatgggcggaggaaagaacgcggccaacgggaaaggtggaggcagatccttccgcaagggcgcggtccagcacctcgcgcttttcattgccagagagggtgaggaggatatgctttgccgttatgattgcgccgcgcgtcagggtgatgcgcgctaccggcgcctctggcggtaaaggatcaggcagcacggaaacggcgcgaggaccagtatcggcaagcgcagcatcatagtccggccccggaaagatggaggcagtgtgaccatccgttcccatgcccagccagaccagatcaagcggccagttgagcgcggaaagacgcgcctctgcgctggccgcaacggcggtgcgatcctccgaaacgctatcgaccaatgttataatctgcgcgcctgtcccaccaaagtgacgccgcaacagcgcaacattggaaagcgggctatcctctgccacaatacgatcatctgccggaaaaagcgtgaccttgccccagtcaatatcggcctcgcctgcatctacccgcgccagtgcctcaaacaccgccaccggggatcgtccgcccggcagcgccagcaccgcacgccccctatccgcaatggcagcatggataacatccgccacaaacgtcgcgacatcccgcgccatatcatcggcgcggccatattcatgcaattggggcgcgtttcggggcttattcatgccaactcaccccatcgcgttccaccagcgcaatcgccgctgatggcccccatgtaccagcagtataagagcgcagcgccatatccgtcgcctgccagccatcgcggatcgcatcaatccatgcccattgcgcctccacctcatcccggcggacgaacaatgtcggatcgccctcaatcaggtccagcatcaggcgctcataagcgatacggcggcgtgtatcggcaaaggcattgggcatatcaatgtccagcggcacttcgcgcaggcgtataccgtcacgatccaaccccggctgcttcgccatcatcaacaggcgaatattctcctccggctgaaggcggataatcagccggttagcttgcaaggtcgccccggcaccaaagatgctatgaggcaccgccttgaactgaatgattatttctgaacaccgcttgggcaaccgcttacccgtgcgcatgtagaagggaacacccttccaccgccaattgtcgacatgggcctttaacgcgacaaaggtttcggtggcagaactgcgccccaactcatcggtatagcccggcaccggctgtcccgcgaccgccccggcctcatattggccaatgacgctgtgggtcgcgacgctcgcccggtcaatcgcacgcaaggaacgcagcaccttcaccttctcatcacgcaccgatgtagcatcaaagcgcgcaggcggctccatcgccacaagcgcgagaagttgcagcatatggttctgcaccatatcccgcaaagcccccagatcctcataataagaggtccgcccctccagaccgacggtttccgcaaccgtgatctctacatggtcaatgccagacgcattccacaaaggctcaaacaacatattgccaaagcgcagggcgagcaggttctgcaccgtttccttgcccagataatgatctatgcggaaaatgcgctgttccggaaaagcggcctgcaccgcatcattaatcgcccgcgaagaggccagatcatgccccaatggcttttcgagcgcgaggcggctctgcggccctgcaaggcccgatgcagcaaggccggtaatcgtactttcaaacaaggaaggggcggttgagaggaagatggagaggttctgcgcctttgcccctacatgctgcgccaatggcgcaaaattatcggggttgctcgcgtccagcgatacatagctgaggcggcccagaaaccgctgcaccacatcatcagggcggcgctctacctctatgaaacgagacagcgcatcggcggcgacggcgcgaaaaccctcatcatccttcgcgctgcgggcagtgccgataatctggaaatcagggggcagcaggccatcactatccagcccaaataatgacggtaacaacatgcgttgcgacagatcacccgtcgcaccaaacagcaatatagcgccggatttcgtcactccccctgccgactggccacccccgccaacagacgataatgaatgcccggcaatatcctctaccttattcattccactcatgcctgacccctcaacttcattatctagacattaaagacaacgttgtcaatttccgttcccccccatgtcgggctaacttcatctatgaaatctccccatcatgccagccttccttcatggagacatacataatgaagcggcatctgcatcattttgtgcggcgcactgacgtgatgctgtgacaaaaacatgacatcagcaaggcaattccaatcgcccctccccctatccagtggacacatatttaaaatcagggggaagcatgagataaattggcgcgaagggataccgcgatcatagcacgcagccatgaatctatatccctctggcctcaactccttacgggggcaaaaatgccagtgccaggaacgcctgaacggttcgcgggaaaggttgggtactagagcggtttccgatcattttgcatcggctgaaccgctctaaggttttgttttaccgcaatttcttaaccagcagatgatgccatctgcctggaaattgctctaatcttacattgcgctgaaacagaaaaggcaaggccgtagccttgcccttatttggtgcagtcaaactgcttgttaacagttggccctgcgatttctgaagacctgaggatattccagatattctccatcgtcaaggaccaaatacaaccaagtaccattgattatgctgccatattttaaacgtgatttttcaacctaatttcataattggggtgcaaatctgggcttcgttctctggcctatattttaaccagataaacatatactccaatttggatcatatttcccgtcacgcttactgtatagcccgtcttaagtgattgacaatcccccaagtaccgacgatgttttcaagcaacggagaattaaatatgcgcagattaggcctcgacatcggctccaacagtatcgggtggtgccttatagatgacaaagaaggcaatatcgttgatattggtgtgcgcatttttccaaatggacgtgacccgcaatccggcacttctctggctgttgatcgtagggaagcacgatcggcccgacgcaggagggaccgctatcttggcagacgctccgcatttttcgatacactcgtcgcgcatggtttaatgcccgcggataccgacgaagccagattgatcgccgctaaggacccttatgatgtgcgcgcccgcgccctgaacgaaaaactcaccccccacgagattggccgcgctctgttccatctcaatcagcgacgcggattcatatccaatcgcaaggcagagcgtaaatctgctgacaatgaggacggaaaaatcgcaaccggcgcacaggcgctggaccacgcaatgacggaggctggcgcggacacgctgggccagtttttagcgatgcgtcttgcgcaaggacagtctgcccgcgtgcggatgaatagcgaaagccagagctatgacttctatccgcaacgtcgacatatagaatatgaatatgaacgcatatggggtgaacaagcgaaacatcaccctgaaatcctcaccaaagaggcgcatgacgcccttcatcgcattctgttttttcagcgcccattgaaggagcaggaagtcggcatctgcactttctgcccgaatgaacgccgccttgcaaaagcgcatccgctttttcaggaacgacgactttatgaagaggtcaatcatctcgaaataacgacgccgggtgcccccgatcgcaagctcactctggacgaacgtgaccatctgatcctcaaattgcgcggtaagaaaaacgtgacgtttgaaagtctggccaaagagatcaagctccagccgggccaaagctttaataaggcaagcgagacgcgcacctctctggcgggaaacgaaatcttcgcaacactttctgacaagaagcggtttggcaaggcctggcccaatttcagtctcagccgacaatgggaaatcatcgaaacgctgatcgaggaagaaaacccagatacgctccatgatttcctgacaaaggactgtggcctcaatgaggaagccgccatactgaccgcgcgcacagccttgcccgaaggatatggcaggcttggcctcaccgctaccacgcgcattctggatgagctgcggaaaggcgtcataacctatgatgtcgcggtgagaaactgcggctggcatcattcggataaccggacaggcgagatactacaccaactcccttattatggtgaactgctgaaccgcgaaattccgccgggaacccaaaaccctgcagatccccttgaaaaacgctggggtaaaatcaccaatcccacagtgcatattgggctgcgtcagctcgaaaagctcgtcaacgcgctcattcaggtgcatggtcgccctgaccagatcgtggtggaactggcacgcgaactgaaactcaacgagaaagagaaggaagagcataatcggcgaatacggcgtgacacacaggccgcacaggcgcgatcggaaaagctgaccgaagccaatatccccgacaccggcgccaaccgcatgatgttgcgcatgtgggaagagctgaaccccgccaacccgctggacaggcgttgcccctattgcggtgagcaaattggaatacgggcgctctttagcggagaggccgacatcgaccatatcattccctattcgcgctcgctggatgatagcgccgccaacaaggtagtcagccatcgccggtgcaaccgcatcaagggcaacaagaccccttatgaaaaatggggccatgacgaagacgcatggacgattatccgcgttcaggtggcgcgccttcaccgttcaaaacaatggcgtttcggaccggatgcgatggagcgggtggataaggatggcggcttcatcgcgcgccagcttactgacacacaatatctctcccggatggccgggcgctatctgcaaagcctgtatgccgataagtcagatggaagtgtttatgttatccccggcagaatgactgccatgttgcggcggctctggggacttaacagcctgctgccagatcataacatcgtcgaaaataaacatagcgatgcgccaaagaaccggctcgatcaccgccatcacgcaattgatgctgcggtcgttgccgtaacgtcgcgcagtttgctcatgcggatcgcccgcaccgctggtctcgccgaggacaaaaatctggaccgcttatttgaggatctggatcaaccatgggatggattccgcgaggacttatacgaaaaactaaaagccataacggtcagtcacaagccaaatcatggacgaaagggcaaacccgcaccgggcaaggatgccaccacaggcaggcttcataacgacacggcttatggttttacaggcgaaaccaatgaaaaaggcgtacctatcgtcgtacaccgggtgccgctgagcagcctgaaacccgccaccatcactgatccggaccgcatcccggacccaacgctgcgcgaagcactatatcgggcgacccaaggcacgagtggcaaggatttcgagaaagcactggctgaattttcacgctccggggcaggcagcgataaaaatggccgcccattgttcaagggactgcgccatgtccgcataagagaaccactcaacctcattcccatcagggacaagacgggccgggtttacaaaggatataagggcgattccaatgcccggttcgatgtatggagaatgcccgacggcaaatgggtggccgatgtactatccacatttgatgcacatcaggcagacggtcaagatcgccgtccgcatccggcggccaaaaaagtcctgagcctgcgtcaaaacgacgtcattgcggttgagcgcgattccgaaacgcaattgcttttggttaccggatttaatcaacaagggagtctaactttaagccctttaaatgaagcaggcccgctaaaagcgcgcaactcaaccgccaatgaaattgacccctttaaatatacttatttatcagcgagttccctcaaaaaatcacaagcccggcaagtccgcattgatccgctaggccgcgttttcgatcccggcccaagagaataaggcacaacccatggagcgtattgtcgatatagcaacggacggtatgcacctttccctgtatcggggcttcctgatcgtggccaaggataaggaagaaatcgggcgcatcgcattggatgatgtgcatgccgtcattgttcacgcacatggctgcacatggtcgggcaatattgtatccgctttggctgagcgcggcgcgcccattgtctattgcgccgcgaaccatagcccggtcgccgtcaccctgccgctggaggggcaccacgcacaaggcgcacgcattcgcgcacagtgggaggccggacgccccctcgcaaagcagctatggcggcagatcatcgtccttaaaatcgctatgcaaggcgcccttcttgcggcacgggcgcatcccggtgccgaggcgtttgatttactcgcccgcaaagtccgatcaggcgatcctgacaatatcgaggctcaggcagcacggcgatactggcctgcgctaatggggagcgattttaggcgagatcgcgacgccgaaggcgcaaatgcactgctcaactatggctatacagtcatgcgcgccactgttgcccgcgccatcatcgcagcgggcctacatccaactattggcatacatcatgccaatcgtggtaacgcttttgccctggcagatgacttggttgagcctttccgtgcgatcgtggatgcgatggtgattggcatgatcgcgcagggcgcagcaacactgaaccccaccacaaaacgccactttgcccaactcatagcatatgatctgaggataggcgcggaaacctctccagtgtccgttgccgcacaaaagctggcccagtcgctcgcgcgtagtttcgaaagtggcaaagccgaactttccctttttgatattcccaccccgattgagtggggcggcctgatgaacgccgcaaaatgacgaccgacattacatatctaagtgggtatcggctaatgtggatttttgtgatgttcgatctgcccgtggggaccaaacagcaatcgcgcgaggcaaccaaattcagagaattcttactcgatcaggggtttgagatgagccagttttcggtctacgctcgtttctgcaacggtaaagacagctatgagtcgcatctccgaaagattgaacgcaatctgccagagaaaggcgacatccacgtactgaccttcacggacaagcaatatgaaaatatcatacgattttcgagtcaacgtcgccagaaacaacgaaaaaacccagatcaactggcgttattctgataatccggcccaaaaagccaaagccagatgcagtgttttttcatttaaaaacaaaaatttaacaccacatctggcttagcagttcagaaatcgcaggccaagcgcaacacgctgccaaaggttatagcttctagcgcaggcttagcagttcagaaatcgcaggccaagcgcaaccaaggacacgatagtgtccatcaggaagttggcttagcagttcagaaatcgcaggccaagcgcaacatacttcaggtcgatgaccttcagccaaccggcttagcagttcagaaatcgcaggccaagcgcaacagaaaagagcgccataaggagactgcacccggcttagcagttcagaaatcgcaggccaagcgcaactagccggcaatactgccgttcttagcgcgaggcttagcagttcagaaatcgcaggccaagcgcaacatcgaagcattgggcgtcccataccgcctgggcttagcagttcagaaatcgcaggccaagcgcaacaggagctgtggggacgcgtcgacatcgcgcggcttagcagttcagaaatcgcaggccaagcgcaacatgagccgccccgatgcgcggatcgtagcgggcttagcagttcagaaatcgcaggccaagcgcaacatcgttgctgcggtagcctcgttgattaccggcttagcagttcagaaatcgcaggccaagcgcaacataacgccatattgagcaagggctacctcaggcttagcagttcagaaatcgcaggccaagcgcaactggtcgcagtcaggctgcgtctgcttggagggcttagcagttcagaaatcgcaggccaagcgcaacaatgaatcagatatagccaacagcaaaacaggcttagcagttcagaaatcgcaggccaagcgcaacaccgcccgcgctcggtgattttgccacactggcttagcagttcagaaatcgcaggccaagcgcaacaagcaaaagctggcgtctgatgttaacatgggcttagcagttcagaaatcgcaggccaagcgcaacgacgaacacccgtcgtcgatgaacaatggcggcttagcagttcagaaatcgcaggccaagcgcaacgcgatagcgccatgatcgaccagaacctgcggcttagcagttcagaaatcgcaggccaagcgcaacaccacgattaactgggtgttggggaccgagggcttagcagttcagaaatcgcaggccaagcgcaacagtggcaacgcgcgcgtgtcggagcttagggcttagcagttcagaaatcgcaggccaagcgcaacgtttcgcgcgtcctgcccaagctggtagaaggcttagcagttcagaaatcgcaggccaagcgcaactgcgctccgcataagccttcaacccgcctcggcttagcagttcagaaatcgcaggccaagcgcaactcacagtataatggcgtaggtattttgtctggcttagcagttcagaaatcgcaggccaagcgcaacgcatcctctgattgatgatgcgaccggcgcggcttagcagttcagaaatcgcaggccaagcgcaacagatttaacggtcaaggaccggcgcggggcggcttagcagttcagaaatcgcaggccaagcgcaactgacttgcgcggggcaacgtgacgcgaagtggcttagcagttcagaaatcgcaggccaagcgcaacatatcttttggggtcccattttgccaagagggcttagcagttcagaaatcgcaggccaagcgcaacggttccctcagagctaccaccgccccggaaggcttagcagttcagaaatcgcaggccaagcgcaaccgccggtgacgctgtgccagatggcgcgcaggcttagcagttcagaaatcgcaggccaagcgcaaccatcgggtcacaaacagctttgtttaaggcgcgcagtaagcagttcagtcaggaaattcgtttgtccggggctgcctttgatgatctgatcgactggaccgtcgggggttattattatcatgcagataataatttttccgggtccaatatattatatcccggaaagccatttcagaatttgaacgggccggatgacgatataacctcaaagaataagtcgctctttgcgcagcttattttacaccctacagacaggtttaacgtcactggcggcatccgctataccaacgatagcaaagattatatctatcgtcgttttaacccgttcatgccgggcgtcccgacatatacaccggctggtatattgacgggcgtgaccagtgactatgaagcgaacaaggtcgattatcgactaagtgttgactatcgctggtccagtgaactcatgacttatgcgcaggtttccacgggtttccgtggtggcggtacaaattcccgcccgttcgtgccagagcaagcggttcctttttatcctgaaaccatgacggcctatgaggttggtttcaaaagcgatttgcttgataggcggttgcgggtgaacggatcatttttcatcaatgattatcaggatattattttcacgaacctctcccccacacccaatagccagaataacgccacacccaccaatgtcggcacagctaaatttaagggtgctgaactggaaatcaccacacgacccgttgatggtttattgattgacgggagtattagttatctcgacttccagctaaaatccttcacggccacaggcgtgacaattataggggtaacactggatagtaaggcaccatttgtatctaaatggaaatttgcggctggcgtgcaatatgccgtagaaactgaaattggtacaatcaccccacggcttgactataattaccaatcttctttctataccaacattaataatgatccactctcgatggtgccgcgccgtggtatatttaatgcccgaataacattcgattctctggataaggactggaggctatcgattgccgcaaagaatctgtttgacaaatattattataacaacagatttttcaatgtgggccttagctctgcccagcccgcaccaccgcgtgaaatatcggtaacgctacggcgtaatttctaacgagtatggggaaggcaagatatgccttccctcttccatccttatgaaacaggaggatattttgacaaatattccgttatcccgccgatctttactgacctcggtcgccagcgcaacgggcgcggtgatgctatccggcgtggtcgccaatcctgtttcagcgaaaaaggccgggccgaccagtcaggccggaacgtctcgtcccaatatcctgttcattatggcggatgatctcggttatgctgatttatcctgttatggcaggcgggaatatgaaacccccgctattgatagccttgcagcaaatggagtacgtttcctgcagggctatgccaattcggcggtatgctcggcaacccgcacggggctgattacgggtcggtatcagaaccgcttgcctgtcgggctggaagagcctttgggggtaagggatgtgggcctgccaccagagcatcccaccctgccctctctgctgaagaagcagggctatgaaaccagcctgatcggaaaatggcatttaggatcgcttcctaaatatgggccactgcaaagcggctatgaccatttctggggctttcgcggcggcggggtcgattatttcacccacaaaggttttgcagggccagatttatgggatggtgatgaccctatcaacgccgaaggctatatgaccgatctgctgggccagcggaccatcgatagcatttccaacagcgccaaagggacaaagcccttcttcatatccctgcatttcagcgccccgcattggccatgggaaggccccggcgatgcagccgaagccagaaggctggatgaaagcggaaaacccaccgcgattttccattatgatggcgggtcgatggagatttattctcagatggtcacgcgcatggatatgcaggtgggccggatcattgagcatctgagcaatctgaatttgctggataatactatcatcatcttcaccagtgataatggcggagagcgtttttccaacacatggccctttaccggacgcaagacagagttgctggagggcggactgcgcataccgaccatagtgcaatggccacgccgaataacggggggcaaaaccagcgatcaggtcgttatttccatggactggctaccaacattattggcagcagcaggcggggcaccagccgcagattatccatcggacggcatgaatttaataccacatattgttgatggcgcgccctccatcgaaagaacattaagctggcggtataagaatctggatcagcaggcttgccgtcagggagattggaaatatctcaagatattggaaaacacgttcctgtttaatgtggtggatgacccgatggaacgagccaatctgaaggaccgcttcccggaaaaatatgcgcaggtgaaggctgcttatgatgcgtgggacgcacagatgctgccattgagcccggacacgtccagtcatggctttaccgcagaccagctcgccgatcattatggcgcaaaaatgcaaaatagcgttcggtagcccctcttactgaatcaagatcctgacccattaattccgtaagcgccagcgcctgcactattcgcgaggtgaaactctcccataggcccaaagaactgattgcggtttctcctgaggcgacggtcccggtgttagtggaacctgacggcacggtaattgaggaaagcatcgacatcatgcgccgggcgttagagcgcaacgccccggaaggatggctggaacgtgaagaccgggcgctgatcgaagccaattcccagattgcaggcatggctatgccgccatcttcggtcagagctgttccgtacgatcatggttcgcctcgacccatggcagccagaggatgctccgatttgctttcctatatgatggccagacttttccgatgatagtgccagcctgtcgcctgccttaccgttctgcattctccttgatttcgcgataggcggcctcccgcgcatcaggcgtgagagataagagatagcgggccgcctccttataggtaaggaacagcagtccagcggcggagacaggcaccgtccgtccattgaaaacccggcgtagcaaacgccgttgcggtcgactcagtgcttgatcttctgcttcttctgtcatgacacatcctgatatgatcgccgcctgttaccccaactatttctggttagcgatgggccgggttgtgccgctgtaccatcacgctgcgagtttcaatccattttctatatccacaaatcgcgtgacgccaactttgtcatagttacgttccggtacaggaatcgtatttggtgcctcccacgacaatttttgcgggcttccgtctttagaaaccgaaagagacggccggttcagcagggaagaatgtagattctgcaatggttgatggcggccattggaaaggccagattcatcggtttaaccagcgcctccccctcactaaacatcgcttgataaatattcaacatattgaaaataaatgttaaaattaaaaactccatccccttgacataatatctttataagaatagttcttttgaagaattaaaaaatatcaaaaaacccttgccgtaggggagaggaaaaaaacatgggaaataaagacaggataattgcgtccggcgtaggtcgccttgtaggtggatctttgctggcgctggccatctccatcggggtgggccatgcaaacacagccgatgacagcgcctcgcaggaggcaaataccccacagggagacatcatcgtcaccgcatctcgtgcggcgagttcgggtatgcaggcccccacccccaccaccgtcgtcggggcggacctgattaaccagcgccaatccgccaacgtcgcccagatattgaatgaaattccagcctttaaggccagcacaaccccggcggccaatgccgttcgtacgcagacgcccggcgcgtctaccgcagatttgcgtggacttggcgcggctcgtacgctggtgctggtcaatggtgtgcgggttcctccgctcgccccggccagcaatggcacgggcaccattcccgttgcgccggaccttaatactgttccagccctgatggttgagcgtatggaagttgtaaccggcggcgcatcggcccaatggggttctgatgccgttgccggtgttgtaaacatcatcctgaaaaataaattcgaagggctggaggcccgcattcaaggcggtatcagcggtcagggtgatgccggccaatatcgcattggcgtgctggcaggcaccagctttggtgaaggcggccacattgttgctggtgcagattatgtgaaacagaacgaggttggcgatctttacacccggtcatggggccgcaaggaatatggacgcgttgccaatgcaggatatgccaccaatgggcaggcggccaatatcatcaccgaaaacgtccatgcttcttcatcgcctggcggtttgatccttggcccggttggtttttcgctgcgtaattatgaattcacatctgccaacagtgtcgcaccatttgatatgggcggcattcgcaatgcttccatgcaaattgggggacaggggcagtccctttccaaagggatttcgctggcaccgggggtagaacgttttaacccctatgtgcgcgcggaatatgaatttagtgatgcgttcacactatctgtcgaaggatcttattcctattccaagggtaatgtaacggttctgccgtcccgcgacagcagcatcaccatttataacgacaatgcctatttgccgcaggtcgtgaaggatgcacttggcacggcacccagctttaccatgtcgcgcctcaattatgacctcggccttgcgatgattgaaatcgtcaacaaaacgccgcgtattaccattggggcgtctggcgatctgggcggtggatggtcatgggatggtcatctgggctggggtcgtaacacctataagggatcggcgtccaataaccgtcacaaaaacaattttgccttcgcaacagatgctgtcgaacataatggggaaatagtatgccgggcaaccatagcaggagatgcggcgtataatcctgcggcggcaggatgcgttcctatcaacctgtttggtaatggcacgcccgatcaggatgccattgattatgtatcgcgcacatcgcatttcggcgcgaaatacacccagaaaacggcggcgcttaacctgcgcggggaaccattttcgacatgggccgggccggttgcctttgccatcggcgctgaataccgcaaggaagaacaggtcgtgacggcagatgccggatctgcggcaggcattatggaaacgtccaatgcggccccctattccggcaaatttgacgtgaaagaagcctatgcagaagtcgtggtgccgctggcagcagatacgcctttcctgcgcaagcttgatgtaaacggtgccattcgcgtggcggattatagcagcgctggcacgcaaaccacatggaagctcggcggaacatgggagcctgtatcaggcctgcgtttccgcgccacgcggtcccgcgacattcgcgcacctgcgattttcgaactggcaagcaatggtgcggttgcctatctgccagcggttgtgaatggcgtgtccacggggccaattgcccaaaatgcaacgatcggtaaccccaacttgcggccagaacgggccgataccttcaccgttggcgtggtggtgcagcctgctgctgttccgggctttactctcagcgttgactactatgacatcaacctgaaggatgcgattacaaccgtgcccggttccaccgcaggaccgctttgttccgcaggccagacctatttctgttcgttgtttacatatgcaggcggggtgccggtggcatataattccggttacattaatgcggcgaccatcaacccgcgcggtctggatattgcgggcagctatcgtctgccgcttaatcgcctgagtgatggatggaatggcagcctgaccctgtccttcagcgggacttatattttccaatatgacagcaaccttggcaatggttctcggactattgattatgcgagggataatagcgccgcagggattgcccggttccgttccaatacgtcacttacttatgcaaatggcggcttctcccttaccggacaggtactgaccatctcatccggcaatattgataataccgccaatcttaacccggcgacatccatcaacaccaatcatgttcccgccgttgcctatgccaatttacaggcaagcgtggatgtgatggacaatttccgtctatttgccggtatcaataacctgtttgacaaagatccgccgccgcttccttcggcaacgctcttcaacgtcaccaatggtgtatattatgacacgattggccgcgccttcaccatcggcgcgaacgtgaagttctgagggcgccatgaagtccgctaaaagcgcattggccgttaaccggcggggctttgtaacgggcgcggtgttgggggcttcggcccccgcccttcccgccatggcccagttttcgacgcaaaataccaatggtgggtcagccattaaagcgcggcaggcacccggtgtcggaccggaagatggtggtgttaccggccttctgtcatcacatatcgtccgcgtagattatacgcagattg

SEQ ID NO: 3493 - DNA, 23174 bp, synthetic construct
  misc_feature 1..23174: note = Synthetic
  source 1..23174: mol_type = other DNA
aggcgaatggctggccgtgcgagttcatcggcgaagacgagctttcgggcgagattcagggcagctggacgaaatatcagctgcgctgcatctggcgggccgaggaccgggtgcttcagctgctctgcctgccggagatccgcgtgcccgatgccaagcgccgcccggctcacgagttggtggcgctggtgaacgagcagctgtggctcggccatttcgacatctggtccaatggcggcgtgctgctgtatcgccacgggctgatgttgggcgaggaggggctgctgagcctgaacatggcgcagctggcggtggagaccgcggtggccgagtgcgaccggttctatcccgcatttcaattcgtgctgtggggcgacaagcggcccaaggaggcgctggaggcggcgctggtcgatccggcgggcgaggcctgaggcgatgaccgaagctgggcctcctattcttgacagcgtgctgatcgtcggctgcgggaacatggccggtgccatgctggacggatggctagcgggcggggcggagccggcgcgtttcactgtggttgatcccaatgacagcgggcagcgccgcgagggcgtgcgctggttggcggtggcgccggtggataaggcgttcgatgcgttgctgctgggggtgaagccgcaggtgctggcgacggtcgcccccacgctcgcaccgctggtgagcgggcggacgctgctgctctcgatcctggccggggtggagctgggggtgctggccgagaaatttccgcaagccggcggctgggtacggatcatgcccaatctcgccgcggcgctgggcagatcgccgctggcgctggcggcgcaggggctgggcgaggcagagtgcgcagcggtgagggcgctgctggacccgctgggcaggcccgaatggttcggggaagcagagttcgacgcggtgacggcactggccggatcgggcccggcctttgtttatcggttcatcgatgcgctcgcgctcgcgggggccgagctgggcctgccgcgggacaaggctgcgcggctggctttggcgacggtggagggcgctgccgcgctcgccaccgccagcccgtacgatccgggtgaactcgcgcggcgggtggccagcccgggcggggtgacacaggccgggctcgatgtgctcgacgaggagagcgcgctgaaccggctggtggcgcacaccgtgcgcctggcggccgagcggagtgcggcgatgacggaggaagcgcgctcacctcggtaatcgcacgtggtcgcggcgctttccggttttgcttgaaaccttaggcgaacatgccgatattgcgcatcgtgcggcccgctgagtgaggccgctattggacggagtttcaattaccatggcagactggaacgagccccgcgcgacccgccagggtttcggcgtgtcgccggagcgagcaggggatctggcgggacgcacgactttcgatgcgggcctgcgcaggcatatgctttcgatttacaattacatggcttcgggcgtgctgctgacgggcgttgtcgctatgctgaccgcacagtccgggctggctttgcgcttcgcccaagggccgctgatgtggctggtggcgctttcgccgctggcggtcgtgttcgcgatgagcttcgggcgtgagcgcttctccacctccacgctgcaggggctcttctggggtttcgcggtgctgatggggctttcgctctcgaccatcttcctcgtctacaccggtgcctcgatcgcggcgacgttcttcgctaccgccggtgccttcgcggggctgagcctgttcggctacaccaccaagaaggatctgacgggctggggcagcttcttgatcatgggcgtgatcggcctgatcatcgctatggtgatcaatatgttcctccagtcagaggcgctgtcctatgctgtgagcttcatcggcgtgctgatcttcgctggcctgaccgcctacgatacgcagcggctgaagagcgagtacctccaggtgcagcggatgaagctgaccaaccccaatgccgtcgccgcttacccgctgggcaagatggtgatcatgggggcgctgagcctgtacctcgatttcatcaacatgttcctgtttctcctgcgcttcatgggttcctcgcgagagtgagcgagaggcgctactaggcgcaagccaggctgggttgatggtgcccggggtgcataagtgctccccgggcattttcttaggcatttcgtggcattaggcgttctgcttcagccgcgcgcaaggtgcctcgcggcacatttgccgccggcgcatcggagagggcgcaaacatgacattgaattgccgcaagtggttgacgaaggcggccgtgctgggcgcagtggctctggccggcgcctgtgcgaccccgccgcctccgccgcctcccccgcctccgccgcccccgccgccggtggtggtcgaggcggtgccctatcgcccgattcccccggtgggcgcggattatgcgatggttctgccgccagtgggcccggatggcacccgcctgacggtgaacagcaacctcgacgcgaatgagacgctgtggcacttccgctccggctggaatgtggccgcgctcaattgcctcgatccgcattatgccccgatcaccgacggttactcggcattcctcaccaagggtgcccggcggctgagcgctgccaacagcgccatcgacgcgcagttccgcgagggagcggagaaccgccgtgcggcgcttgtggcgcgcgaggtgcacatgacccaggtctacaattacttcgccaacccggccgcacggcagccgttctgcaacacggcgctagcgatcgcaaacgagacgctggcagcgccaccggaggatatcgcggattttgcacagggcgggctgatgcggttcgaggcggtgttcctcaatttcttccgcgaatatgagcgctatcaggctcaatccgcagcgtgggatgcgcgttacggcgagcgttacggcgcctcgcagcccggctgggtggcggtttacggcagccgggtgccgagcgtcgccagcggattgatccagcttaacattccgcagctggcgggcgaggtgcgcgatccggattcgggcgcttccatcccgattatcataccggcaatcgacacgagcgtgccgctggtccagcccgtgccgaacgacgctgacgggcgctagggccacttggcggaggggcagattggcacttcccacgccgtcgtgggtccgctagggggcgcgctcttcgccgtggcgctgccccttggcgatcccggaacggggccgtagctcagatgggagagcgcgtcgttcgcaatgacgaggtcaggggttcgatccccctcggctccaccacacccggcgcataagcgcttgttatcattgaataatatcaagacaatcgccttgccgtcccacacacggccccacattcctattgcgctttgacggcactcgccgggtcgagttggtgcgggctgagactgacttcgattgcccaactctccgggcggacgccggaggcgcatgagtcaccagcgggcgggtttgtggatcacgtcgctgaatgtcgccgacggaggagcaacggcggactttcgcgcgccgggccgcctttggaagccagaggagcagagtcagcaggcctgctgtccggctgggttcgcagtcgggccgtcgaccgcattgctgctcgtgccgcgatagcgcgagggatcggcgatccaaagattgatcgccgactcgtgccagccggagctatgttcgccgagcttcacctggcgcgggaaggtaccgtcgttcatcttacgataaaggcttgagcggctgatcccggtgcgggcgagcacggtgcggatgcggatgatacgttcggggtcgggcatggtcagggctccacaaggctggacgccggggcgtcgcttgggccagcattggagccgaaaagctaagcaacaagagcctcttaggtgacatcgcgctttggcgtagagcagcgcataagaacgtagatcgaccacggccaaggttgatcggactggctccattcctgcttgtcggaaggctgcaagacgagcttcggcagccgagtcgcggctgccaaggtgttcgatcaggcgcgcgcgttctccgcgtcagcctcgaaggcgcgccgcccgcgccgtgcccacagtgtcagcgcgcgctcccggtcttcgccgctcagccgatcggccaccgcgaggaatgcgccgtacatgacggtgcgatcgtcgttcgcaagatcgaccagtccggccttcacaaccaggccaccaagctcgatcaggtgacgggtgcgttcgcggcgtttcacggtccactcgcgcgtgtcagtgcaggcgctggctgcctcaagtcgacgccgcgcgatcgtcgcgcgtcgcgtcgccgactttgtcgcttcgagcccgccgcgcagcgtcgcgtgaccttccctgaaagaatgccgcgccacgctgacgccagccctccttcacatcgccgttggttgcgtcgaccatcgccagcaacccgcccgcgagcgcatccgggtcgagcgcggcggcacccgtcgcgatcacaagttcgccaagctgacgcagcttgcgttgcttgaggctacgtgtcttgagttcaagcgccttcagctcggaattgaagtcgcgcaccttgcgcatcgaggacctcccaacatagcggatgcgctactatagttcggccgctcgttggatgcttgcctgctgctgagacggactggtacgtcccggtcccgagcaagaatgtttcttgtgagggcgcgcttatacgtcgtgccgacgtgcgcttgcggtagtaagtggttcgccgtcatggcgatctaccatctctcggtcaaagtcatcagccgcgccaatggatcgagcgcgctggcgtcggccgcctatcgctccgcttcgcggctgcacgaccagcggctggaccgcgaccacgacttcaccaacaagtccggcgtcgttcattccgaagtgctgttgcccgaaggcgcgcccgaggctctgcgcgaccgcgaaaatctttggaacgccgtcgaggccggagagaagcgcaaggacgcccagctctcgcgcgaggtcgagttcgcaattccccgagagatgaaccagcagcagggcgtcgcgctggcccgcgacttcgtccaggagcagttcgtcgatcgcggcatgatcgcggatgttaatgtgcattgggatgtgggcgcggacggcctggccaagccgcacgcccatgtcatgctgaccatgcgcgaggtgggcgaagacgggttcggcgctaaggtccgcgactggaacgcgactgcgctggtcgagcactggcgcgaggcctgggccgatcatgtcaacgagcggctggccgaactcgacatctacgcccgcgtcgatcaccgcacgctgcaagcgcagggcatcgcgctggagccgcagcacaagatcggccccgccgccgcgcgaatggcggggcatgggctggaggccgaccggctcgacgagcatgtcgagatcgcgcgcgagaacggcgagcgcatcatcgccgcgcccggcatcgcgctcgacgccatcacccgccagcaggcaacgttcacgcagcgcgacctggccatgttcatccatcgtcattcggacggcaaggaccagttcgaccaggcgctaagcgcggtacgcgcctcgcctgacctcgtggcgctcggccgtgacgggcgcgatcaggagcgcttcacctcgcgcgagatgatcgcggtggaggaacgtctgcatcgcgccaccgaggcgatggccggacacgatcaacatcgtgtcgatgcgcgcgcccgggatgcggcgttggcgcaggcggaggcgcgcggcctcgtgctgtccggcgagcagcgcgcggcgctggagcatgtgacggacgggcggggcatgagcgtcgtcatcggctatgccgggaccggcaagtcggcgatgctgggggtggcgcgcgaggcgtgggaggaggcgggctaccgcgtccaggggctggcgctgtcgggcatcgcggccgagaatctggagtccggttccggcatcgcctcgcgcaccatcgccagcctggagcatcagtggtcgcgcgaccgcgacgggctcggcccacgcgacgtggtggtgatcgacgaggccgggatgatcggcacgcggcagatggagcgcgtgctgtccaccgcgcgggacgccggggccaaggtggtgctggtcggcgacgctcagcagttgcaggcgatcgaggccggagcggcgttccgctcgatcgccgaacgccatccccatgccgagatcaccgagatccgacgccagcacgaagactggcagcgcgacgccacccggcacatggccaccgaccgcacgggcgacgcgatccgggcctatgccgatcaccgcatggtccatgccgccgacacgcgcgagcaggcccgcgccgagctggtggaccgctgggaccgcgaccggctcgccgaacctgacaaaacccgcatcattttcgcccacaccaacgacgacgtgcatgacctcaatcggatcgcgcgcgaccggatgcgcgacgcgggcgggctgggcgcggacgtggcggtgaacgtgggacgcggcgaacgggctttcgcgccgggcgaccggatcatgatcctgaagaacgaccgtggcctcgacgtcaagaacgggatgctgggtgaggtggcgcacgtctctaccgacaggatggcggtccgcctcgacaacgggcgcggcgtcgccttcgatctgaaggacttcgcccatatcgaccacggctatgcctcgaccatccacaagtcgcagggcgtcacggttgatcggtcgcatgtgctggccacgccggggatggaccgtcattccacctatgtcgccctatcgcggcacagggacagcgttcagctctattacggccgcgacgacttcgacgggatggaccggctgacccgtgcgctctcgcgtgaacgggccaaggacatggcaaccgattacacccgcgacttcgccgaacggcgcttcgccgaacggcgcggcatcaccttcgcggggcgcgtccgcgaggtcgtgcagaaggcgcgcggcatgttcgacgggttccggccgaggccgatcgcgccggagcaggccacgcccaggccggaggatcgcggcgcggtccagcgccgcgccgtcgagcgccacgcccgcgccgtcatcgatgttcggcggatgcaggacaagggcttgccgatcctgccgcaccagcagaccgcgctcgatcgcgcgcgggagtcgctggacgccaccggcaaacgcgcggcgggggacatggagcgcgcttacgcgcgcgatccctccctgatcgccgaggtggcgggcgggcgcacccagcgcgcgatccgcgccatgcagctcgaatccgaactccgcgccgatccccggatgcgggccgatcgcttcgtcgaacgctggcaaaagttcgatagccagcgactccacgcttaccgggccggcgacgaccaggccatgtgccgcgtgcgcgacagcatgggggcgatggcgaaaagcctcgagcgcgacccgcagatggaatcgctgctgcgcgcccgcaagatcgaactcggcatcggcatcgacatgggccgcagcatcagccgcgacctgatgaccagcatcggcttcgaccgggggcgtggcctcggcatcggcatgtgaaggaggacggaatggatcagcagaccgacagcgaacaacccgatgcggcggcgcaggcgttcgacaagctgcgcggcgaggtggcgctgctgcacgacgccatcgcgggcatgtccgccgagcgcgcccggatcgagattcccgactatagcgagacgctggggaagatcgccgggaacgtccggacgatcggacgctggctcgacgagctgaaggccagccccgcgctcgcgctcacgccgcaggatgtggggcgacagatggcggcggccggaaaggaggggcgggaggtggagatgctcgcgttccggcaggcgcaggcggagatgtttcaggcggccgaggagttgcgccagtggaccgaatccgcgcgctcagcggaccagcagaaccggcggctgcttcaggtcggaatcgcggggctggtcggaggtgcgaccctctatgccgcgcttggcgggtcggtcattgccctattcggatgacttcccgcttcgccgtattgcgtggcttgacaccgaacaatcgggaacatagctaaggccatgaggatcaggaacgtcgtccataacggattgcgacgcttcatcgaggatgacgacgccagcgggcttcagcctgctgtattgtcgaaagtccgtcgcatcgtcacattcctccaggacatggagcgcgaggaagagatgcggaccgtgccgagctggaaagcacaccagctcaccggcgaccgcaagggcagctggagcctgttcgtcaccaagaattggcggatgacgttccggatcgaccgagaggaggtcgagatcatcgacctcgactatgaggactaccactaggaggtggcaatgaacgcggtttctggttttcgcatgaagcgccctgcccatcccggcggcttcgtcaagcacgagatcatcgagccgctggagctgtcggtgacggcggcggcgggcgtattaggggtgacgcgggcgacgctttcgaccctgctgaacgagcgcgccagcctttcgcccgaaatggcgctacgcatcgaaaaggcgttcggcgtgtcaatggacacgttgatgcggatgcagaatagctacgacatcgccctcacccgcgatcgggcgggcgagatcaatgtggccccgttcaagggcaagccgctcgaccgtcaggcggccattgcgtgagcgattggtacaggcgaaccgactttacagacttgcctcaaagcggccgctcaatcagaatcgatatctttggaattcagccacaccatcacaacctgggactaaacacctagggctcgcccgctgatgtcgcgctggtacatcactcacgcctgttcggggttcgggaacaaggtccgcgacagcatcttgggcgaggcgacgcgcctgggcctcgacagcctcgtcgaatcggtcgaagtccccattgaaaaggtgacggaggtccgccgcggcaagaaggtcacgtccgacaagaagttcttccccggctacgtgctggccaagctggcgatgaacgacgacgtctatcacctcgtcaagaacacgcccaaggtcaccggctttttgggcagcatgggcaagccgcagccgatcaccgaggccgaggccaaccgcatcctcaacaccaaggacgaacaggcgaccgccgcgcccaaggccaagatcagcgtcgattatgagatcggcgacagcgtcaaggtgctggacggcccgttcgcgagcttcaacgggctggtcgaagaactcgacttcgaccgcagccgggtcaaagtaagcgtctccatcttcggccgcgcgacgccggtggaactggagttcgagcaagtggaattggccaagtagcaggcaaaaaagacggggccgtagccccgcccttatttggtgcagtcaaactgcttgttaacagctggccctgcgatttctgaactcagtcccttttcaccgaaacggttgaagcgtcaagtgcgaaagccttcccgctcgcataagtgggcaggaaggctttcggttcagagatcgaggccagcagcaacacgtagtgctacacgcgtctatgattggaacctaagcaccaaccttcactcgcacaatccctagcctccttgataagcactacgtaggcattgacggacatgttgatataggcgtagctagctctgccgcacagctaagctgcgcgactggtgggcccggagggcaggactagttctgccctcccaagctagaggttgatatgagacgactgggactggatatgggcaccaacagcatcggctggtgcctgaccgaagacgacggacgcatcgtcgacatcggcgcgcgcatcttcgccgacggacgcgaccccaagtccggcgcgtcgctcgcggtcgaccggcgcatggcgcgcggcatgcgacggcggcgcgaccgctatatcggccgccgctccgccttcctcgccgcgctggtcgaacacgggctgatgcccgccgatgccgacgaggcccggctggtcggcgaacgcgatccctatgtcctgcgcgcccgcgcgctgcacgatcggctcgacccgtacgacatcggccgcgcgctgttccacctcaaccagcggcgcgggttcaagtcgaaccgcaaggccgagcgcaagcagaaggaccaggaggacggcaagatcgccggcggcgcacgggcgctcgaccaggcgatggccgagtcgggcgcggacacgctgggcgagttcctgtcgttccgcgacaccaagcgcgtacgcatgggcggcgagaaccaggagtatgacttctacccgcagcggcggcacgtcgagtatgaatatggccgcatctgggagtcgcaggcggtgcaccaccctgccctcctgaccgagaccgcgcgcgtggcgctgcaccgcatcctgttcttccagcgcccgctcaaggaacagccggtcggcctgtgcaccttcgtcaaccagccgcccaaccacgagtaccgtctgcccaaggcacacccgctgttccaggagcggcgcttgtacgaggaggtcaaccatctcgagatcacgaccccgggcgaagcgccgcgcaagctgacacctggtgaacgcgacgacctaatcctcgaaatgcgcggcaagcgcgaggtcagcttcgcgcggctgggcaaacggctcaagctcgaacccggccagagcttcaacaaggcgagcgaggcgcgcacccacctgcgcggcgacgaggtatacgccgcgctcgcggacaaaaggcgcttcggtcccaactgggcgcatctcggtcccgaccggcagtggctggtcatcgagcggctgctcgacgaggaggaccccgacgcgctccacgcttttctcaccgaagatttcggcctcgacgaagaccgcgcccgcgcgaccgcgaaagcccccctgcccgagggccacggccggctcggcaacaccgcgacccggctgatcctggaagcgctcaagacggacgtcgtcacctacgatgtcgccgtgcggagcgcgctgccccaccatcattcggatttccgcacgggcgaggtgctgcccaagctgccttattacggcgagctcctcacccgcgagatcccgcccggcacgctcgaccccgccgatccgcccgaggtgcgctggggcaagatcaccaaccccaccgttcacatcggccttcgccagctggaaaagctcgtcaatgcggtcatcgcggtccacggacggccggaccagatcgtggtcgagctggcgcgcgagctcaatctcagcgaggacgacaagaagaagcacaatgtccgcatccgcgacaacaccgcggcggcggtcaagcgctccgaaaagctcgtgagcatgggccagcccgacaccggcgccaatcgcatgctgctgcgcatgtgggaagaattgaatccgcacaacccgctcgaccggcgctgtccctattgcggcgagatgatcggggccgagctgctgttcgccagcggcgcggccgacgtcgaccacatcctcccttactcgcgcacgctggacgacggcaccgccaacaaggtcgtcgcccaccgcgcgtgcaatcgcgccaagggcaacaagaccccgtacgagcgctggggcgcggatgagacgcgctgggaaatcatcaccgcgcaggtcgcacggctgcacaaatccaagcagtggcgcttcgggccggacgcgatggagcggttcgacaaggacggcggcttcctcgcacgccagctgacggatacgcagtacctgtcgcgcatggcccgcagctacctgtccagcctctacatcggcgaggagaaaggcgaaggcgtctacgtcatccccggccgcatgaccgccatgctgcgccgcctatgggcgttgaacgacatcctcggcgaccacaacatcgtcgagaacaagcactccaacgcgcctaagaaccggctcgatcaccgtcatcacgcgatcgacgcggcagtcgtggcggtcacgacccgttcgctactgggcgagatcgccaaggcggccggccgcgccgaggacaaggatctcgacaagcagttcgaaggactgcctcaaccctggcccggcttccgcgacgaactccgcgataagctgggcaacgtcacggtcagccacaagcccgaccatggccgcaaggggcgccctgcccccggccacgacgtgaccgccggacagctgcataacgacaccgcctatggcctgaccggagaaacagcggcggacggtaagacgccgatcgtcgttcaccgcgtgccgctgacgagcctgaaaccgggcgacttgaccgacccgctccgcattccggacgaggcgttgcgcgacgcgctttaccgcgcgaccgagggccttagcggcaagccccgcgaacaggccctcgcccgcttcgcggcaacagacaaggtgttcaagggcatccggcgcgtccgcgtgcgcgagccgctcaacgtcatcccgatccgcgacaaggcaggacgcgcctacaaagcctataagggcgacgccaacgcgcggttcgatgtttggcggatgccggacggcaagtggacggcggatatcgtgtcgatgttcgacgcgcaccagccggcgcaagccgatcgccggccgcatcccgccgccaggaagatgctcagcctgcggcagaacgacatgatcgccatcgagcgcgacggcgcatctccgcaggtcgtacgagtcgtcaaattttcgaccatcggcgcgatcgcgctcgcaccggataatgaggcgggtgcgctcaaggcgcgggacgccacctccaacgaactcgacccgttcaaatatgtctactcgtccgccggcggactcaagaagctccgggcccgccaggtgcgcatcgacccgctcggccgcgtcttcgatccggggccgcgcgaaccggcctgacaacgcgccgcgggaggggcagcatggaccgcatcgtcgatatcgctaccgaaggtctccacctctccacctatcgcggcttcctgatggtcgagaaagagcgcgaagaggtcgggcgggtcgcgctcgacgatgttcacgccgtcatcgtccacgcgcatggcgtcacgtggagcggtaacatcgtcgccgcgcttgcttcgcgcggcgcgccggtcgtgttctgcggcgccaaccattgcccgatcgcggtgacattaccgctggagggccatcatgcccagggcgcgaagatgcgggcgcaatggggggcgtcgcggccgctgtgcaagcagctgtggcgacgggtcgtccaggccaagatcgcgatgcagggatcgctgctggaggcacgcgcggccgagggcgccgtggccttcgcccatatcgcgcgccgcgtccgttcgggcgacccggagaacctggaggcccaggcggcgcgacgctactggccgcttctgatgggtgacgcctttcggcgggaccgcgcgcaggacggcgccaacgccttgctcaattacggctatacggtgatgcgcgcgaccgtggcgcgggcgatcgtcgcggcggggctgcacccgacgatcggtatccagcacgccaatcgcggcaacgccttcgcgctcgccgacgatctggtcgagccgttccgtccgctcgtcgacgcgcttgtgatggggatgctgagcgagggagtcgcgacgctcgatccgcccgccaagcgccgcttcgcccggctgatcgcgttcgacctcaggatcggcggggagacctcgccggtctcggtcgccgcgcagcgcctcgcccagtcgctcgcccgcgccttcgagaccggccgtcccgagctggcgctgttcgatccgccgacggcgatcgagtgggcgggcgccggccgtgtcggcgccgaggacacggagtgagcgcgggcgacggcgcgcatttgagcgggtaccggctgatgtggattttcgtgatgttcgatctgccggtgggaacgaagaagcagtcgcgcgaggcgaccaggttccgcgagtatctgctcgacgaaggctttgagatgagccagttttcggtctatgcgcggttctgcaacggcaaggacagctacgagtcgcatttgaagcggatcgagcgcaacctgcccgagaagggcgacatccatgtcctcaccttcaccgaccgtcagtatgagaatatcgtccgattctcgagccagcgccgcaaaaagccgcgcaagaaccccgaccagctcgccatgttctgattatgtccggcggttcgtggcggccggatgcgccgaattcctgttgtcttgcaacaggttatcgacacatccggcctagcagttcagaaatcgcaggccaaccgcaacgccttcgatgtcagccccacccgcaggaatggcctagcagttcagaaatcgcaggccaaccgcaacgagcagaacaaggacattctcacctatatgggcctagcagttcagaaatcgcaggccaaccgcaacttcacggtggagcgtcccgggcgcgtggtgggcctagcagttcagaaatcgcaggccaaccgcaacgaagcgatcccgatgccgacgagtggtgcgggcctagcagttcagaaatcgcaggccaaccgcaaccctcgacgggttcgaggggttcgaccaagcggcctagcagttcagaaatcgcaggccaaccgcaacttgccccgcctaggtgttgccgccgcgctcggcctagcagttcagaaatcgcaggccaaccgcaacggcggcacgctcggcttccactacccggccggcctagcagttcagaaatcgcaggccaaccgcaaccaccagttcaagggcgctgcggccgacaagggcctagcagttcagaaatcgcaggccaaccgcaactgcccgtccttcagcttgcgcgccgcgcccggcctagcagttcagaaatcgcaggccaaccgcaacctccctttcaggacagcagcctgacgattcggcctagcagttcagaaatcgcaggccaaccgcaacccaacacgacgtcatgtcctcgcgatcttcggcctagcagttcagaaatcgcaggccaaccgcaaccgatggcgatatataccggccccaggtccgggcctagcagttcagaaatcgcaggccaaccgcaacggcgggtggccagcagcctgggaccaagatggcctagcagttcagaaatcgcaggccaaccgcaacgaggccatcgaaacgatgctatcgagcagaggcctagcagttcagaaatcgcaggccaaccgcaactatcgcccgctgcgtatatcgcggtagccaagcctagcagttcagaaatcgcaggccaaccgcaactgacggtggcatcgtgctgggccttcatccggcctagcagttcagaaatcgcaggccaaccgcaactgggtcatctggcggcccgccgtgcggttgggcctagcagttcagaaatcgcaggccaaccgcaacgtgccatgacgagcaacggaacgaattacgggcctagcagttcagaaatcgcaggccaaccgcaactagggggcgcggggatcgcggggatcggcaggcctagcagttcagaaatcgcaggccaaccgcaaccgactgtcgcggttgctgaatacccgttcgggcctagcagttcagaaatcgcaggccaaccgcaactttatttcgagggtgtcacgccagaggttgggcctagcagttcagaaatcgcaggccaaccgcaactcaccggttcgggggtcggggcattcgatcggcctagcagttcagaaatcgcaggccaaccgcaacaatgtgcggcagggctactttttcccacgtggcctagcagttcagaaatcgcaggccaaccgcaaccaagggagaccggggtcgcccgcctcgccaagcctagcagttcagaaatcgcaggccaaccgcaacctcggttagcgcgtccacgctggccaccgtggcctagcagttcagaaatcgcaggccaaccgcaacgattggggcgggggaaagccaacagagaccggcctagcagttcagaaatcgcaggccaaccgcaactacgctgaggccaacgccaacgcctatgcctggcctagcagttcagaaatcgcaggccaaccgcaactagaagcccgccttcatggcctcccagcgaggcctagcagttcagaaatcgcaggccaaccgcaactactaggcagcagcatcgcgaaccagacgcggcctagcagttcagaaatcgcaggccaaccgcaactcgggcgctatcagggcggcaagcgcgtcaggcctagcagttcagaaatcgcaggccaaccgcaaccttggacgccaagggacggggaccggcccgggcctagcagttcagaaatcgcaggccaaccgcaaccagagcggggtccgggtgctgggtgttccgggcctagcagttcagaaatcgcaggccaaccgcaacacacttgtagttggcagtcttagccgccgcggcctagcagttcagaaatcgcaggccaaccgcaacgcagcggacatattcgccccgcgcgcccgtggcctagcagttcagaaatcgcaggccaaccgcaactccgtctcaacctggaagcgggtgctggcgggcctagcagttcagaaatcgcaggccaaccgcaactaacgagttgtggtacgccgatcgtgcgtaggcctagcagttcagaaatcgcaggccaaccgcaaccgccagcgcttcgggctcgtacagctcgggggcctagcagttcagaaatcgcaggccaaccgcaactgcttcgaaggccggttcagtgcctcctggggcctagcagttcagaaatcgcaggccaaccgcaaccccagcgccgcttcagccgcagccgtctggggcctagcagttcagaaatcgcaggccaaccgcaactcagtaggcagatggggacagaccccgcagggcctagcagttcagaaatcgcaggccaaccgcaacgcgccgatcggccacaaagcgccgccggggggcctagcagttcagaaatcgcaggccaaccgcaacttaagctcgtcccgcaacagcatcacgcctggcctagcagttcagaaatcgcaggccaaccgcaacgctttcggcaggcttacgaaacggctgcctagcctagcagttcagaaatcgcaggccaaccgcaacctcggcggggcggttgacattcgcagcgatggcctagcagttcagaaatcgcaggccaaccgcaacccaccggccgcgcagatgtcgatcaggtttggcctagcagttcagaaatcgcaggccaaccgcaactcggcgggcaggccgatgcccatcacctgcggcctagcagttcagaaatcgcaggccaaccgcaacgctttgctgccagtgccgaacggaaacgggggctagcagttcagaaatcgcaggccaaccgcaacaggatattctcgagggggtgatcggcgaagggcctagcagttcagaaatcgcaggccaaccgcaaccctgtcgctgatgtagaggcggcaaccgagggcctagcagttcagaaatcgcaggccaaccgcaacgcgggctttggagacacggtgctatccgcaggcctagcagttcagaaatcgcaggccaaccgcaacgagcgacccgccggggagttcctgacgcaaggcctagcagttcagaaatcgcaggccaaccgcaaccgcttccggctcgacgttttgcgaaacggactgatcgcttatggccactctctgcatcgcacataatcaagcaaggggcagcttcgcgcggacggaggttagccgacgtccacatagtcgcgccaagcatccatcaacatccgccgcttggcgaaaaagtccgttcggcgataggctgcctccaccttgtcggggagctgatgggcaagcgccttatcgacgatctccttgggcgtttcggtctcctccgccgcccagtcggtgaaagccgagcggaagccgtggaccgtgatccgctcgtgtcccatatcgcgcagcaccttggtcatggtcatgtcactcagcggcttctcgccatcgttcgagaacaccagaccatcgtccgcctcgcgcagcttccagcgccgacggagcaacgcgacggcgctctcgggcagcggcacgacatgcggtttgcccgtcttcatgcgctcgccgggaatggcccagacggctttgtccaaatccaactccggccaaacagcaaagcgcgtctcgttcgagcggacggccgtgtagatcgtgaagcgcaacgcgtcgcgcccagccgtgggcgatagcgccttcagttcgccgacaaagcctggcacgtccgcgaacggcatcgcctcgtaatgattgtcgcggcgcggctggcgcggcagccccttgcgcacagagcgcagcgccgcttccgttgggcaccagccattgacgtgcgcatagtcgagcaccgtgccgatccgctggagcgtacggcgcgccgtctcaggcaccttgagccagatcggcgccagcacatcgcgcaccatgatggtgtcgatccgatcgaccggctccgcgccgaacgtcgggaaggcatggttctccaggcacgcgatccaggagtcgatgtgcttcttgttgcgccatccctccttcatcgccgcatggcacgtgcgcgccgcgtcctcgaaggtcggcaccgacgcttttggagcagcggacgccttcttcggcgcgatcgtctcgccattctgatatttacgccgaagctcagcgaccgcagaccgggcgtcgcttagcgataccgtatgcgccgagcccaagccaaaatcgcgtcgcttgccatcggcctggatgcgggccacccaagcacgcgaaccgccttcgcggacgacgagatagaggccgcgtccgtccgcgtgacggccgggcttggcggtgcgcacctgtaaggttgtcaatccggacatataactctcccgtcccacaatccgtcccacatttcgtgtgggacggagcggcacgaggagaaattacgtgaactcgttggtgtaggcaaggtactgttatcgttggtaacttggaacggtttgacaccacttgagaaggcacttataagcccctcggctccaccaggtcttcatgcccagagccgtacgggcgatggttctgggcggtgccactctcttattcggtgcgtggggaattgtagagcggttcggccgatcgcttgcccggaaactgattccactgctcggccgcttggccatcgcgggaccggtcggcatgatgccaccgtctgaacttcgcgcgttgggcgcgggtgtggttcgccgtagagagaccgcaaagcgaagacggcggtcggatgccatgtggcgacgggaacagtcgcaaggaatggctggttttgcagttggcgctggtccgtttggaaggccagccggatcggccgcaagttaacggccgctccgttggccgggccgcgatttggccggcggcgcatgaggcgaacagacgatgcattttctcgaccaggccaagatctatctccgctcgggcggtggcgggccgggggcggtgagcttccggcgcgaaaagtacatcgaatatggcgggcccgatggcggcaatggcggccgcggtggcgacatcatcctggaggcggtgcccgggctcaacacgctgattgattttcgctattcgcagcatttcaaggcgccgcgcggcagtcacgggatgggcaagaaccgcaccggcaagggcgctgaggacctgctgatcgaagtgcccgtgggcacccaggtgctcgacgaggagcgcgaggcggtgctcgccgattttaccgaggccggccagcgagtcgtcctgctgcagggcggcatgggcggacgcggcaatgccagctacaagacctccaccaaccgcgccccgcgccagcaccagccgggcgagccgggcgaggagctgtgggtgtggctgcggctgaagctgctggcggacgtgggccttgtcggcctgcccaatgcgggcaaatcgaccttcataaaccaggtcagcaatgccggtgccaaggtcggcgattatgccttcaccacgctggtgcctaagctgggcgtggtgcgccaccgggaccgcgagttcgtgctggccgatatccccggcctgatcgagggcgccgccgacggggcgggtatcggcgaccggtttctgggccatatcgagcgctgccgggtgctgatccacctggtcgacatctcgggcaccgatccggccccggcgatgcgggtgatcgaacgcgagctggagagctatggcgcggggctggatgagaagccgcgactgatcgtgctcaacaagatcgatctcgccgatgccgagctggccgagggtttcgcggcggagctgcgcgcggccggagcggagcgcgtgttcgccatttcgggtgcgaccggcgcgggggttccggccctgctcgacgcggcgctggcgcatctgcccgagcggaccgcgaccgagggcattgcgcccgccccggtgaccgatacggaggagctggacgacaaggagccgcgcgcctggtcaccactcggctgagcgcggcgcagggaggcggtgccgtggcgccggttcctgccggtgatttcccctgcggcgaattggttctaagcgcatcggcatgaccatcgcgcgcctcgccgaccttgctgaccccgccgccacgccgtgtttggtgctgaaggtgggatcggcgttgctggtggggcccgacggggcgccgcgccgcgaatggcttggctcgctggtgacggagatcgccgcggcgcaggcgcggggacagcgggtggtggtggtcagctcgggtgcgatcgcgctgggcgcagcgcggctggcgctggagaagggcgggcgcggcagcctggccgatgcgcaagccgccgcggccgtggggcagatcgcgctggcgggcctgtggtcaggcctgctcgcgggcgaggggttggtggccgcgcagctgctgctgacgctggaggacctcgaggaccggaggcgctatctcaacgcctcggccacgctcggccgcttgctaaaggcgggcgtggtgccagtgatcaacgaaaacgattcggtcgccaccgaggaaatccgcttcggcgacaacgatcggctggccgcgcgcgtggcgcaagccgccggggcggcggcggcggtgctgctctcggatgtggacgggctgtacgaccgcgctccgcaggccgagggcgcgaagctgatccggcgggtggagggcctgaccgaggcggtgcacgccatggccagcggtgcctcgggctcgggggtggggagcggggggatgacctccaagctgcaggccgccgagatcgccacccgtgccggcattactctagcgatcatcaacggcacccacgatgccccgctcggacgggcgatcggcagcgagaccggcaccctgttccagccgacccgccgcgaccgagggcgcaaggcgtggctgggcgggcggcagcggatgaagggcgcgctggtggtggatgatggctgtgcgggcgcactcgccagtggcggaagcctgctggcgagcgggatcgtcggcgtggagggtgtcttccgccgcggcgatccagtgggtgtgcgcgacgagcacgggcggccgctggcgcagggtctttccgaatatggctcggccgagatcgagcgaatcaaggggcatcgcagcgaggagcaggccggcctgctcggctatgccccacgcgcggcggtgatccatcgcgaccagctggtgctgttgtgaccggctattctatggggccggtggcggtgaccggggcgaccggcttcgtcggccaggcgctgctcgacaaggcggcggcacagggaatagccattcgcgctctcgcccggcgcgagcaggccccgcgcggcggtgtcgagtgggtgagcggtgatcttgctgatggcgcagcgctcgcccggttggtggagggcgcgcgggcggtgttgcacatcgccggggtggtcaacgcgcccgatcgtgaaggctttcacaccggcaatgtcgacgggaccgaggcgctggtggcggcggcgagcaacgcgaaggtggagcggttcgtgttcgtttcttcgttggcggcgcgcgagccggggctttccgcctacggccgctccaagcgccatgccgaggagatcgtgcagacctcgcagctcgactggacgatcgtgcggccgccggcgatctatggcccgcgcgaccgcgaggtgctggaactgttccgcgccgcccgctggcgggtggtgccgatgccgccgcctgggcgcagctcgctgttgcatgttgccgatctcgcgcggctgttgctggcgctggtgcctggcttgccggttgcacggcagcgtattttcgagcccgatgacgggcgcgagggaggctggagccatggcgagttcgcgcgcgcaatcggtgcggcggtggagcgcggcgtatgggtgccgcatctgccgcggcgcgtgctgctgatggtggcgcgaatcgatcggctgctccggcgcgacggggcaaagctgaccgccgaccgggtcggctatatgacgcatcccgattgggtttgtgcgcctgcgaaggcgccgcccgccgatttgtggcaggcgcaggtgtcgacagcggatgggctggccgcgaccgcgcgttggtatcgcgcgcaaaactggctctgagacgcgaaaaaaggcccgaccgttgccggccgggccttgaaagttttgggagaggatgcctgtgaaggcccgatcgatatgggccgatccgatctatgctgcaaacgcgaaaagcgcaactgatgttgcgctaaacgcaatcgaacacctcatcagaagacgggttcatagccgggcggcagttcgcccccgttctcgcccgat

SEQ ID NO: 3494 - DNA, 23171 bp, synthetic construct
  misc_feature 1..23171: note = Synthetic
  source 1..23171: mol_type = other DNA
gggcacacatctcccagaacgcctcgccgacacactcgccgagcggatcgcgcttcccggcaacctcgccgacctgcccgatcgcgcgctcgccggcgccgccgcgcatctgtcggcgtggcgcttcaatccaaacggcagcgaaggctatgccaaggccgaagtcaccgcgggcggcatcgccaccgaggggctgtcgtcgaaaacgttggcggcaaaggacgtgtccggcctctacgcgatcggcgaagcggtcgatgtcaccggctggctcggtggctataacttccaatgggcttgggcgagcggctgggcggccgggcaggcgttgtaatcaatccgccacgaccgccgcacgcggctcatggatcgggcagccgtttgccgtgccgcggaaatcggcggacatctgataggccggctggcggacgcggttgatcgaaccgagcggctgatgcgcggcgaggccgtgccacgggctgaatgcgagcgcatcctcgcgcttgaccgagtcggcgccctgccaggccttctgcgccccggcctcgatccgcgcgacggtgacgaacgggctgtcggcttcgtcccacaatgtcgcggcattttcgatcggcatcttggccagatcgcggttgagctggatgcgcacttcccaagcgccgccttgcgccagatccctcatcacatcctcgcgcagcgcatcgggccggcccgccgcggcgatcttctccccggtcaatctggtgagattgacggacaccggcgcaacctggaatttcgcgatgaagtcgccgtagcgatacggcgtctgactgaaataggtctcgccgagcggatggacattgggcgcgccgccgagcgacttgatcgccgcgctttcgccgccgaacgcttcgagcgtcgcctcggtcgcgcggagcgccgccgagaggattttcttcgcccattcggcgcgatcggttgtcttggcgagcagcttcaaattgccgaggaaatgcttcgcatcgggcgccgcgaacgccgggccgttggccatcacgaaatcctgcgtcgtatcgccctcgccccctggcagccgcgcaccctcgacgccgatcaccttgagcgcgagcccgcgcggcgccgaaatgctgtcatcgaggatgtcgcccggggtcgtcgagatgcgcaggatcgccggataacggccaggctttgcgaacagcccctgagcatagtcggccggcaggtcgtcggcgacgatcagcgtcgcgtcgatcagcgcatggcccttggcgtggacgctgcgcacggcgtggccgtaatcggtagaggtggtttgaagaatgtcgtgaagcgtctcgcgcagcgcaacactggtttctgcctcgtcgggctcggcctgttcgacatcgggcgaatagcggacggggggcgcaaccatcggaaatctcctgctgtgactaccccaacccgctgacccgccgctgcgttccgcgagcacggcgcgcgcattgcacgccccgcccccatcctctatagcctgtagccattcccgccccggcccgcgcgatccgcttcgcgcgccgccggggccgctcatttccaggggtatgcgatgccacgccgccgccagatctacgaaggcaaggccaagattctctatgaggggccggagcctggcacgctgatccaatatttcaaggatgacgcgaccgcgttcaacgcccagaagaagggcacgatcagcggcaagggcgtgctcaacaatcggatttccgagcatgtcttcacgctgctcgccgggatcggggtgccgacgcacttcatccgccgtcttaacatgcgcgagcaactcattcgccaggttgagatcgtgccgatcgaagtcgtcgtgcgcaacgtcgccgccggatcgctatcgactcggctggggatcgaggaaggcacgcagctgccgcgcacgatcatcgaatattattacaaggacgatgcgctcggcgatccgatgatcaccgacgagcacatcgccgcattcggctgggccagccaggaggagatgcacgacatcgccgatctcgccgtgcgcgtgaacgatttcctttccggcttgttcgccgcggtcaacatccggctggtcgacttcaagctcgaattcggccgcatctgggacaatgattacgcccgcatcatcctcgccgacgaaatcagtcccgacggctgccggctgtgggacatggcgtcgggcgaaaagctcgacaaggaccggttccgccgcgatctcggcggcgaggtcgaggcttatcaggaagtcgcacggcggctggggctgatgcccgagggcaccgatgcaggcgcggtgctcgatctcgaaaagcaccgcaagcggcgcgagaaataacgtttcggcaatctcttgcggttagtccttcacacgaaatccgcagatgatgccgaacagaaaggcgctgaacagcgcgagctggatatgaccgttgggatcgtcccaaccgaaatattgccgcccgaacgcgaacagcgccacgaacataactatcgccaagccagccatcgcaggcaccccgattgccgcggcgccccaagcgcacgcgctgcagactatcgcacggcgcggtaaatgaatcgtatccttgccgggctggcgcgatcgcggtagcgagcgcctcgccacgccgcagcacgggaaagaatcgccatgaagctgagcatcatcgtcacgctgaagcccggcgtgctcgatccgcagggcaaggcgatccacaaggcgctgaacggcctgggattcgccggcgtcgatgatgtccgcgccggcaagctgatcgagctcgacgtcgccgacgatacgcccgatgcggtgatcgacgatatgtgccgcaagctgctcgccaatacggtgatcgagaattaccggatcgagcggcagtgaacagcgcggtcatcgttttccccggctccaattgcgaccgagacattgcggtggcgctggagcaggtgaccggcgcggcgccggcgatggtgtggcacggcgagaccgcgctgcccgacggcaccgatctgatcgccctgcccggcggcttttcctatggcgattacctgcgctgcggcgcgatctcggcgcgctcgccgatcatcgccgcggtgatcgcagcggccgagcgcggtgtgccggtgctcggcatctgtaacggctttcaagtgctgaccgaaacggggctgctgccgggcgcgctgatgcgcaacgagcggctcgatttcgtctgccgcgacgtgccgttgaccatcggcgagacgcgctccgccttcaccacccgctaccgcgccggcgagcgcgtcagcttccccgtcgcgcaccacgacggcaattatttcgccgacgccgaaacgctcgatcgcctcgagggcgagggccgcatcgccttccgctacgccaagaacatcaacggatcggcgcgcggcatcgccggcgtgctcagcgagcgcggcaacgtgctcggcctgatgccgcatcccgagcgtcggatcgaagccgcgcatggcggcgacgatggccggcggctgttcgaaggcctgttggacgccgtcgccgcttagaccctcgccgagaagggcgagaagttggtgccgcgatcgtacacatcgacgccctcggcgcgcttgaggaaaccgaccacggcgtaagtgacgggcgtcaaaacgacttcccaactcactttcagcacgaactggctggccatcaccatcagcatcgcgcgcgccggccaatcgggcaggccgaaaaaggcgagcggatagaagatcaggctgtccgcgccttcgccgacgatcgtgctgccgatcgtgcgcgtccacagccaacgcccctcggtccagatcttcatcttggcgagcaccaccgaattgagcaggtcgcccgcccagaaggcgacgagcgaggcgaggatgatccgccagccgccgccgaacacgcgctcataggccgcttgtccggtccatccttcggcgacgggtagtttgacgacggtccattccatcagccccatgaagccgagtgcgatgaaccccgcccagatcacgcggcgtgcgcgggcgtagccgtaaacctcggtcaaaacgtcgtcgatcacataggagatcggaaagaacaggatccccgcaccgaacggccacgggccgatgccgggcagatcgatcaccgatcgcttctccgcgccgatcacgttcgacaacagcagcacgacgacgaacgccaccatgacgaaatcataataacggaaatgcccgccggagacggcgctggcgtcgacttggcgtggcgcggcgtgcggctgatcccccatgcggcgtttatgatgccggtttcgcactcgcgcaatccgcgctaggggcgaaatctcgcgcgcccgtagctcagctggatagagcacgagacttctaatcttgaggccgctggttcgaatccagccgggcgcgccaccagaaatccaaagaaaagcgccgggcgctcctaatcgcttgctctttgtgaacgagcagattaacactgaactatatggttcagtgtttaagcccgactctcgacatctcgtttgcggcgctgtccgatgcgacccgccgcgggatcatcgatcggcttgggcgtggcgacgcgtcgatcacactgctcgcagatacgttccggatgacgctgaccgggatgaagaaacacgtccacgtgctcgagcgggcggggctggtcgtgacgcacaaggtcgggcgcgtgcgaacctgcacgcttggaacgcgcggcctcaaggcggaagccgagtggatcgaggcgcaccgccagctcttcgaggcgcgcttcgaggcgttggacgagatcatcaacgacatgaaagaggagagaagcgatgagcagccaagctaacgatacaggtgatgcgccaaaccgcacgtcggtcgagcgcaaaggagaccgcgaacttgtcgtgacgcggaccttcgatgcgccgccgagcaccgtttacaaggcgtggagccagcccgagctgttccggcgctggtggatgccgaaatcggcgaccggcgtttcgctcgtctcgtgcgagatggacgtccgtaccggcggcaaatatcggctggagttcgccgccggcggctcggacaccatggccttttacggcaagtatcttgacgtggtgcccaacgaacgcatcgtttggaccaacgacgaaggcgaagagggcgccgtcacgaccgtgaccttcgaagaccagggcggcaagacgctggtgacgttccacgaagtctatccgtccgaagcggcgcttgaagaagcgctacagggttcggcggccggattgccggagcagctggatcaactcgacgacttgctctccagcatcagcgcgtagcgtcggccggaaacgcgctcagggaactggccgctgcgagtacgtcactccagcggcctttccctcctcgcgttctcgggagaagcacgcgtccaaatcgtattccgtcacggaacaccggcaggacgcagcgccagccagcttcgtaccgggccgatccgtcgcagcacgagccgctcgaccgccagcatcgcgatcagcgtgatgccgaacatcggaagatagaggccaagcgcgacgatcgtcgcgatcagcgcgccgccgaagcgtggccgcgtgagcgggatcggcgcgccgagcaatccgacgggccgccggcgccaccacagcaccgcgccagacaccgacagtgcgaccagcaacaaggcggtcagcgtgccgagcaactggttggcgaggccgaagaacgcgccttcgtggagcgcgatgccgtaaccgaccagccggtcgatccagtggcgctgcgcgaaatcgacgcggctgacgacgcggccggtctccccatcgatcttgagatcggcgcgcagcggccgatcgccggcgtccgacgtgatcgaccacggcgcgccggcgcgggccggcggcgtgatcaacaccggcggcacgacggcgagcggccggaccgtcgcgatcacccgtgccagttcgcccggccggatcggcgtggatgttgccgggccggccatcgtcatcccggccatctggtggccttcgtgatcgccgagcatcgcgtcggtcttcggcgtcttgccgccgaccgtccagtcgatcgggccgccggtggcgccggtaacgtagcgtatttcggtgaggtagccgccccatgccttggcccagggcaagccggtgaggatcaggcctagcgccgcgccggtcacccagatgccggcgacggcgtggatatcgcgccagaacagccttttgccgccacgcaggcggggataaagcacgccggccagccctcgccgcccgcgcggccaccacaaatagagcccggtaagcagcatcacgatcgcccagcacgcggcgatctcgaccatataactgccgaacgcgccggcgagcagctcgccgtggagatggaagatcagccgcatcggccgcttctcctcggtgaccacgtgcagcaccttgagcgatgcggggtcgaggtagacgcgcttgtccgcgccttgccgggtcaccaggatgtcgaccgcaccgtcggacgatgccggcagcacgtatttgtgcagccgcgatcccggcacggcggcgagcgcggcggcgacctgcgcgtcggccggggcggccggcccggtgaccgcgagatgctgatacggccgatcgagccatgcctcgatctgtggcttccacagatagatcgatccggtgagcgccagccagatgacgaacgggatgcagaacagcccggcatagaaatgccagcgccacaccgcattgtaccagcgcgttcccggcgcatggacgctcatagcgtcacccccgcttcgaccagaaacgtccgctgcggataggggtgatagacccaggcgcgatcgttggtcaggttgttgaccccggccgacaggcgaaaccggtcggtcacgtcgtaattggcgcgcagatcgagcgagaacagctccgaagtatagccgtaatcgtcgccccgctgcagcccgtcgagatcggtattgggccggctggcatagcgcacgccgatcaccgcctgcagcttcggcgtgacgtgataacgcagattgccgttcagccgccaatgcgggatacgcggaaattgcacgccctccgacgccggatcggaatcgtttctgacggttatcgcgtcgatccatgcggcgttggcgtcgatgtcgagcccggcgaccggccagtcttgcgtttcgccgatcagctcggcgccatattggcgggtgacgtcgatattcttgtagctcgaggtcgaaacgttgttctggttgaagccgatgaactggaagatcgtgtcgcggacgcgctggtagaacacgctgccggtcaaggtgatcggcccgaagccgtgccgcacgagcagattggcgtcgcggcttttctcgggcttcagattgggatcgcggctgttttcgttgaacgttccgtcaccgttgagcgccccctgaaaaagctcgccgacggttgggaaaagcgtcgccatcgccaggctcagttcggtcacccaatcaccggcaaagacatggcgcaacgcaactttcgggctccacgcgtcggcggtgcgactggcgtagtcttgtgtcgtcaacgcgccgggcgcgctggcggcgatcagcccgccgtcataagcatgccagcgatcgtagcgcagccccagcgtcagccgcgtcgcgggatcgagcgcgatggcatcctcggcgaacgcgccgatcgtgttggtgcgcccgaacgtccgcgtggtcagcgcggcgtccgaggcttcgagccaatggctggtggtgaacacgctctgatcggtctcgtagagattggcgttcccgccgatcgcgatgttgtgcgcgccgaatgtccgcgtcgccagcagatcggcggtataccagccggtcggcccctgctgcgtcagttggcccgcgacatcgtcgcggccggcgacctcaccgttggactggcggttgtcctgccgagcgaaacgcagcgtcgacaggttgagccgcacatcgaacccggcgaccggcgcctcgatcttgccgcccgccagccattcgttcttgtcggcgatgctccagcggaaattggtggcgggattgagcgtatagctgtgcccgtcgaagctgacgaagccggtcgcgtcgccgtagaacggctggcgatcggggccggtaagataggtcttgggatcgagattgcgctcctcgttccaccaataagcgaacagcaattcaccgtggacgtcgcccgaatcgtagcgcaactcgccgcgcacctggtcttggcgcagctgggtgagcgaataatcgccagcgaccggcggcacgacagtggtgccgctcgccgggatcagatgcggatcgacataggcgccggtcaccggcgtgccggcggcgggattgtcgtagttggcagccgaatagccgaacagataatattgctgcggctgcccctggttgacgaggcggcgagccgaaacgcggagcccccacgggctgttcttgggcttgatcgacaccccgccctcggccgaatagccccacagatcgtcgtgcgtggtgaattgatcgaacggctgatagaagttctgcagattgacgaaagcctcggttttggtcggtgcgcgcgtggtgatgttgacgatcccgcccatcgaattgcccggatagcgcgctgaataagggccgtagacaatatcgaattgctggacctcgttgggcccgacgatcccccaggcgggcggatagctgaacgaattgccgaggaagttcgaaatcacgaacccgtcgaccatcaccagcgaccgcgcgctctgcgtcgaatgcgtgccgcgaaagcccggcaccgcattgttgtcgccgatatagcgcgtgcgtacgaagaaatcgggcgcgtatttgatcagatcctcagtgttgaaggcgttgaccccggcgaattgctgatcgccgaggctgaccgacagcccgcgcggctcgatcgagatcggcgcatcgcgctgcccgaccacgaggatgtcggcgttggcatcgggaaggtgcggatcggcggcagcgccggcactcgtggtctgccctgtcgcaaaggccggaggggccatggcgacgcatggcaataacgacgcgccgaacagcgcgccggaaatacgagtcatggaaatagcccttatccgaatgcaactctgccgccctgcgaacaggcgacgtggcgttcagatgaggcttggcggccccgtagcgggcggcggcggtgcggccaacccgtggccaacgtcgaccgtaaagcgcgggaggcgcgagggagtgttggcagcgaccagcggcagatcgagcgtcggcaccgtcggctcggcgagcgccagcgcggcgccggcgaatgggcaagtgtgatcgccgtcatcgtgcttatgatcggcgggtgttgaatggccggccatgcccggcatcgccatcgcatgatcgggcgcgtcgagtgcgcccatgccggtgcagatcgtcagccgcgatccttgggcatcgctgaccggcatccatcccgccggcaccgccaaccgcaccaacaacgcgagtgccagcaccgccagcataacggcgcgcggcgtctcccgcatcgaacgaaacatcggcaacacggggcggctttggcgtgaatggcgcgcggacgcaatgcgcggcatcatgggcaacggtctaaatcgcggtcgcgtcccgacgaccaaacgagacgacaatgtcctgatcgatgccaaggccggaaacaaaaaggcgaggccgtagcctcgcccttatttggtgcagtcgaactgcttgttaacagtcagcccgcgatctctgaactcgatacttgccttcaaaaccgaggcgttgtcaattgtgtagatcgattccggctgcataagggggattagggacgcaaaagaggggggagcaatcatgcgcagactggggctcgacatcggcaccaacagcatcggctggtgcctgatcgagaacgacgcacgcgtcatcgacatcggggcacgaatcttcagcgatggccgcgatcccaaatcgggcgcgtcattggcggtcgatcgccgcgtcgcgcgggcgatgcgtcggcggcgggatcgttatctggggcgacgatcggcgtttctcgatacattgatccgatatggactgatgcccgcggatgccgacgaagccagactgatcgccgcgcgcgatccctattcgctgcgcgcgcgggcgctcgacgaacggctcgagccctatgagatcgggcgcgcgctgttccatctcaaccagcggcgcgggttcctgtcgaaccgcaaggccgaacgccgccagaaggatagcgaggacggcaagatcgccagcggtgcgcggtcgctcgatcaggcgatggccgaggccggcgccgatacgctgggccaattcctcgaccagcgcgacgaaaagcgcgtgcgcctggatggcgacagccagagctatgatttctatccgcagcgccgccatgtcgattacgaattcggccgcatctgggaggagcaggcgaagcacgaccctatcctgctgaccgagcaagcgcgcgccgcgctgcatcgtatcctgttttaccaacgcccgctcaaggagcccgaggtgggcgtgtgcacctttgtgcaaagcgagcggcggctggccaaggcgcatccgctgtttcaggaacggcggctgtatgaggaggtcaaccagctcgaaatcaccgcaccgggcgaagcgccgcgcaagctgacgcgcgaccagcgcgacgcgctgatcctcgagctgcgcggcaagaaagaggtggcgttcaccacgctcgcgcgtcggctcaagctgcagcacggggaaagcttcaacaaggcgagcgagacgcgcaaggcgctgcgcggcgacgaggtctatgccgcgctttccgacaagaagcggttcggcgccgcatgggcgcacaaatcgcccgaagcgcaatgggtaatcgtcgagagattgctcgaggaggaaaatcccgacaggctcaacgctttcctggccggcgaatgcggcctcaacgaggagcatgccagggcggccgcgcgcgccgcgctgcccgaaggccatggccggctcggcgagaccgcgacgcggcgcattctcgcagagctcaagaaagaggtgatcacctatgccgaggcggtgaaacgcgccggctggcatcacagcgacgatcgcaccggcgagatcctcgagcgcttgccgtattacggcgagctgctggcgcaggatattccgccgggcacgcaactggcgtccgatccgcccgaaaagcgctttggcaagatcaccaacccgaccgtccatatcgggctgcgccagctcgagaagctgatcaatgcgatcatcgcggtgcacggccggcccgatcagatcgtcgtcgagctcgcgcgcgagctcaagctcaacgaaaaggacaaggaggagcacaacaagcgcatccgccgcgataccgccgccgccaaagcgcgatcgaacaagctgatcgaggaggggtttgccgataccggcggcaaccgcatgctgctgcggctgtgggaggagctcaaccccgccaatccgctcgatcgccgctgcccctattgcgccgagccgatcggcatgcgcgcgctgttttcaggcgaggcggatgtcgatcatatcatcccctattcgcgctcgctcgacgacagcgcgtcgaacaaggtggtcgcgcatcgccattgcaaccgcatcaagggcaatcgcaccccctatgagcgctggggccatgacgaggcgcgctgggagatcatcgccgggcaagtcgccaggctgcacaaatcgaagcaatggcgcttcggccccgatgcgatggcgcgggtggaaaaagatggcggctttctcgcccgccagctgaccgacacgcaatatctgtcgcggctcgccggcaaatatcttcgcagcctgtatcccgacaaggatgacggcggcgtctatgtcatccctggccggatgacggcaatgctgcggcggctgtgggggctgaacagcctgctgccggatcacaatatcgttgataacgagcattccaacgcgcccaagaaccggctcgatcaccgtcaccacgcgatcgacgccgccgtcgtcgcggtgacgacgcgcagcttgctccaacagatcgcgcgcaccgcgggccaggcggaggacaagcatctcgatcggctgttcgaggggctccccaagccgtgggagagcttccgcgaggatctcggcgaagcgctcgcccgcatcaccgtcagccacaagcccgatcatggccgcagcggccgcccctcgcgccaccgcgacgtcaccgcagggcggttgcataacgacaccgcttacggcctgaccggcgcggtcgccgccgatggcaagacgccgatcgtggtccaccgggtgcccttgatgagcctgaagcccggcgacctcaccaatcccgagcgtatgcccgacgccgcgctgcgcgacgcgctctatgccgcgacgcgcgatctgagcggcaagccgttcgaggcggcgctgcagcgctttcgcgagacgcatccggtgttcaagggtattcgccgcgtccgcgtgcgcgagccgctcaacgtcatccagatccgcgacaaggcgggccgagcctacaaggcgtataagggcgacgccaacgcgcggttcgatgtgtggcggctacccaatggcaggtgggtgacgagctggaaggatcgcgagggcaaggagcaatcggggatcatctcgatgttcgacgcgcaccagccgatcgagccgccccgcccccatcccgccgcgaagaagatattgagcctgcgccagaacgatctgatcgcgatcgagcgtgacggcggcccgcccgaaatcgtccgcgtcgtcaaattctcgacgatcggctcgatcgcgctcgccccggcgaacgagggcggcgcgttgaaggcgcgcgacgcggaaccaaacgatccgttccgctacatctattcgtcgggcggcgggctcaaaaagctcaaggcgcggcaaatccgcatcgatccgctcggactggtgctcgatcccggcccccgcgattagcggcggcggcgcatggaccggatcgtcgatatcgcgaccgatggccgccatctggcgctccaccgcggcttcctgatcgtcgaggagcagcgcgaggaagtggggcgcatcgcgctcgacgatgtccacgcgctcatcgtccacgctcacggcacgacctggagcgcgaacctcgtcgccgcgctggccgagaggggcgcgccgacggtattttgcggcgccaaccatgcgcccgtcgcggtaaccttgccgatcgagggccaccatgcccaaaatgcccggttccgcgcgcagtggagcgcctccaggccgctgaccaaacagctatggcgccagatcgtctccgccaagatcgcgatgcaaggatcgttgctggcggcgcgcggcgtcgccggggcggaagccttcccgctgatcgcccggcgcgtcaaatcgggcgatccggacaatctcgaagcgcaggccgcgcggcgctattggccgctgctgatgggcccggcgttccggcgcgatcgcggcagcccgggcgccaacgcgctgctcaactatggctatgcggtgatgcgcgcaaccgtcgcgcgcgccgtcgtcgccgccggcctgcacccgacgatcggcatcaaccacgccaaccgcggcaatgcgctggcgctggccgacgatcttatcgagccgttccgcccgctcgtcgatgccgtcgcggtggcgatgaccgcggacgggatcgacacgctcgatcccgccggcaagcgccgcttcgcgcagctgatcgctttcgacctgcgtatcagcggcgatgcctcgccggtctcgatcgcagcggcgcggctcgcccagtcgctggcgcgcgcgttcgagaccggacggccggcgctggcgctgttcgagccgccgacgccgatcgaatggtcctcgctcgcgcggatcgcggcggcggacgaccccgcatgactgaggcgagttatttgagcggataccggctgatgtggattttcgtgatgttcgatctgcccgttggcaccaagaagcaggcgcgcgacgcgaccaaattccgcgaattcctgctcgatcagggattcgagatgagccagttttcggtctatgctcgtttctgcaacggcaaggagagcttcgattcgcacctgggccgcatcgagcgccatctccccgaaaagggcgacgtccatgtgctcaccttcaccgaccggcagtatgaaaacatcgtccgtttctcgagccagcggcgcaagaagccccgcaagaatcccgaccagctggcgatgttctgattatgtccggcggatcgtgctagccggatgtgaggtttttgcgttccaatacagcaaattaccaacacatccggcctagcacttcagagatcgagggccaaccgcaaccatgtttctaaatcaatcatcaccgacgtaggcctagcacttcagagatcgagggccaaccgcaactgcttgccgcccgccccaaagatgccgcatggcctagcacttcagagatcgagggccaaccgcaacaatgcgtgcggctgcgaaagtttggccacaggcctagcacttcagagatcgagggccaaccgcaacaacgcggtccatgtggcgctgttcgtccggggcctagcacttcagagatcgagggccaaccgcaaccgggtcggcatcgatgccatgtccagcgccggcctagcacttcagagatcgagggccaaccgcaacccgatcgtcgccgtcatgatggcttgattcggcctagcacttcagagatcgagggccaaccgcaacgatcggtcgcgcccatcagacaaagctcttggcctagcacttcagagatcgagggccaaccgcaacagccatccccattttattgagaatcgacgcggcctagcacttcagagatcgagggccaaccgcaactagagaagtgggatctgtgtcacgtttcgtggcctagcacttcagagatcgagggccaaccgcaaccagcaccggattggacacgccgtaagcccgggcctagcacttcagagatcgagggccaaccgcaacgacgagacccctgcccgcttcacggccggcggcctagcacttcagagatcgagggccaccgcctagtgcagcaggcggccgctggccaacggctcggccggcgtcgcggtcgctgcggtcgcgtcgtcggggagcgtcaggcgcggcaccagcaggtggatcagcagcagcccgaccagataggaacagccgcagatgatcagcaacggcggatagccgcggccggtatcgagcgaccagccggcaagttcgatcatcgccattccagacagattgccgaagaacgccgcgatgctgatcgccgtgccgagataggcggtcggcatcagatcggtcgcgatgccgaaaacgttggtcgagaagccctgatgggcgaatagcgcgaggccgagcaggcccgccgcggtccatacgctcccgctcagcacgagcagcggcaccggcgtgatcagcagcgcgtagagcagcatcgatcccttgcgggcgcgattgatgctcacgccgcgcgcaatcagataggatggcagaataccgccgcttagcgaaccgatcgccgctgcggtgtagataaacgccaccggaaggccaatctcggcctggccgagcccgaaccggcgatggaacagatcgggcgcgaagaacagaaggaaccaccaaacttcgtcgctgaataccttggcggcgatcagcgcccattgccggcgatcggcgagcagcgtgcgccatcgcacgccgccgccacgctgcgctgcgcgttcggccagcggcggcggcggcagcagcagccagaggaagacccacaacagccctaagccgccggtgaccagaaatgccgcgcgccagccgagccaaagcgccagcggcgggatcagcagcggcgtgacgatcgctcccaagttggacgccatgttgccgatgccgatcatcaacgatcgccgctccggcgcgaaataaatcgctgcggttttcacctgcgccggcgtaccgatggattcggaggcgcccagaatcgcccgcgcgccgatgaagctgggcaccgaactgacgaacgcatgcgccatgccggcgacgctccacacgccgacgccgatcgcgaaactgagccgcaacccgacccgatcgacgaaccatccggcgccgagaaaggcaatcgcggccgaaaactgaaaggccgatgccatcgcgctatagtcgccgtcgctccagccgaattgctgttccagggtcggcttgagcagggcgatgacctgccgatccatataactcagcatgatcgccgcgaaggcaagcgtgacgatcgccgatttccgccagcccttgggatattgcatccgccgcctctcctgggccgtcgaaccggccatgggacagcgttgtcatacattcgtgcgacaaaagccagcttgggcgtcagcgcggcgccgggccggccgaaccgcgaacgatcagctgataatcgagctgcaagcggcgcgacggctcgccgccggcaagcagcagatcggccgccgccgcggccagcgcgcggaccggctgccgcacggtggtgagcatcggccagacgatctgcgcgacgggcgaatcgtcgaatccggcgacagacagcgcgtcgggaaccgagagaccgcgccggtgcgcggaggcgagcgcgccggcggccatatcatcgctgctggcgaagatcgcggtcggcggatcgggcagatcgagcaactcatcgacggcgcgttggcccgattgaaagtcgaacccggcttggcggacgaggccaaggtcgatctcgagccccgcgtcggaaagcgcgcggatatgtccgttcaaccgttggccgctcgtcgcatagccgcggtgcccgacgacgaagccgatccggcggtggcccagcccgatcagatagtgcgtcatgtcgaacgcggcttgttcgttgtcgatataggctgacggtgcgcaatcgagccgcgttccaggcgaaatgcgcgcaaaggcgacgccgcggcgcagcagttcgtcaagcacatgatcgtagtcggcgaccggcggcgtcaggatcaggccatcgggatgcacctgatcgatcagcatgacgatatcgtcgagcagcgtgggcgagttgcgatcgtagggctgcgcgatcatccgcaccttatcctgctcgcagcgaacgcgcgtgccgtattgcacctcgtaaacgtaccaggggtttggattgtcgcagatcagcgccacttggaacgaacgatgcccgcccagcgcgcgcgccgcagaactggggtgaaactgcagctcggccatcgccgcctcgatccgcctgcgtgttttctcgccgacatatttctcgttgttcagtacgcgagagacggtcttgatcgagacgccggcaacccgtgaaacatctcggatggtggcgcgctgcggacgatcagaggcactcgcggggcttttcatcgcctagccatagattagcggaacagtgagcccaagagcggagatgagcgacgggagcctatccgccgatcgatgaccgccggaaccgcgcgagaccaacgatgcggtctccacacccggaacaatcggttaaccccatttcgctagagcatcggtttaacaagaggtgttgatgtcacaggcgaaccgcccttcttcgctgttacgcccgatcgtcatcggcgcggtctatggcgtcgcggcggccgcgacgatcctgctgacgcgattcgacggcggcgtggcgcatttgtgggtggcgaccgcgctgctgctcgccgaattgtcgatcgcgccccgcgttcgctggcggcccacgctgttggcttgcggcgcggcgagcttcctcgtcacggcgctgttcggcttcggcattgccgcggcgctgccgctggcggtgatcaacgtggccgaggcggcgctcggcgcactgttgttgcgctggatcgccatcaagagcggctatctcgaatcgatcgccagcgtggcggtgttcgctttagcggccggcgcggtcggcccggcgctgtcgggctttgccggcgcggcgatcgcgacgtggatcaccggcatcggcttttggcaaaactggctcggctgggtggccggccacggcctcggcacgctcacctttgcgccgatcgcggcgatgatcctgcgcgacgagctcgacgaatggttccaccgcgccacggtccgcatgaaggccgaggcggcgctgttgatgctggcgatgatcgccgtctgctggctggtcttcgcgcagacgacgatgccgctgctgttcgtgccgatgctgccgatgatggtcatcaccttccgcatgggccgccccggcgccgccgccgcgatcgtcgcgttgacggtggtcggcgggatcatgaccgcgcggggcctgggcccggtcaacctgatcccgggcagcgccggccagcgcagcgaattcttccaattctatctcgccgtcaccgtgctgatcgtgttgccgatcgccgccgagctgaagcatcgcaaactgatcttccgccagcttcaggaaagcgaggcgcgctacaagctgatcaccgataccgccaccgatatgctgctgaccttcgatcttgatggcacgatccgttatgcctcgccctcgacgcaggagatcgccggctatccgccttcgctgatgatcggcaaaaaggggcgcgcgttcatcgatccgcgcgatcacgatatcgtcatcaacgcgcatcaccaggcgctggcggaagtcggagtgacgcatagcgtcgtctatcgtgcgccgacggagggcaacggaacgcgttggttcgaagcgcaaacccgcggcatcgccgatgaatccggacggccgaccggcgtcgtctgcgcgatccgcgacatttccgatcgcaagctgctcgagcagcatttgtcgcacgctgccagcaccgatccgctcaccggggtcgccaaccgccgcttgttcgacttgcggctcgaggcggatctcgccggcacatacggctgcgtcgcgatcttcgacctcgatcatttcaagcgcgtcaacgatctctacgggcacgaaaccggcgaccgcgtgctcaaggcctttgccgacgaagcgacgcggatcatgcccgccgactatctgatcgcccggctcggcggcgaggaattcggcgtcatcttcgccggcgccgattccgaagaagcggccaaatggtccaatcggctgcgtcaggccaccgccggcctgtgcatcgaaacggtgatcggcagcgctgtggatgtcaccgtcagcgtcggcatttccgaattcgttgcgggatcggagcgcgccgatatactccgcgccgccgatcacgcgctttacagcgcgaaggcggccggccgcgatcggctgcgcatcgcggcgtaacgcgcggtaggattcaccatcaccggcggctacgctggcgcaatgtcagacgccattcccgccgccaccgtcattgtctttcgcgaacgcgacggcgcgccgcccgaattgctgatggtcgagcgcgcccaggcgatggtgttcgccggcggcgccttggtgtttccgggcggccggatcgatcccggggatcatgctctcgtggggcaactcgcaggcaacacggtagaagacgcgccggcacggatcgccgccatccgcgagacgatcgaggagaccggcatcgccatcggcatcgcagagcgtattaccgacgcggacctcgccgatcttcgcgccgggctgcacggcggcgcaccgttcgccgatctgctcgccgaccaggggctgacgctcgatctggaggcgctgacgccgttcgcccgctggcggccggcgcacaaacatatgcgcattttcgacacgcatttttatctcagccagctgcccgccggtgcccccgatccggccgtggacgcgactgaaaacgtgcgcgttttctgggccagtgcacaagcggttatcgacgacgccgatgccggccgcgcaacgatcatcttcccgacgcggcgcaatctcgaacggctggcgcagttcgcctcgttcgacgaggcggttgcggacgcacgcgctcatccgatccgccccgtcaccccctggatcgccgaccgagacggcgcgccgcacctctgcatcgacgacgatctcggctatccggtgacgtccgaaccgctcaccgacagcgtgcgggggtgatgatcaattcttcgctttatacgtctgtgtaaactcaagcgtcatgacgccttccaccggtttacccgccttgctaagcgccggcccgacctgttttcccaacgggaactgcgcgcatggatcgggtcccgtcgtgcttggcggcactactgtacatccccgagattttccggtcggatcaagcatcacttctattttgcggtcggccattctgacatccccgagcgtcagatcgatcgctgtagacatcgtcggtaaaacccagcgcacagcggaggaccatgttgacgggattgctccccccttatcgtcgtgcgctggcgtaaaatgggcctttttcatggcaatcgcacaggttgcctcgtccaaggtgctggagccgctgctcgtcttcaccgtgcacgctgtcacgcgaccagctgcgtctatactaagtgcataggtcacgcgcccctgctcgtggcgtcggattgcatcggctggatagtcgtcaaaaccgacccaagtcccgggactttccgccggctcagccggtgatgcccggcccgtcgtttgtcctgtcaagagtagtatcgtgattacagcgatcatcgacattgctccggtccacctcagttcggcgcgatctcgatcgtgtcggatagcgtgtaggtgcccgtcaccggcttgccgcctttggtcagcggggcggtcaactggcggccgttggagaatgcctggcatggattggcttccgggcgcgccttctttaccgccgtacagcccgtcaccttgccgtcggcggcgagcgccacgcgtaccgcgaccaccggcacgcgcaccgcgcctttgctgaggtcgatcggcttgtcgttggccgggccgagccgccagttgctcgtcgaggcaaaactgccggcgacttccctgccgctggcgtcgcgcgcgggctggaagcgggcgttggcggtgacggccgcacaggtcgcctgatcgaggctcggggcgccgctgcttgcggtgatgcggcatgccgtcacccgcccggccttgtctaccgcaaggctgaaaccgacctggccttgctggtactttgccttggcgtcggccggatagggtgtgccttgcatccacgcctgcggattgatcggcttgggcggtgtcgccgttgcggcctgagcggcgaagagaagggcggacaaggaaatgatactcaacgcatttctccgacgagggaaaagccccgccggaagtgatgccgcgtcagcgggatgcgcgcaacgtcaattcggcaatgccgcggtatcgaccttttccacccaatgcggaaagaacgccggttgccggttcgaccagcccgacgccgtcgccgccgcctcactgatcgactgcagaagcttgcgccgcaattcgggatgaagatgcggcagcgccgccgccgcgcagaatgccgccggcaaccacggccgcacctcggcgccgatcagccgctcgtaaaggaagcgatacgctgaaaacgtcgtcagccgcccctgcccgagatcgaatgcgctgacggtgatcaacggcgtcatgaacggttccaccgaatcgagcccgctgtcgtccggcacgatcgcgcgcaagtcggacagacgatcgtagagccgggcctgcgcgcgaatactcgccgcctcgacaacgtcacgcgaccagagcgccatcgcgtcgtcgcgatcgaggccgatatcgagcgaacgtcgcacgtaacgctgcgtcgccgcactgaacccggcaaactctttcatctccgccagggtcatcgcgccctgcgcctgcttgatccgagaacccatgtcgtcaccccgcccatgtgcgtcgaacagtgtcattcaactgtgccgaacatgcgccaagatggttaacacgagccttaacgcagcgttcgtccggcattcacgaaggaatcacggatgctgctgcgttgcaacaaagcttgcgacgaaccgagccattccaaaccgaaatgatcgccaagtgcgacagttcggcaacaaatgggatcaatccttgtccgaactcccctcccgctcggcatcttcgtcatagccggacgacggcgcgggttcagtgttgtgcaccggctgcgtgctcgccgggggatcggaagcgtccatggactcatccagcgccgcatcgagccgcgcgtccttgttttcgggatcgcgttcgaggcgccgggcaatcgattcatcctgtccggcactctggcgcggatcgcggccatcgccgcaatcggcttggggatcgggcggtgtcaccgccaggctgtcgagcgccttggggtcgatcgtcttgtcgctatggtccacgagaagtctccttcgccgcacagaacgagcaggaacgccgcgcgttcctctcaaacccgccgaaccgagacgcgttgcgcgatcatctgcgcgtcgccgaataccgtcatgaacgcgatgtcggtcgcgtcgcggccgacgacgacgcgcgccagatcgcccggcgcggccatgccggtggcgtcgatcagctgccaggcgccgccgagccacagttcgcacacggcatgaaaatccggcggatcgacgcccggcgcataggccgagacgcaccgcgccggaatgccgcctgcgcgcgccagcgtcgccagcagatgcgcgtaatcgcggcacacgccgcgccgctcggcgaaggtcatcagcgcggtagtgacgcccgatgtcgcgccggcggagtatgttagattagcctgcacccaatcggccagcgcccg

SEQ ID NO: 3495 - DNA, 23168 bp, synthetic construct
  source 1..23168: mol_type = other DNA
  misc_feature 1..23168: note = Synthetic
ccgagctgcgggcggcgggagtgaccgcggcaacgatgagccgcatggagcgggatggcgaggtgctccgacttgcgcgtgggctttatcaactccctgatgcgccgctcgacgcgcatcacagtctggccgaggcagcgaaacgggtgcctaagggtgtggtctgcctcgtctcggccctcgcgttccatcaacttaccgatcagctcccaaggcaggtatggatcgccatcggccaaaaggattgggctcccaagggtgatggggcgccagttcggctcgtgcgcttcacggatcgcctccttaaggaaggcgtcgaatcccacactgtcgaaggggtgcccgtgaaggtatttggggtcgccaagacggtcgccgactgcttccggtatcgcaacaagatcggcctgtcggtggcgattgagggcctccaggaggcgctgcgtcaacgcaagacaaccgctggcgaaatcgtcaggcaagccgagcgaggagcgatcgcgacggtcattcgaccctatctcgaggcgctgaccgccaatggctaaggagctcaagaatatcggcgcttctgtgcgcgcccgcctcctgcaggtggccaaggcaagcggccagagctttgatcttgtcctaacgcgctttgcgctcgaacgactcctcttcaggctcagccagtcaccgcatgcggaccgcttcgttctgaaaggcgcgatgctgatgatgagttggtttgaggatccacatcgcggcacgcgtgacctcgatctgttggggtttggcgaccctgaacctgaggcgatgctcgcgacatttcgggacattctgacgctcaacgatgatgatggtgtggaatttgacgtcggcgctcttcgcgtcgatcgcattcgcgaagagctcgaatatggcgggctgaggctgcgaacaaccgcctcgatcagcggcgccaggatcaatctgacgatcgacatcggcttcggtgatgcgatggaacccggcgcggagatgctcgactatcccaccatgttggcgtttcccgcaccgcgtctgcgtgcgtacgcgcgcgaaactgttattgctgagaagtttcaggcgatggtcgagcttggacgcgcgaacagtcgcatgaaggatttctacgacatctggatcctcagcaagtcattcgatttcgccggcgacaggctcgcccgcgcgatcgctgcaacgtttgcccggcgcgagacagcggttcctgtcgatttgcctgatgcactaacgccggcgttcgccaacgatgaacaaaaacagcgacagtggaacgcctttgtcagggatgtttccgctaatccgggaagcttggaagatgtcgtgaccagcttggctgattttctgatgccgcacgctatacaagcgcgctcttcaaataataatggttcaaagttgtaattcagatatttcctttggagatgactgaagaggggggctcgtggatatattcgatctcgatcaagcattgatagagcgatacgaatcgttcgcgcgctccttttcggagatccacgcgccggaaatccgcgctcaggtcgatgctgcatataatgagcagcgtttttggccagagcccctcattaccatcaatccgcatttcgaggccggtcattctattgaccagcttgtcgctcaaggtgtgttggatccggccctcagcaagatattcgccggcggtcctgaccgggcgccgatcaagcttcaccgccaccaggagcgtgctgtcgcgaaagcgcgcaatggtgagagtttcatcgtcacaaccggtacagggtccggaaaatcgctctgcttcttcttgccgatcgtcgatgcagtcgtgcgcgcgcggcgcgcaggcgaggcgcagcggacgcgcgcgatcatcatttatcccatgaacgcgttggccaacagccaacttgaggagctcgaaaagttcatcggcggctcaggggtcgaagaggagttacgcccgaccttcggccgctatacaggccaagagagcgatgcggatcgacaagccatcgccaaggccaagcccgacattttgctcacgaacttcatgatgctcgaattgctcatgacgcgtcaggacgagctcgatcgcgccgtcatcgccaatgcgtgcggcttggatttcctggtgcttgacgaattgcacacctatcgcggccggcagggcgcagacgttgcgatgctggtgcggcgcgtcaaggaccgcctcgtcaaagagggcaagctgctctgcatcggcacctcggcgacgatgtcgagcgcgcaagatgagatcgagcgagcaagtgccgttgctcgtgtcggcaagctcattttcggggaagaactgagcccggcctcgatcatcgacgaaaatcttgcccgggcgacggatcctcgcatcaacagcacaagcctcggagcaacactcgtcgatgcggtccggtcgccaatccccaccgggctcagggacaaggagctgtccagcaatccgcttgcctgctggatcgagactgaaattggactcgctgaaggcgaaaagctgcgtcgtcgcccacccatgacgttgagcgacgcgacctccaaactggcagctcagacgaacattccctctggggaatgcaggaacgctcttgcaggaatgctgtctttgatggggcgtcgcgaagatcttcgcggcggcatcagcgatcgtgcatttctggcgtttaagcttcatcgctttatttccggcgcggggcatgcctacgcaacgatcgaacctgccaccagccggcgtgtcgtgttggaagggcaggtcttccacccctccgatccgaatgcgcgcctatatccggtcttcttttgccgagaatgtggccaagaacaccatagcgtgcgcattgagaatgcgctcgatggtctccgggttcttgcgcgggccatcgacgagccggcgagtgaagacccagaaccagacggctcgcgaaccggcttcctaattcccgcggtcaatgccgactttcagttcggcggcgctgttgctgactatccggacgattggcaggaaaccacgccggcaggccaggaacgccttaaaggagggcaccgcggcaagcatgaggggcaactcctttttgtgaagcctgatgggtcgctgggcgatgatggggtgccaacctggttcttcagcggcaaatatcgtttctgcccccattgccgccatcagccgcctcaacaggcacgcgacatcaacaagctcgcgggcctgtcggctgaaggccgcagttcggcgacgacgctcatcgtctcgaccatcctggcttggatggaggccgacggaacgcttgaggaaagcacgcgcaagctgctgggcttcacagacaatcggcaagatgcggctctgcaggcggggcatttcaatgatttcattttcgtcagcttgctccgtggcggtatcttacttgccgtgcgggacgcaggcgagaaggggctcgccgacgttcggttcggggaggctgttcgcagggcgcttggcttcgatctggaggagtctgagcggctctccgattggatggccgacccccgcgtaaagggcttccacaaccggcaggccgccgaggaagtgttgacgtcgatcctggcacatcgcgtatgggcggaccttcggaagggctggcgtttcacaaaccccaatctcgaagaagcaggcctcgtggaggtgcggtttcccggactgggtgagctggcggccgacgacgaagagttcgctggaaatccacggctggcggccagcacgccccaactacgggccaggctcttcacgctgcttttcgactatatgcgtcgcggccttgcgattgccaccgaagcgttggatcggcagcggattgtgcaggtcgccgagacatccagaaatcacctgcgcgatccctggctgatcgatcaaaacgaagaacaggaactgcggcaggcaggattcctgatgattgatccgccgagcaagacggagatcagcgctgcggaagatgtactgattgtacgagcgggctggcggacggctttgggtaaggccctgcgcagcaaggatctgtggggggagccgcttccagtcaaagagtatgacgatgttatcgccacgctcctgtgtgcggccgaaaaccaccaggtcgtccggcgggtggttaccggcggagaagctcctgcgtggcgcctgtcgtcgaccgccttgcgcctctttccagcgaccaagagggccgatgggaaacgcgaaaatccattttttcgggcgctctacgaggatgtcgccgagatgcttgggcaggaaggtaacttgcccttcgccttcgaggctcgggagcacaccgcccaagtcgatcaaaaagttcgtgcttggcgcgaagatcggtttcggttcgggaagtcagatatcgaaaggattgcccagaatcgggacgaaatgcgccaggaaggcgaacccgccagtttccttccggcgctcttctgttctccgacgatggaactcggcgttgatatcagcgcgctgaacgctgtctttcttcggaatgcaccgccaacaccggcaaattacgtgcagcgagccggccgtgctggccgcagcggtcaagcagcgctggtcgtcacctattgtgctgcgcagtccccccacgaccaatattacttcaacaaccggcaggggcttgtcgcgggcgtggtgaagccgccagccctcgatcttgccaatcgcgatctgttgcggagccacctccatgccgaatggctggcggctgccgtggtgccgctgaagccgtccatccctgaaaacttgaacatggcaacaccggagatgccgatctccgatccgatccaagcggcgttcgaaaagcttgccgcaagcggagcggcaaagcctacgatgcgccgccttcttgatcagacagtcagcgcggtcgagttggccgacgcgccgtggctggccgatatcgacgccttcgtcgatgaaaccaaccgggaagccgcgcagaatttcgcaggcagcttcagtaggtggcgggagctctaccgaagcgcacgccgcgagcaggatgaggcgcatcaaatccagcagaagacgtccttcaaaccgggtgaacgcaaagaggctgcgcgccggcatttccgggcgactgaagaacttgacatgctcgagcgtggacaggcttcgaacggttccgatttttacacttatcgatatctggcgagtcctgcgctgctgagggcctcgcacatgatcccatggtccgattgcacgaccgacgcacagcgcctcgacgtgcataatggacttctactgtccgctctgtgggacgccgcattcgatgcggggctggtgacattcgacgacgatggcgcgattttaacctctcctcagttggaggtcgctgcgtatcaagcgctaggtgtaggaaagacgctacggttggcactacgggacgagcatcggccctatctagcctatcaccgtaaccacgtttggatgcagagataggcaagggaagcggagcgctcgcgatactccggccgcggcttaatggcgctgcttgatgaagcgtgatatggctcgaatgacggtacttcttgaggcgcgccgaacggctctgtggagcgacacgtcggtagtcatcgggcggttgatgtcgatagatggcgaaatcgcgaaatattttttccgatgattttctctttaaaatcaacatcgtaagattttgacggcccatgggtcggctttcggtgtcggagagaagaaaaaacccagctagatcaatggcctagctgggtttagaacaatcgagtgggagtgaagcggaagaagtgaacgcgcggggcgcgttcacccgcttcactcagcgcgacggcgcgccggagcggacggcggcgatcctggcatagaattgcattgagaatacaacgtcgtatcatctatcggatgccgtctagatcatcacgccgcatatcggccatcagttaggcgccgggccatgcccagaccggcaagtgcgtcgaggatggggcggatggtcgcggggcgcttgcctttgaaattgcgggcgatgtcctgtggtccaagcggccgactcgcccccgtcaggacggcctgcaccacgccgatctgctccggcagactggtcggccagggaatgacattcccggtgggtgtcgccggcacgtgccccaagtcgagcgtctccgtcactggcgcgcggtagcccggatcctggaattcgggccggagatagcggatcaggccccgcgcttcttcggcagcgcgttccttgttgagcgctaccaatcgggagaggatcgtctcgtcatccaaaataccggcacgatgttcgtcgccccagccataggcgtctgccgcggcggtatcgatcgcctcgtgatgctggcggatcagggtcaccaatccccgatcatggatgtcgcgctcagcatcggtgagcggacggccttcccgcagtccctccagcacgttgtagagcttggtaagcgtcagatcgggatgcgtggcgagtacacgcttgcgcagtgtatcgagtgcttcggcttcgatgcggatacgctgcttaagcgcgtcgggtacgtcggtggggaaggggtcaaagcagcgcgaattgttgtatctgggacgatcttccagcgtaccccccatggcaagtgcccatcgcagatgaacacggctacttagcatcccatggatatacgcgtctgaaataagaatgttaatgagcgagtcgtccggtaatattgaagagggaaggaactggaatattctatgctttgatgtaacaacggtcgctatatagcgcgcaatacccggtatggctttccgaagatcggacctgggttcaccgaatatccaccaatttttgcgatatgcggctcggttattgaaatcgcgatggggctttacggtcgccaaaggtgttgatatacgctaggatggtgttcgcgcacctgatcttcactcagcccgtagaggtctatcgcgaagacaccgcgcgggcgcccggcgaggtcgcggccattgcgatagggaaagatgacgtccggctcggtcgaaaggccgcgccggactggcgctgctggctgctggctgctggctgctggctgctggctgctggctgctggctgctggctgctggctgctggctgctggctgctggctgctggctgctggctgctggctgctggctattatatgtagagatttcgctgaaatagtcaagcattttcaatgtattggacgaaatttttctcgcttcttcgggcgtcacgatgaagccgttgccgtgcagcttgacgcccggcgagcagagcctgtcattcgccttgagtgcaaccgtagccgtcaaatccgcccctacacgcagatcgctaccgatgacgcccatgcggctggcgaactcgatccggccgggtgcatcgctctcgtccgtgacattgagcaccagcccctcggccttgccgggggcggcgactgtcatagcgattcgcaccgccgcgccgtccttctcgtccacccaggggtgattggggatggcgaagcgcagcgacagggcgtccttggcgtcgaggtgttttgccatcacgcgccggctgaacaattgggtgatcgaattggtggtgacgaagccgaaccggcgcgtccctcccttgcggactgcaagcgccgccttgtcccaccagtgcatcacataatcggcgctctcggggacgtcggtggtacggaacaaggcttcgaaatagccgttgccgaggcggtcccgaaggtatttcgcgccgatgaacggcggattgccgatgatgaagtccgccttcggccattgggctgcccgcggatggaggtagcgatacgtctccatctgtgcgtcctcgtccggcaccaagcgtcctgtcacggaatgcggcttcatcgtctcgccatcccagcgcgtcacggggaggccgtcctcgtcgcgttcgagttcccggctgtcccattcgatcagcgcatcgcggttctcgatggtgcggatatcgcgcaggatcggctcgggcggggagcgatccctgccgttcacgcgaaaatgccattgcagatagccgatccacagcaccagctgcgcgatcgcagccgcgcgcgggttgacctcgatcccgaggaagttttcgggcgtgatggtgtggccggtcagctccgcgacatattgcaggtcgccgagctccatgagaaggtcgagcacttcgccttccaactccttcatccgcgccatggcgacatagaggaagttgccggtgccgcaggctggatcgagcacgcgcgtagcggcgaggcgcccgtggaacgcttcgaccgtgcgccgggcctgctccggcttgtcctggtcgatcagctcggcgacggcaacccgaacgcctgcccaatctgcgcgcattggctcgatgatcgtggggccgaccagccgctccacataggcacgcggggtgtaatgcgcgccgagcttcgcgcgctccttcggattgagggcgcgttcgagcagtgtgccgaagatcgccggctcgacttcggtccagtccttgttcgaggcttcgatcaagaccttcaattcgtccagttcgagcggtagcgccgcggtgtccttgaacagatagccgttgaaatgcttgaccgggatgccgaggccgggcgcgaacgcgccgctgtccattgcacgccaaagagcggagagttgatgatgcagatgctcgggatggtcgagctggcctcgcagcaggctcttgaagctgtcccgcggcaacagcacacctgtatcctcggcgaacatggtgaacagcacccgcatcaggaagccgctgacggcctcggcagaatggccgcgtgactcgagtcggcgagatacggtcgcgagcagatcggcgacctcgcgcgtgacccgcgcggcctgggccgatggatcgaggctcatcggcttggtccagatcgccgccagccgcttgcgcacttctgggtctcgtaggtcgtcgagcatgatgcggtagcgtgcccggtccggaaactgggcataggctttcccggtgccggtgaaatccgcatagacctcgatgcaatagccgatgtccgcgatgagcagtaaaggcggccagccatggtcggagggcagggccctggcatagcgttcggcctgacccttggcctgcaccatcgccttcgcccagccgggcgttccgcgccgcgcggtgccgcgcttcaggcgcgtggatgcggtctggccgaacaggtcgaggtcgtcctccccatgttcggccgcggcacggtcggcgtcgctgccctgcttggcctcaaggatgaaggcgccccgcttgtagagatcgatgcggccgaagctgaaggttccgtcgccattgtcctggaacacgcggcgttcaaagacatagtcgttgtgggcgtcgtcagcgcggctgccattgggcggcgggatgccgatgaggtggcacaggccattgatgaagctttgcgtgttggcgagctcggaaccgccggtgtcgcgccaacgcgcaatgaatgcctcgatctcggactcgtcccccatgcggtgaacctacagatcctggcgacaaggagaaggcggggccgtagccccgcccttatttggtgcagtcaagctgcttgttaacagctggcccgcgatctctgagcggctaaactcgaccattttgatcatgatgtcaattgtaatggcgcccccttcctcgcaagctgcaatagggggcgccgatcagagagggccaattgcaacacgtggctgcgcacacgccaactcgctcaaattaggatgcattgagcaggtgacaagtagtaggcgtggcgtagccacgtggggactggactctatcagcccgtgagcatatgaggcctgtgccgctgttcagcagctggttgcggggaaaacgaggcgggaagggaattcgtccttcccgccattgagtggggtgggacatgcgcaggctgggactggacattggggccaacagcatcggctggtgcctggtggaatttgacgaagaacatccgatcgggattcgtatcctcgacatcggcgtccgtatcttcagcgacgggcgcgatcccaagactggtgcaagtcttgcggtcgaccgacggacagcgcgggcgatgcggcggcggcgtgatcgttatcttcggcggcgctcggtatttctcgacagcttgatccgatacggactgatgcctgccgatacggatgaggccaggctggtcgcggcgcgcgatccctattcgatccgtgcccgcgcgctgatcgagcggctggagccgcatgaaatcggccgcgcgctcttccacctcaaccagcgccgcggcttcctgtccaaccgcaaggcggagcggcgcagcaaggacaatgaggacggcaagatcgccagcggggccaaggcgctagaccaggcgatggcagaagcggggaccgacacactcggtcagtttctcgcgggccgtgcggagaagcgcgttcgcctgaacggcgagaaccagggctatgatttctacccccagcgccggcatgtcgcgtgggagttccagcgcatctgggaggagcaggcgaagcatcatcccgccctgctgaccgaggaggcgcgcgcggcgcttcaccgcgtgctgttcttccagcgcccgctcaaggaaccggtggtcggcgtgtgcaccttcgtgcattccgagcgacggctgcccaaggcgcatcccctcttccaggagcggcggctctatgaagaggtcaaccagctcgagataaccacgccgggcgaagcgccgcgcaagctgacgctcgatcagcggaatcatctgatcctgctgctgcggaacaagaaggaagtcgccttcaccacgctgattggcggcaaggggctcaagctccagcagggcgagagcttcaacaaggcgagtgagacgcgcaccgtgctgcgcggcaacgaagtctatgctgcgctcgcccacaaggatcgcttcggagatgcctgggcgcacaagtcgctcgagcagcaatggacgatcatcgagcggctgctcgacgaggaagatccgggcaagctccataccttcctgacgggcgaatgcggcctcgacgaagcagcggcgtttgcggttgccaaggcgccgctgccggaggggcacggccggctgggcgagaccgccacacggttgatcctggaggagctgaagaaggaagtcgtcacctatgacgaggccgtccggcgcggcggctggcatcacagcgacgaccgcacgggcgaaatcctcgatcgcctgccctattatggcgagctgttggcgcgcgacattccacccggctcgcaggacccgtcggacccgccggagaagcgctggggcaagatcaccaaccccaccgtgcatatcgggctgcgccagttggagaagctcgtcaatgcgatcatcgccgttcacggccggcccgaccagatcgtcgtcgagctcgcgcgcgagctgaacctcggcgaggacgacaagaagaagcatgaggcgcgcattcgtcgcgacaccgccgccgccatcgcccggggggagaagctggagcaggagggcgtccccaataccggcgccaaccgcgccctgctcaagctgtgggaggagctcaatccggccaatccgctcgatcgccgctgcccctattgtgccgatcccatcgggatgcgtgcgctgttttccggcgaggcggacgtcgaccacatcatcccctattcccgctcgcttgacgacagcgccgggaacaaggtcgtcgcgcatcgccgctgcaaccgggcgaagggtaatcgcacccctcacgagcgttggggtcatgacgtggatcgctgggacaggctcgccgggcaagtcgcgcggctgcataagtcgaagcaatggcgcttcgggcccgatgccatggagcgcgtcgagaaggacggcggattcctcgcgcggcagttgaccgacacgcaatacctttcgcggctggccggcaaatatctgcgcagcctctatcctgccaaggaggacggcagcgtctatgtgatccccggccggatgactgcgatgctgcggcggctgtgggggctgaacagcctgcttccggaccataattatgtcgagaacgagcacagcaacgcgcccaagaaccggctggaccaccgccatcatgcgatcgacgcagcggtgaccgcggtcaccacgcgcagcctgctccagcggatcgcgcagaccgccggccgggccgcggataaggaccttgaccggctgttcgagggtctggatcagccatgggagggtttccgggaggacctgggcgaggcgctcgcccgcgtcaccgtcagccacaaggccgatcacgggcgcaagggccgcccctcgcgccatcgcgacgtgacggccgggcgcctgcacaacgacaccgcctatggcctcacgggcgacgtggcggcggacggcaagacaccgatcgtggtccaccgcgtgccgctcgccagcctcaagccgggcgacctgaccaatccggaccggattccggacccagcactgcgcgacgcattgtacgaatggacgcgcgatctcaccgggaagccgttcgaggcggcgctgcagcgtttccgcgacacgcaccccgtcttccgcggcatccgccatgttcgcgtgcgcgaaccgctaaacgttatttcgatccgcgatgcctcgggccgcgcgtacaaggcctataagggcgacgcgaacgcgcggttcgaattgtggaggctccctgacggcggcctcaagacgcgcgtcgtcacgatgttcgaagcgcatcagcagaaacaggacgatcgcccgcatcccgccgccaaacggttgttgaccctgcgccagaacgatcttctcgctgtcgagcgcaatggaggaccacgcgagatcctgcgtgtggccggcttcaacgtgcagggccgccttacgctcgcggccgccaacgaagccggcaatctcaaggagcgggacggcctgtcgaacgaccgtgatcccttcaaatatgtctacctctcgggacgcagcatcgtgaaagccaaagctcgccaggtgcgtgtcgatcctctcggccgtctcttcgaccctggtccccgaaattagcgaaggggcggggggaatcatggaccgcatcgtcgatatcgccactgacggccgtcatctctcgctctatcgcggcttcctcgtcgtggaggaacagcgcgaggaggtcggccggatcgcgctcgacgatatccatgcggtgatcattcatgctcacggcaccacttggagcgccaatctggttgcggcgctggccgagcgcggcgcgccggtcgttttctgcggatcgaaccattcgccggtcgcggtcacgctgccgatcgaggggcatcatgcccagaacgcccgtttccgcgcgcagtgggatgcgtcgaagccgctctgcaagcagttgtggcgccgggtcgtagcggccaagatcgcgatgcagggatcgctgctggccgcgcgcggcgttgcgggcgcggacgcgtttcccttgatcgcgcggcgcgtcaagtcgggcgattcggacaatctggaggcgcaggccgcacgccgctattggccgttgctgatgggcgccgaattccggcgggaccgcaacagcccgggcgcgaacgcattgctcaactatggctatgcggtgatccgggcgaccgttgcccgggcggtgatcgccgcgggcctccatccgacgatcggcatcaaccacgccaatcgcggcaacgccttcgtattggcggacgatctcgttgagccgttccgccccctcgtcgatgcgctcgtggtcgccatggtcgcgcatggaatcgataccctcgatccgaagcgcaagcggcaattcgccaggctgatcgcgttcgatctgcgaatcggcggcgaagcctcgcccatgtcgatcgtagccgcgcggctcgcgcaatcgctcgcgcgtgcgttcgaaaccggacgcccgtcgctcgcgatattcgatcctccgacccccatcgaatgggcggcgctcgcccgaatcgacgaaggcgccgaggcgatcgattgaccggcgcctcctatctgagcggatatcggctgatgtggatcttcgtcatgttcgacctgcctgtcggcaccaagaaacagatgcgagacgccgccaagttccgcgagttcctgctcgatgaaggcttcgaaatgagccagttttcggtctatgctcgattctgcaacggcaaggaaagctttgattcgcacctttcgcgaatcgaacgcaacctgccggagaaaggcgatgtgcacatcctcaccttcaccgaccggcaatatgagaacatcgtccgcttctcgagccagcggcgcaaacgcccgcgcaagaatccggaccagctcgccatgttctgactcgcatgcccgaaacaaggctcccggatgtgcaagtttttatcgcgtagtcagtaggttacttgcacatccggtttagccgctcagagatcgggggccaaccgcaacagcgccaacgagctgttccccagcgatcgcggtttagccgctcagagatcgggggccaaccgcaacggcgcggctcgcgacataggtcacctggcgggtttagccgctcagagatcgggggccaaccgcaacgagctggatgatggggagcggcttcgccgggtttagccgctcagagatcgggggccaaccgcaacgtgatgtcgccgtgggtttcggcgaggtccggtttagccgctcagagatcgggggccaaccgcaacgtcgctggccgagcaggccatcggatgacgggtttagccgctcagagatcgggggccaaccgcaactttttgtagcgcgtcatccccttccgcgggggtttagccgctcagagatcgggggccaaccgcaaccttgatctcggtgaagtcgccgcgcagcggggtttagccgctcagagatcgggggccaaccgcaacggagagcacattcggattgcgtcccggccaggtttagccgctcagagatcgggggccaaccgcaacggatcctgcatgtagatcgtcacgcccgcaggtttagccgctcagagatcgggggccaaccgcaacgggtggggggtcgcaggggggaggaccgcgggtttagccgctcagagatcgggggccaaccgcaactgcaccagcggcgtcttgccgtcgtcgaacggtttagccgctcagagatcgggggccaaccgcaacctaaacgtgtggcgcgttgctcgggggtttggtttagccgctcagagatcgggggccaaccgcaacgaaaagatcgtcgcatatgaattgaagcttggtttagccgctcagagatcgggggccaaccgcaacgccgacgccccacaggacgttgccgcgatcggtttagccgctcagagatcgggggccaaccgcaacaagaatttcccaggcaagaagaacgctcgcggtttagccgctcagagatcgggggccaaccgcaacctgaccgaaccacccggacagcctggaccgggtttagccgctcagagatcgggggccaaccgcaactgctctagacatgaagctagcaagcgagccggtttagccgctcagagatcgggggccaaccgcaacccgcttgtcgagccaatagtcgccgtcgatggtttagccgctcagagatcgggggccaaccgcaacgatctcggtgaccagggccctggcaggtaaggtttagccgctcagagatcgggggccaaccgcaacgatctcggtgaccagggccctggcaggtaaggtttagccgctcagagatcgggggccaaccgcaacgccgtaatcatggtcgtcgatctggaaataggtttagccgctcagagatcgggggccaaccgcaacgtaccagagcaggttgagccctttcacggtggtttagccgctcagagatcgggggccaaccgcaactgcggcctgcaacgcctcctgcacatcttcggtttagccgctcagagatcgggggccaaccgcaactgctcgaactgtgcgcgcgatatcgctaggggtttagccgctcagagatcgggggccaaccgcaacgcctatgatgcatggtcgcgggcaccgaaggtttagccgctcagagatcgggggccaaccgcaacataaccgcctcctgccagcgcgatccgtagggtttagccgctcagagatcgggggccaaccgcaacaccagccgccgcgacacgaacgcctcgaaaggtttagccgctcagagatcgggggccaaccgcaaccgttgtccttgccgatcacctttacgagaaggtttagccgctcagagatcgggggccaaccgcaacttatcggtttattgggattttacaccgtgtggtttagccgctcagagatcgggggccaaccgcaacgaagttggcataggaatacggatagtcctgggtttagccgctcagagatcgggggccaaccgcaacagcagcgccgccggcgccgacgccgtgacgggtttagccgctcagagatcgggggccaaccgcaacttgtcgcgattggtggaaagcgctgaatttggtttagccgctcagagatcgggggccaaccgcaactgcatgggactggatgcccgggtatctcgcggtttagccgctcagagatcgggggccaaccgcaacactgtccgggcagtactgcacccgaaggttggtttagccgctcagagatcgggggccaaccgcaacacatgaacgttggtcgagcgccggcggcggggtttagccgctcagagatcgggggccaaccgcaactgaccgggccgaggcgtgaggctgatcctggtttagccgctcagagatcgggggccaaccgcaacgcacggctcaccgtgccgctgtcgatgaaggatcgctggtcgtcatcgacaacacataggcttccagcaggagccgcagctggaacgccttcggctcgcgcgaaattccatacctgtatcagctgccaatcggcgcgaagctcatccgctactgccagctcattgtgcgtgatgtgaaacggcgtgcgctcccaaccattggtcgtcttcacctcggtcacatgccagcaactgcgccggccctgccggaacacgttcggcatgaggaattgggaagaggttcttgagccttgcggacctccgcttcgccaaaatgcgccatcctaccgcagccatccccgccggttggcatgccccgcgaaccacaccgaaaacatggcgacacacgcgatgaacagcgggaacggcaccgtcgcgctggcgcccttcgccgcgataatgtcggtcgcggcgaacagccagccgagctgcacccccaccgcgatcaatgaggcgaggaacagcgcctgcgccagccgcgagcgcgccaacagcgcgatcccgcccaggagcgccgtcccgacggcgagtccatagacccagctgtaccagtcgggcagcgcggcgaagagcgcgcggtcgtaatcggtcgcgcccggcatcgcatcagggcccagggtcagttgcatatagcagaaatagcagccgatcgcgccccacagcgtcagcaaggcagcgacgacccagaaccatgccggaaccgttccacgcaccgtcgtgtcgtccatctcgattcccctccacgtcctcgatggaagggatgctgcgcctttcctggggacggtgcaacggcgttgaacctagaggccggcatccgcccattgatcgggcttgaacccgacgagcagctggccgtcatgctcgaccaccggccgcttgatcatcgaaggctgcgccagcatcagcgccaccgccttgccggcgtccagacccgccttgtccgcgtcgggcagcttgcgaaaggtcgtccccgcccggttgagcagcgcctcccatccgacaacgtcgatccaccggcgcagccgcgccgcgtcgacccccgccttcttgtaatcgtggaacgcgtgtccccgcccgcgcccgtcgagccaggcgcgcgccttcttcaccgtgtcgcagttaggaatgccgtagagcgtggtttgcgtcatccgatccctttctccgccacaccgcgccgacgcgccgaaacgccccgccaagcgggccgcgcagataggcgagcgcttcatagaggcggagcgccgcctttgcccaccgcaaatagagcgcgggccatccggcggcgcgcgccagcacgaggacgcggtggctgtcgatggcgatccgccgacggcaccggtagatcagcctgcgccggagcggcagtgatccccctcccggcgcgacgcgcttgcgcaacggcagtcgcggcggcgcgatccgcagcctgtaggccaggccttcgcgacggtggcgcaggcccgcggcctgcgtgttggcgatgaacgccgcgtcgacggggtcgagcgccagccgcccctctgcgatcgcggcgctgacgagacgccggagctcggggttgcgtaccacgaccacgttggtgccgcgcccgtcggaggaatagggttccacccaggcgtcgccgaaggcgatgtcggcggtttcggcgacgacgtcgtcgcaatagtcgcaggccgaattctggaagaagccggcgccccagtcgccatcggccaggtgccaccaatcctgccggcgttcgctgccgtcggcgagggtcagctgcgcggtgtaccagttggccggccggtcggggtccttgcggcggtattcgaccgcgcgcaccgtcccgatcggcgcgcccagctgccaggcgaagctgtccaccagccgcgcgcttttcatatggccgcagaacaagccgagcgtgaaggcgatgcgttcgccgagcaccgcatcctcggcgctgagcagattgaccgccttgatgaagcacggcgcccccaccaccgcatagcggcccggcgtcagccgcatctcctcgatcacgcgcgacatctcgaccggataatagcgggacttggcgccacgccgtatctcggcttcgctgcgcgacaggcgatagtcgaagaagcggccgtcgcgatcagggtcggccggcgcgacatgcgccacgccgtcgaccagaccctggcggagcagctcggtcgcgacccagctgaccatccctccggaactgcccatggcgcggaacgcgtcttccgcgacatgccccacataggccgtctcgaagctgccgatccggccgtcgcgctccggcgcgtcggggaagcgccccgtggcgatctcgtcctcgtcgcgcgccgcgggcgaaaaggggcagacgcgggcgaagccgcgtctgcgttcgccggcccacgcgcccaccggcttgagctgtccgaagcgatcccagccgagcgcttcgtctcctttggcgcacgcgccgcagccgatgcacaggccggccgcggcgacgtcgcgcggcgcgagcggccgctcagccaagcgccgaggccagatacgcgctcgatcgcgcgcgcatcgcatcgattcgggcgccgatggcgggatccagcgtcgtgccgagcaattcggcataggctgcgggcggcgtcccctcggtgaccagatggcgttccgcggcgagcaggtgaacgaggtcgcggaccttgttgaggcgatatgccgatggcgccgagacgaaaggccgccggtgatggagtgcgaagacgcagccatggaagaagttggtggcgaccgcgtcggctccggcgatcaggctggagaacgcgtccggtcccgcgtcgatccgctgctcgtcggcccagtcgttgcgatagccgatgctcagcacacggtggcccgcggccacggcccagccgcgcaccgcggctgcgaaccagtcggggaagccatggccgtagagcgcgagatagggcgcccgttcgccggcgggggcggcgggcgggggaggaaattggagacaggggtcgaggacgagctcgggctcgcgattgaggccctggcgaaccagcctgcggctgttctcgtcgcggacggacaaggcgtcgaacctgtcgagcttcgccgcccagttcgcgtcgagcccatgttcggcatcgtgattgccgaagctcgcgccataggatgcgagccggcgtgcgcgcagccgctccccgaagaagatgggcctcgacccgtaccagggatggcggaagttccacacctcgtcgctgccgaccaggacggcgtcatagtttcccgcctcttcgggccggtcgagcgcgaagcggcgcgattcgggcaagtgctcgaacgctgagagaaagcgtcgcgccttggcggcataaagcggcaggtctgagcgcggcccgcgcaccggcagccgcggctggaacgcgcagcgccactcggcgcggcgcacctccggcgcgtcatggtcgagcagctcggcctcgtgccccatcgcgcgcagtccctcgaccaggcagcgcgcctgccaataggacccgtaatttatgcagcggtggaaggtcagcacgccgaccctcatcgcgtgccggctcgccgatatggcggggaagcgcggcggcgcggacgaagcgctcatcccggcttcgttcaacgcgccgtctcccgggcgggatagaccgccgccggcccgtgctcggcataggggaccggcgctacgcggcagagatagacgtcgggctcgggcgacgcctcgatcgcgaagccggcggcgcgcagcatcgcctggctgcacgccgcattgggcgcccaccagttggtccagtcgtgcgcgaatgcgcgttcgatgaaatgcatcttcggataggccggattgtcgaaataggggggcggcgtgatcgtgcccggaacgaagaaggggtgatcctccggcacctgaaggatgtcgttcgatccctgctgcatcgtctggaacagcatcagatccccggcgacatgttcgcggatcaggtcgagcgcgagcagcgggtgccggagatggtagagcacgcccatgaagatgacgagatcgaaccgctcgcccagcgccgccacgtcatagaccgaaaggttgcggaactcgatattctcgaagccgagcgcctccgacaccagccgcgcctgatcgagatagcgctcgtcgctgtcgatcccgaccacccgatccgcgccccggcgcttcatctcgaccgagtagaagcccgcgttgcagccgatgtcgagcaccgacttgccggaaagatcggcgggaatggcgtgcgcgaacttctcgaacttgaagttcggatagtcgcccaggaaatggtcgggcgcggtgatcaccccgccgcccagatcgatattgtggaaccaggggcccagcgcgtcgatccgctcctgcagcgtggccgcgtcgcgttgccggagggacatgatcgtggctcgattcaacgaacatcctttcgtgccgtacggttgaggggcgctaggggagcgcaacacccgcaagttgtggaccaaggttcgtttcgcaaacgatcggaatggacagccgttccccagcatctacttagcttcttataaattgatccatgtaatattgttcaactaacctatgtgatcgcttgaatcttttaagaaaaatcgaggaactgcgcgccgaaatacagctttagctttcggtatgaacgacgcgttgcagcattggacttcggccatgcgcgccggacattatggcgccgcctgggcgatcgcgcaggcgacgctggaggcgcgcgatcccgcttcgcgcgacgatccctcgctgccctatcatctgcgctgggtgtgggacggctcggatgtgcgcggccgcgacgtgctggtccgctgctatcatgggctgggcgacacgatccagttcgcccgttacctgccgctgctggcggaacgggcgcggtcggtcaccatcgaagtccagccgcggctgctcgacctgctcgcgcgcgccgggccgatcggtcggttggtccccttcgatcccgaagcgccattgccccgttctgaatgcgatatagagatcaccgagctcgacctcgcgctgcgcacgcctccggaggcggtcgcaataccctacctccaggcatcgcgcgcggtcctgcccagggggacgatcggactgtgtcacagcgcgggcgattgggtcgcggatcgcagcgtgcccgccaacctgttcaagtcgttctgcgggatcgcgtcgtgcatcaccctcacgcccgcgccgacggcactgccggtgctcaatccgaaaggctgcccgttcgatatcggcgcgaccgcctcgttggtcgccggggtcgatctggtgatcacggtcgacacgatgatcgcgcatctcgccggcgcgatgggcaaaccgacctggctgctgctcaaggccgatcccgattggcgctggccgccccgtgcggcgaccagcggctggtatccgtcgatgcgcctttatgcgcagccttgggcgggcgactggacacccgtcgtcgagcgggtcgcacgcgaccttgcggcgcgcgcggagaggcgggaagatggacgatagcggctccccctctgtccccatctcctggggcgagctcctcgacaagctgacgatcctggagatcaagcgcgaacgcatcgtccgccgcgatgcgctggccaatgtcgagaaggagctggcgttgctcgccgcgcgcgcggtcgaggtgatggaggtcgccggcgtcgagccgctcgtcgggaagctgaagcgggtcaacaaggcgttatgggagatcgaggacgcgatccgcgagcaggaggccgaggccgacttcggcgccggcttcgtcgcgctcgcccggtcggtgtacaagaccaacgacgagcgcgccgcgctcaagcgccggatcaacgcgctcctcgattcggacctgaccgaggaaaaaagctatgccgacgcaccagccgacgccgcggccccctcccggctgttcgccgagcccgcctctccgcccaagcggagcggggccggcgcgccctaagggtctgtcctgttctgcatgattcagcgcctgcctgcgaaggggagacgggaacggtcagctcgatttgaacggactatgtcagcattcccactggaagacctcttcgaggggcttgccgaagacct

SEQ ID NO: 3496 - DNA, 23147 bp, synthetic construct
  source 1..23147: mol_type = other DNA
  misc_feature 1..23147: note = Synthetic
ggcgatttggccgcgaccttcgtcgctgcggctcgtctctatggcctccgcgacctgtgggacgcgatcgatgtcgcaccgatgagcgaggccgcgcgcatcacattgctcgacgccctttccgtcggagtccgggcgcagatggcagacctgctgcgctccgctgagcccggcacgcttcccggcgagctggtcgcgcggctcggtcccggcatcgcccgtctggaggccaatctcgagggcttgctcgaagaggaagctcaggcctcgtcggcggcgctcacgcagcgcctcatcgacgccggcgctcccgccgagctcgtccgccgcgtcgcccagctctacgaaatggacggcgccgttggcctcgccacgctgggcgtcgagacgaagaccgatgaagtcgtgctcacccgcgccttcacgagcctgggcgaagcgctcggtctcgactgggcccaggcgaccgccaatcgcctcagccccagcgatccgtgggagcggctgctggcggcgggcctcgcgcgcgatttccagcagatgcgcctggagttcctcgcccgtgccgacgccaaggacccgcaggcctatgccaatgactggctcgagcgtcaggcgaaccgcgtcgctcagttccgtgacctgatccatcgcgcccgcgcgaccacatcgccgaacgcggcgatgctggcccagatcgcgggccaggcccgagtgctgctgggacgctaaaccctctcccgtcaggggagtgggcgactcaggcctgcgggcctgagcggggagagggtgctgtggtacacggccaaccaccctctcccagctccctcaagagacaggaacgccctactccgccggcgccagcttccgcaccggccgcttgcgccatttccggctgccgacccacatcgtcgcgccggtcaccgccagcaccgcggggatcagcccgccgaggaagattgcgacctgccacaccgggcccatgccggtgccgtcgtgccagcggcgcattgtgcgcgcgagcgtctccggctgcggcgcgcgggtcgtcaccgcgccgctcgcgtccgcgacctcggcgtcgccctgcaccagcgtcactttccaagccgggctcttgtccgtcggccaggtgatcgcaatcggctgcccgcccacgccgcgcacaatctcgtcgacccgctgcaccggttcggcgagcggcaccgccggcgccgggcgctgccccgccctttcgccgacaatcgatccgaagaaggccggaaagctgatccaggcgccggtcaggctcagcatggcgagcggaatgcagatccagaagcccagctggtggtgcaggttggcatcgaattgcggccggcgcttccagcgaaaaccgcgccggacgctgccggtcagcggccaccagagccacaggccggtcagggacgaggtcagcatcgcgacgccgatccagccgacgatctgccgccccatgcccggcaccagcaggctgccgtgcagccgatgcagtacccgcaccgcgccttcgttcgatccggccttgtcgagcacgcgcgcggtcgcgccacccaaatagatgttggtccgctgcggcggccccaccctggccgacaccgcgccgatcacgacaggtccctcgcctccctccggatagcgcagcgacgcgatccgctcgcccggcgccagcacggcttgggcggccgccacatagcggctgggcggcagcgtcgcgggcccgctgacggcgtagcgctgcgggttgacctgcgcgtccagccagtcgtgccacaccagcgccgatccgctcaggctcagcgggatgatgagaaggccaagcagcagtccggcccatttgtgcacgctgaaccaaatgttgcgaagctcgaccttgctcaactgtttgcccaccgtctcaagagattgtgatacacgccggtcagctggacgatcgcggcatcgccctgccccaccctggcgccgagcgcttggatcgccccgtccagctcgaacagggtgcgccgcgcggcatcgtcgcggaccatgctttcgatccagaagaagctcgcggtgcgcactccccgcgtgaccggctcgacgcggtgctggctggacgacggatagagcaccagatgcccggccggcagcttgacgctgtgcgtcccgaacgcatcctcgatcaccagctcgccgccgtcataggcctgcgggtcttcgaggaagagcgtcgccgataagtccgcgcgcatccggaaatcgcccttgatgcggatcgcattgtcgatgtgcgtgccgaacgcctggccgccggcatagcggttgaacatcggcggcagcaccttggcgggcagcgcagcggcaatgaacaaggccgtgcggccgagcgcgtcgagcacgatcccgcctgcctgacgcgcagcggcgctgtcgtcgggcagttgctcgttgcgcttggcgagcgccgcctgccggccggagctgacattgccgtcgacccattccgccgcgtcaataatcgcgcgcacccgcgcaacctgttcggcgttcagcacatcggggatcgcgatcatcatgggccgcagcctagaagctatagatcaggctgaacaccgccgagcgcgtctcgcccggtgccgcccagccgccggtgatcacgcccgaactggcgttcacattgttgcggatcgacgtgaaataatgctcgttggtcacgttctgcacgttcagctgcgccgtcaggcccggcacgaccgggtaagcgacatacagccggtgcaccaggtaatcgtccgaccggtattgggtccgctgcagcagcgttcgctggttgagcgcgaagctgccctggtaggtgaagccgtagccgagctcgagcccgaacggaaaacgatagctggtgaacaggctgccggaatgcttcggcgtctggaccagctcgtcgccgcgctgcggatcgcgaattgcggcgctgttgctgcaatccctgccgggattggcaaggcaggagtcggacacgctctgcagcaccttgctgtcgagataggtatagttggcgaacaccgtccaaccctccgcgatcgtgccggtcaggcccagcgcgacgccgtccacgcgcgaccgtccgtcgagtacctgcaagcccgccggcagcgccggatcgttggaaggcacgcggaagttcgtgcgttcgttgcggaacagcgccgcggtcgcttgcaggccggcgaacaggtccgccttcacgccgatttcgtaattccgcgccttttccggcgcgacgtcgcagaaattaacgaaggtatcgccccgtccactggtgcagccgagccgcacggttgctgaggagggcgtcttcgagttgccgaatgaggcgtagaggctgaccgtctcgaccggcttgaacacggcgccgacgcggtacgaaaagagattctcattgctgtgctgcacagccagctcgtccgcggccggcacccgctcgcccggcgcgtagaaaggcagcgggatcggtcggaactgcgcccggttctgctcgtaccgcacggcaccgttcagctcgaatttcccgatctcgagattgtcgaacagatacaccgcccggtttcgcgtctcgcttttcgagtgcgcggtcacagtgaaattgatcggcccgtcatagacggtcaccgggtcgacgatgcgctcgatccgcagcggcgcggcggagccgtcggcgagccgcggcagcgacgccgtctcgatccggtaatcctcccaggtgaaggacgcgccggcgaccagcgtattccgcaccccgcccttctcgcctgttacccagcgcaggtcggtctggttgtaaagcagctggttgtcctggtcgcgcaccagcccgcgcgggccggacggctgccagaagcccggcgcgagccccgtggggcacggcgcgccaaccggatcgtcggcaccggcggagaccggctgccgcccggtttcggcaaggcagaaggtcccctgcggcgcactggtctggctgtactgggcgacccgttgccagcgcgtcaggttgcgcacctccgcaccgccgccgaaatcatgccggaagatcgccgtcagccggtcgaccgtgatgtcctgccggtcgaggttgcgatagccataatagtctgtcgggctggtccccggcagcgagccgtcgttcagctggttcttgaaatagggaacgccatagatcggcgtattgtcgtccttctggtgcagataggcgagcgtcaggctggtcgggccgccgatgcccagcgtcaccgatggcgcaatgccccagcgcttgtagcgttccacatcgcggccgggcacgtgattgcgatggatcgttgcgttcagccgcaccgcgatcaggtcgcttgcgcgccagttcgcgtcgacggtgcccctgtaataatcgtcgctgccgacgctgccctggacgatcgtcaggtcatcgggctggggcagcttcgatatcaggttgatcgtgccgccgacggatccggagccgttgaacaccgagttggcgccgttgaacacctcgatctgctgaaggttgaacggatcggtgcggctgtactgcgcactgtcgcgaacgccgtcctgggtcaggtcgttgttggccgaaaagccgcgcaggttaatgctgtcgccatagccgccgccgccttcgcccgccccgaacgtgatgcccgggatcgtcgccagcgcatcgcgcaacgtcagcaaattctgcttgcgcagcacctggtcgctgatgacggtcaccgtctgcggcgtgtcgagcagaggcgcgaccgacttggggctttcgaggtcccggccctgctgcccggtgacgacaatcgcctgcatatccgcatcggccagcatcgtcgcgtcggccccttccgcggcgcacgccggtgcggtcgcgaggaacccgatgcagcccaaagccagataagcgccgctcgcagcgaccgcagacacacgcattcaacgaacccctttttgctctggggtccgctattgctaatcattctcattagtgtcaaccccgatcacagcgatcgggcagccgctatttcttgccggtgagcgacttgccgatcgtctccaccgccatcgccgcgctttgcagccgcttagcgcaggccgtcatgatcgggcctgcggcctggggcgtgatcgtcggtgcctgcgccttgatcgccgcggtcagctgtgcgccggacaggcggccatcgacgcgccccagatagaaataggacgacagcaccgcgatctggtgtttggtcggatccttctcggccttcacgaacaggttggcggccagcaggcacttcacatcctcgttcgcgccctgggccgcggcgggcaccccggtcagagccatagtcgctgccgccgccaggccgaacgcaatacgcattttcatcgaaactctcccgttcatcggcattgccaagcgcatgcgccggccttccgttccggacgtgtagcgaaaccccgcttgcgtgtcccagtcggtctggagaggcgcccattacgcgaagcgcgggagccgcggccggcccgcctgcccccctcccccgttgtgggcgagaaagcgaaatcggtgagcgcgatagccggacttggcttgcaatcccgtggccctttccgcaattgcgaaaggatcatggcgcggaaatggactcccgaaagctggcgcgctcatgaggctcgccagctcccgaactatcccgatgcggacgccctcgcggcggccgaggcggagctgcgtcattatcccccgctcgtctttgccggcgaagcgcgcgacctgaagcgcgacctcgccgaagtggccgaggggaaagccttcctgctccagggcggcgattgcgcggaaagcttcgccgagttccacccgaacaacatccgcgacacctttcgggtgatcctgcagatggcggtcgtgctgacgttcgcgtcgaagctgccggtcgtgaaggtcggccgcatggccggccagttcgccaagccgcgctcgtccgataccgaggagcaggacggcgtcacgcttccatcctatcgcggcgacaacgtcaacgacatcgccttcacgccggaggggcgcgcacccgatccgcagcggatggtgaaggcgtacagccagtcggcggcgacgcagaacctgctgcgggcgttcgcgaacggcggctatgcgaacctgcaccaggtccatcgctggacccacgatttcatgggccgcagcccctggaccaggaagtacaccgacctcgccgaccgcatcggcgaagcgctcgacttcatggctgcctgcggcatcaacccggacaccgtgccgcagctgaagggcacgaccttctacaccagccacgaggcgctactgctcccttacgagcaggcgctgacccggcaggattcgctcacgggcgactggtacgacacgtccgcgcacttcctctggatcggcgaccgcacgcgcttcgagggctcggcgcatgtcgagttcatgcgcgggatcggcaatccgatcggcatcaagtgcggcccgacgctcgagcctgacgaattgctgcgcctgctcgacgcgctgaatccgacacgcgatcccggccgcatcacgctgatcacgcgctacggctatgaccggatcgaagccggcctgccgaagcttgttcgcgcggtgcagcgtgagggccatccggtcgtgtggagctgcgatccgatgcacggcaacgtcgtcaaggccgcgaacggctacaagacgcggccgttcgagcgcatcctggccgaggtccgcggcttcttcgccgtccaccgtgcggaaggcagcttcggcggcggcatccattgcgagatgaccggccagaacgtcaccgaatgcaccggcggcgccgtggccgtgaccgaacaatcgctcgccgaccgctaccacacgcattgcgacccgcgcctgaacgcggcgcagagcctggagctcgcgttcctgctcgcggaaatgctcaatcaggagcttgccgaacggcgcaaggccgccgcctaagcccctctcaacgcacgctcagcacctccagtgtcgccagccgtccatcgctgccgggccagagcaccgactgccccgccgccagcccgatcagcccggcgccgagcaggccggcaacgtccacgcccccgcattcgaccgcaggcgggcggcacagccggacctcgcctgcctgctggccgccaagccggtacgccaccctgctgtcgagccgggcaacgtcaggcggcagcgcccggcgcgcgacgatccgcgccagcttcacctttttcagcagcagatgcgccgcgacatcgtcgtcggcagacagcgccagcgcgatcaggcagtgccgctcgcacgcggcgaggtggaacgccgcgtccttgtgcagcgcggcccagagttccgcctggccatgcgcggcgagtgcaacgctctccagcatcacgcacctcccggctcaggctggttgcggactgagcgtgcggcgtcggcgctgccgcgcccggcccgcccgcgtcacctgccccatcaggctccgcacgcgcgggaagacgctgccttccagcatgtggaaatccgggtccgatgcgaagaagcgaaacccgcccgccacgcgcaccgcgacacccactgcccggcgttcgaactcgaccaggaaacgatccgacattgtgcctccatcaccagcgccccgcacgaaggctgcggcgcgaaaccgcgctcgtttcgatgcagggaagagcggccgcatccggccgcggcaggggcgagcctcagcccgcccggcgatcacccccggtccgcgcccggctcagcgagccgcgcggtccggggcaaagaggcgtgccgtactgctctcggcatgcaactcgttgcgcaaaaggcaaaaatgggtcgtcattgcccgatcaagatggccgtttgcagggggaagtcaagcgtccaccgggccgggcggagccgaaccggaggcaacgagtttcccgttcgatgaaacccgccgccccgcttctcctcgccatcctttctgcgtgcaacgcacccacgacacccgaccagaccgaagcgacacccttgcccagtccagcgatcccggcggcatcgcccatgcccacagcaaccgcttccccggcctccgtcgagccgcctgcccccggcacgcccggcggcctcgcggacgatcgcacgcccgtctccgaagcgccgttcgacaagaccagcgcccaaggcgcagcgcaggtcgtccagacctattatgcgctgatcgaggccggcaaataccccgaggcccgggcgctctggtccgatagcggcaaggcgagcggcaagagcgaagagtccttcgctgccggcttcggcacctatgcggaataccacgcacagatcggcgcacccggccggatcgaaggcgctgccgggtcgctctatgtcgacgtgccggtcgtcgcctatggccggctcaaatcgggcgccgccttcgatcgcaagggcaaggtcacgctccgccgctgcaacgacgtccccggatgcaccgccgaacagcgcgcatggcggatcagtgccgtgacgagctgaccgccgcgccgccttccgtaaagtcgatccggatgcgcacccacgcgccgatcatcggcttgccgtcgatgcgcggaggacggaccaggaactgccatgccgcctcgcggatcgcccgcgccaggccggatcccggcggcgagtcccccagcgtgcggcaattgtcgacatggaagcgctcgaccgtctggcaggcgatcatgccccagccgatatggcggccgggcggcagataataggaaagctcggcgctggtcggctcccgataccattcggcgtaatagaggtgcgccccgcccgggccttcgccgggcccatatgccgacgcgctgtcctggccctggtctccccttgtcggccagctctgccgcgggtgccgtcgaatggacctgtcgcaggtcgaaatgctcgagaccggggatcaggtatggcatcgccggaaccgggaccggcggcagctgcgtctgcggctggacctccgccttggccggcgccttgccgctgctcctggccttgcggaccgtgcgcggccgcggcgccgccttcggcacgtccggcgcaagctggaacgtgatcggacccagctcctgcttgtgacgcacccagtccggcggcgccagcttcagcagcatcagcagaagcagcagatgaacggccagcgtgagcgcaagcgccggggcgcgtcgccgggcgggagaacgatacagatccgacgagctggaatacgccgaacgcatcggcggctcgcctagcccaggtcgctacgcgcgacaacgggtcgcaagtgcagccggacaaaaggaaatcccgttcatctgagcttcatcttcgggggcacacgcctcggctcgtgacccggtcctttctccttgcgacgcttgcgcttgccgcgatcggcctcggcgctgccgcatcggcacagagcccggaaccgttcgatccgtcccaggtccgccgcctctcgccagaggaaaaggaagaaattctcgcgaacagcagcgagcgcgccgccgatgccgcgctcaactcggcgctcggcggcggcacgtcgggcggcatccacggcgaagtgggagccgtcgtcggcaccggcgggacggccggcctgttcggcacggcccgcattccgctcggcgaccgcggcgccgcgatcatctcgttcgaggattaccggacccgcacgctcgatcccggcctgctggatcaattctacacgcgccggcggatcgcccccagatgaaaaaacgggggccgtagctcccgccttatttggtgcagttcaaactgcttgttaacagccagcctgcgatttctgaggcggccaggtttgtccgaaacgggcctgaagtcaattgcgaaacgatcccttcgctgcaaagatgagcgcgagggggtaagcacatgaaaaggcttgggctcgatatcggcacgaacagcatcggctggtgcctgattgaagacgacggcgacggaaaagggcgcatcattgatatcggcgcacggattttcagtgacgggcgcgatccgaaatccggcgcttcgcttgcggtcgaccggcgcgccgcacgggcgatgcggcggcggcgggaccgatatctcgggcggcggactgcgttcctgaaggccctgaagcgctttggcctaatgccggcggacgaaagcgcggccaagctgctcgctgaccgcgacccctatgaactccgcgcccgcgcgctcgacgaacggctggagccgcacgagatcggccgtgcgctgttccacctgaaccagcgccgcggcttcaagtcgaaccggaaggccgaacgcaagaccaaggacgccgaagacggcaagatcgccaacggcgccaaggcgctcgaccaggcaatggccgaaagcggcgccgaaacgctgggccagttcctcagcagccgcgacaccaagcgggtgcggatgggcagcgatgcgcagggctatgatttctacccgcagcgccggcatgtcgaatatgagttcgacacgatctggtcgcggcagcaacagcaccatcctgccctgctgaccgaagaagcgcgcaagaagctgcacgacatcctcttcttccagcgcccactgaaggagcaggaagtcggcgtctgcaccttcgtccacaacgaatgccgcctgcccaaggcgcatccgctgttccaagaacgcaggctctacgaggaggtcaaccagctcgagatcaccacgccaggcgcgccgaaccgcaagctgacgatggacgagcgcgacgcgctgatcctcgaactccgcagtcgcaaggaacggagcttcgactcgctcgccaagcgactgaagctggcgccgggccagagcttcaacaaggcaagcgaaagccgcaccaggctgaggggcgacgaagtctatgccgtgatggcccacaagaagcgcttcggcgaccgctggccgcatctcgatcgcgaccggcaatgggcgatcatcaaacggatcatcgaagaggaagacccggataagctccatgccttcctgaccggcgaatgggggctgaccgacgagcaggccttagcgaccgctagggcgccgctgcccgaactctacggccggctaggaccaaccgcgaccgcgcgcattctcgaagagctgaagaaggacgtcatcacctatgatgaggccgtccgccgtgctggctggcatcattcggacgaccgcaccggcgaaatcctgccccagctcccctactacggcgagctgctgacgcgcgacatcccgcccggcacgcaggacccgaacgatccgcccgagcaacgctggggcaagatcaccaacccgaccgtccatatcggcctgcgccagctggaaaagctggtgaacgcgatcatcaaggtccatggccgcccggaccagatcgtcgtcgagctcgcccgcgagctgaagctcaacgaaaaggacaaggaagagcataaccgccgcatccgccgcgacaccgcggcggcgcagctccgctccgccaagctccagagcgaaggcattccggacaccggcgccaatcgtatgctgctgcgcatatgggaggaactgaaccccggcgaagtgctcgatcgccgctgtccttattgcggcgagccggtcggcatgcggatgctgttcgccggcgaggcggacatcgaccacatcattccctattcgcgctcactggacgacagcgccggcaacaaggtcgtcgcgcaccgcagctgcaaccgcgccaagggcaaccgaacgccctacgagaaatgggtccacgatcccgaccggtgggacgtcatctccacccaggtcgcgcggctgcacaaatcgaagcaatggcggttcggccccgacgcgatggcgcgggtggaaaaggacggcggcttcatcgcccgccagctcaccgacacgcaatatctgtcgcggctggctggccgctatctgtccagcctctacccgaccaaggacgacggcagcgtctatgtcatccccggccggatgacggcgatgctgcgccggcgctggggcctgaatagcctgcttccggaccataatttcgtcgacaacgaacacagcaatgcgccgaagaaccggctcgatcatcgccatcacgcgatcgatgctgcggttgtcgcggtcacaacgcgcgccctgatgcaggagatcgcccgcaccgccggacgggccgaagacaaggacctcgatcgactgttcgaggacttgccgcagccgtgggagggtttccgtgaggagcttggcgaaaagctcgtccgcgtgaccgtcagccacaagcccgatcacggccgcaaaggcttgccgccgaaaaaccgcgacgtgactgctggccgtctgcataacgacacagcctatgggctgaccggcgatgtcgccgccgatggcaaaacgccgatcgtcgtccaccgcgtcccgctgatgagcctgaaacccgcggatatctccgatccggatcgaattcccgatcctgcgcttcgctcagcgctgcaccgggcgaccgatgggctgagcggcaaggcctatgacgcggccctcgccggcttcgccaaaacacatccgcagttcgctggcatccgccgcgtccgcgttcgcgagccgttgaccgtgatccccatcgcagaccgcgatggtcgtcctttcaaggcttacaagggagacgctaattcgcgcgtcgacatttggcgaatgcccgacggcaagtggctatcggacgtcgtcacgatgtatgaggctcataggcgcgaccacagcgaccgtcgtcctcatccagccgccaagaagctgatgagcctcaggcaaaatgatatgattgccgtggagcgcgacggcgcgccccgccagatcatggtcgtcaaacaaatctggccgacccagatcaaccttgtggagcacaaggaaactggcaatctaaaggatcgccactcgaacgagactgacccgttccgcttctttgctcctaccgctggtggattgaagaagatgaaggcccgtcaagtgcggattgatccattagggaggattttcgatcccggtccgcgctgacaaaagccgctgatttgcctagcttctcctgagggggaagcatggaccgcatcgtcgacatcgcgaccgacggccggcatctggcgctgtttcgcggcttcatggtcgtcagccacgacggcgaagaggtcggccgcgtcgcgctcgacgatattcacgcgctgatcgtccatgcccatggcacgacgtggagcgcgaacctggtcgccgccctcgccgagcgaggcgcgcccgtcgtgttctgcggcaccaaccacagtcccgtggcggtcaccctgccgctcgaggggcatcacgcccagggcgcgcgccttcaggcccaatggaacgcctcgcgtccgctcgccaagcagctgtggcgcctcgtcgtcatcgccaagatccgcgcccaggcgtcgctgctggaagcgcgcggcgtccgcgaagcggacgcgctgcacttcctcgcccgccgcgtccgttccggcgatccggacaatatcgaggcgcaggcggcgaagcgctattggccgctgctgatgggcccggactttcggcgcgaccgcgatcaggccggtgcgaatgcgttgctgaactacggctatgcggtgatgcgggcgtcggtcgcgcgcgcggtggtggccgccggcctgcatccgacgatcggcatccaccatgccaaccgcggcaatgccttcgcgctggccgacgatctggtggagccgttccggccgctggtcgatgcgctggtctgcggcatggtgcaggatggcgtgacggcgctcgaccccgccaccaagcgtcgcttcgctcgcctgatcgcgttcgacctgcgcatagacggcgaggcgtcgcccgtgtcgctggccgcggcccgcctcgctcagtcgctcgcccgcagtttcgaaaccggcgctcctgccctcgcgctgttcgatccgccgagcccgatcgaatgggccagcctgccgcgctccaccctcgccgaggcggcgtgagcgctgagccggccagctatctcagcggatacaggctgatgtggattttcgtgatgttcgacctgccggtgggcactaagaagcagtcgcgcgaagcgacaaagttccgcgagttcctgctcgacgaaggcttcgaaatgagtcagttctcagtctatgcccgcttctgcaacggccaggacagttttcaggcgcatctcaagcgcattgagcgcaatcttccggaaaaaggcgaaattcacgtcctcaccttcaccgatcggcagtacgaaaacatcgtccgattctcgagccagcgccgcaagcgcccgcgcaaaaaccccgatcagctggcgatgttttgaggtggcgaagcaattctgctcgaccggatgtgccactttgtccttcggcaagaagaacttagcaacacatccggcctagcagctcagaaatcgcaggccaaccgcaaccgggcggcctatgctgcgttcaacagcgcgggcctagcagctcagaaatcgcaggccaaccgcaacgcagtcactcgctggtgatcggcggcaagtggcctagcagctcagaaatcgcaggccaaccgcaacagcgccccaaggaagccgaacacgagcgaggcctagcagctcagaaatcgcaggccaaccgcaacagaacatggactggttcgtggtcgcaaatgggcctagcagctcagaaatcgcaggccaaccgcaacgggttcttcgtcccggactggccgggatgaagaacccgtcggcgctgccgcgccgggctcgccaggcgtgcttcgccgtagctcgttgccagtcttcggcggccaggtcctcctcacgcctccctccgccagcgccaggcgcggtcaccggccagcgccgccagcatcgtcgcacctgtgagcggatacagcgcgccgattgcgagcatgatcaacgcgacgcccttcgcgcggcgggtgtcaagcggggccggcggcggggcgaagcggcgtttccaccagaggatcggcgcggtcagcgccagcagcagggtgccgaggcagccggcgagcatgacgaggcggttggcctcgccatattcctggccctggtggacggcgatgccccattcgatcgcccgcgcgccgacgccgaactgcgcggcgccggcatcctgcagcacgcggccggtcgccggctcgatgtagagcacgcgcgcgtcttcggaccgctccgcggtgcggctgaccagatagggcgcgcccatcgccgccggccgcgtaagactgagcggcggcgtcagcccgcgcgccgcggcaagcgtcaacacacgatcggcgccgatgtcgcccatcccgtgcgcgtgcggcgccgccaccgcctggagcgcccagggcaaggcggccttctcgtgctcggcatgctcccaaggctgcggaccgggcgccttgggccggccgagcccgttcgccgccaccgctccctgcacctgtttcccccagaacacggaccagggcatgccggtgatggccaggaacaggatcacggcgccgaccagagcgccgccgctcgcgtgcaggtcgcgccagaacaggcggccctttggcgcgcccctcagcgccagcgccggtgcgcccccacgcggccaccagagatagaagccggtcagcacaaggatgatcgcccagccggcgacgatctcgatcagggcgttgccgaccgggccggtgatcgccaggctgtgcaggtcgcggtcgagcttcatcacgccgccttcgcgcgcggtaatgccgagcacgcggcccgtgcccgcgtcgacgaacgcggtgcgccgccctgccccttgggcgatcgtgagctgccagctctcagaggcgcgcgccgggatcgcgagctgagccacgcggccgcccgtcgcctgctcgacgcggccgatcacctccgcggccggcagcgcgggcctagcgctggggcgcgtgatccagtcgcgatagacgatccgctcgatctcgggcttgtagaggtaaaggccgccggtgatcgctagccaggcaagcactggaagcacgatcaggcccgcatagaaatgccagcgccagacgatgcggtagagcgacgtcatgcccgcgcctccgttcagaaattggcgcggaggccgccgaatatggcgcgccgctccacaggatagaaaatcgcctgctggctgccgggcagcgcggcgtagttcacgaccgccgagacatccccgacctgcttgcgattggtgagattgcgcgcatccacgaacaggctgagccccggccggatctgcgcctcggcggtcgcgccgagcagcacatagccgccgacgcgcagcgtgttggcataatcggcccaggcgccgtggggcacccattccagggaaggcgcgacgttcagcgtatcgccaccgatccgcaattcggcgcgatagagatgcttcgggatgacgggcaggcgattgtcgccgaactgcgggtcgctgcggaagcggaagtcgttcagctggtagacctgtcgcagccgcgcccacggggtcaggtcgaggtccagccccgcctcgatgccctgatggagcgtatggccggcgttgaacgtcgcggcgggaatgccggcggcggggtcgatgttgaactgcagcatctcgcccttcagcgtcgcgcgatagatgctgacgtcgaaccgggccgggccgatcgtgccccgcgcgcccgcttctgcggtccaggccgtctgcgccttcaggggcacgaaacttgccacctgcgccagctcgataaagccgggcagttcatggctgcggctatagttggcgtagaattgcagcgcctcgcgcggctcccacaacaagccgagtttgggcgagaattggtcgtaatccgcctcgccaagtgccggcgacgggacagtctggcgctgccgccgctcggcatgggtatagattgcgccggccacgacgctgaacgtgccgaactgatagcgtgcctcgccataggcatcgatcgtctccgcgcgctgaccggcgtcgaaggtgagcgcccctttccggccgtccatgttgacggagcgacgcgaggcgacggttccgaaccggccggtcgtgccgatcagcaccgacaagggtccggtgctcaggttcaaccgggcgaaaacgccgtaatcggtcgatttctggtcgacgacctgaaagatcggatgatcgagcttcttcgcgttcaggaacgcgccgaactcgaacgcacccggccccacatcgactgtggtccggttctgcagacggatcgagtcgatattgcgctgctgatcgccgcggaagacgccggtcttgggccgggtcagcacgatgtccagcggcagcgagccggggagttcctgccggatcgactggccgcttgcgtaaaaccgggtctcgacgccttcgcccagcttcaggccgaaattggcgttcagccgcagggcgttgcgccgggcgtgctcccggtctccgtccgagctgtcgccggtcagggcgagccagccgtcccccggtccactggcgaaaccggcggctagtttgccgcggatgctgtcgaagctgccgccgtcgacacgcaggtcgacgcccggcgcggtgcggccggtcggcgtgatggcgttgatcgcgccgcccagcgtcgagccgccgaagcgcagcgcattcacgccgcgataaacctcgatgcgctcgaagatcagcggatcgagttcctggaagtcgccattgtcgtcggccaggttgatcgggatgccgtcctgcagcagcgtgagcccgcgcatgtgaaagccccggctgatgccggaaccacggatcgacagccgcacttcctgtccaaagcgcggctgtgcgtagacgcccggtgaaaaggcgagcgcgtcgcgcaacgacaccgcagccttgtcgcgatagtcgtcagcagtgacgaggtcggtcccgccaggggtcgtcgccacctgcgcgtcttcgagccggtcgcccgtaacgacgatcgttcccggcggcgcactgtccgccaacgccggattggccgcgacaagcgcgccgagcgcgcccgcagccgtcaaaaatcgcatgtcgatattcctgaacctgattgagccgcgccaggcgcagcagagccgccgcgaacggcggcgcggatcaggccagggcgggaggtccggtggcgggcggcggcggcgctgccagtccgcggcccacccgcacgatcggggcggatgacaggacagcgtccggctcaatggggcgcagcgcgaaaaccggagcatccacgtcggtcgccgcaaaggccagcgccgcgtaggggcatggcagctccccgcggtgcttgtcgtggctgctgtgatcgctgtgcgtgccgcccatgtgatgcatcgcgtgggcggcgaccggcggcggcgcataaccgccgcacagctccagcccgatccggctgccgtcgaagacgggcatccagccgaccgggaccagcagcttcaccaacatggcgagcgccagcaccagcatcatcgatcggtgttgagccgggaggcgccggaacgcggacatggccgcgcctctacgccatatcgtcgcaagggcaagacccggtcccggcatgcgcgtaggatgccgggtgaagggaagaggttccctagcccgtgacgcgcagccgcgtgaacagcatgaagctggtggggctcgacccgtattcgccctggatcgcgcgcggcaggtcgtaggtgctgacaaggccaccgagatcgagtacgaccttgccgaccggcacgctgcgatagccgcccaggctcagcttgccgacggtgaagacgcggccggcgagcgggttgccgctatgctcgtcgccgaacagctcatccttgtcgacccgctcggcgcggccgaacagcgtccagcgatccagttgaagcgcgctttcgagcaggaacgcgtcggtcgggacggcatgatggccgcccgaaggatcgttgcggccccaggcgaaggtcgactgccatgcgcccttctctcccaccggaaggttgtaggtgaccgaagcggtcgtgcggcgcacatcctcttcggggtgcaactgctcggggctgtgcaggaatccatggctgacctgcatcgacaggttcgcggtcggattccaggtcagccgcgccgaccagctgtcgaaacggggccgttcgatatcgtagcgatgctggtccggctcccgcccggtgaagacggagccttcgagcttcagcccgccatagacaagacccgcggtcgcaacgccgaaggtcacgtgcgtgctgtccagccaatggtgcgaaatcggcgcttccggattcgcgacgccggaaaagcggtgcatgaacgtcgccgggccaagggccggctcgcccggcagtgcgacgtagacgaagcccgacaatttgtcggccagcgggcggctgtaggtggcggacagctccatgaacaggtcgtgcgggtgctgccgatcgaccagttcggtgcggccgtcggcggtctcgccggtcgccagcagcaacggatagccgcgcttgcccatcagcggatcgaggctgcccatcgccttcagcgtcagcgtgccggcgcccgcctggtgctgggccatgcccatcagcatcgaggacacgaatatcttgtcgtcgccacgcggcccgccctgattgtcgtaggtcagcgccgcaaagccgtgcaccatcgtcgaccagtcgccgacctggcccatgatcgcctgcatcggcgcggaatcgggctgccatgccgttccggaggcatcgcgcgtcatcgggtacgcgctaagcgtgccggtcattgcgtgtccggcagccatgccggccatgtcgtggcccattgcagcgtgatcgggcgcagacggaacggcagcatcgtgatgctggtgctccatcgtcatcggttgcccgccagcatcatgggccatgccgggcatgtcatgggcgtaggccgcagcgggtatcagggccgaaacggcggcgagaagacggatatgcacgtatgtcctttggagatgatcggcggaacaaggatcggccgcgctccgtagagcgcggccggaccgtctcagcaagcgcagttcttgcaggtgcacggacggcacttgcagccggcatgcgcgcccgcaactgtggactgggcctgctgatcgttctgggtcgcgatggtcattgctacgtctccttgcttgctcgcgaatcgagctcgcactatgtcgcatacgtaccgtggtacggagtcaatcggcatgatgacgatcgcgaaattggcgtctcggggcggcgtgggcgtggagaccgtccgctattatcaacggcgcggcctgatgccggaaccgccgcggccgcaaggagacggtctgggcggcggcgtgcgccggtacggcgaggaagacgtcaaacgcttgcgcttcatcaagtcggcacaggcggccggcttcacgctgcaggagatcggggatctgttggcgctcgacgcgaccgacgaccggccgcgcgcgcgccagctggcacgcgaacgggtggcagcgctcgacgtgaagatcgccgagctgcaaaccgcgcgtgacgcgctcagccggcttgccgacgattgcggggccggcaccaagggtccctgcccgatccttaccgctttcgaaaaagcctagccgagcagcgtcgtcagcatcgcagccaggtcggcatgccggaacggcttggtcaggcgtggcagatcgctctcgatcccgcctgcctcggcgtaaccggaaatgatcaggaccggcgtgcccggccgggtcgaccgaaccgtccgcgccagctcggtcccggtcatgcccggcatcaggtggtcggtcacgatcagatcgacggcaaggccatccgccagccgcgccgctgcctcgtcggcggactccagcgccacgacggtgaagcccatgtcttccagcatatccgcggttgacgcgcggaccagcggctcatcgtcgaccagcagcaccgcgcctgcgccgttcaccgttcgcggggactggccggcagcactcgcctccggccgggcggcggcgcagggcagccaaagctggacttcggtgccctggccgggcgcgctcttcagccgcagggctccgcccagctgcgcggcgaggccgtgcaccatcgacaggccaagcccggtgccgcgcccgattcccttcgtcgaaaagaacggctcgatcgcgcgcgccgccacgtcctcgtccatgccgcagccggtgtcggacaccgcaagacggacatagctgcccggccgcaggtcgtgggcagcttcgtcgacctgctctacgcctgccgcgatcgtcagcgtaccgccgtccggcatcgcgtcgcgcgcgttcacgctgaggttcagcagcgccatctcgacctggttgggatcggccaggcacgccggcagatcgtcggacacgtccagcacaagccggatgcggggcccgacggtcgagccgatcaactcggccatcccttcgatcaggcgcccggcatcgaccggtgacggctggagcggctggcggcgtgcgaaggcgagcagccgttgcaccagggtcttcgcgcgctcggccgcctgcagcgcagacccgatcgtctgctgcgtccgcgcgtcgcccacgccgcgccgctgcagcaagtcgagcccgccgatgatcggcgccaacaggttgttgaagtcatgcgcgacgccgccggtcagctggcccatcgcctcgaccttctgcgcctggcgcagcgcttcctcggtgcgcttcctcgccgaaacgtcgatgatggccgccatcgtccggacgaaccggccctcgctgtcgtgccacggccgcgacgagatcagcacgtccgcaatctcgccgttgcgcttcacgacacgatattcggcgtccttcacttcgcggcccgccagcagcgctggccagtcctcgcggcgatagcgctccagatcgccgtccgagagaaaatccacggccggccgacccaccacctgctcgcggctctcgaatcccatgaactccagccaccggtccgacacgctgacgaggcgcccgtcggcgctctgcgattgcaggatggtgggcgtccgcgtgtacagcgcctccagttccgccgtgcgttccgcaacctgacgctgcagctccagttcggcatccttggcgatggtcacatcgaacgcgacgccgatgaatcccacatgctcgccgtccggcccccagcgcggctgcgaatgggaccgaagccagcaataatcgccgcccgtcttgcgatagcgcgcctcgagcatgaacggctgaagcgacgcttccttctcgacctgctccttcaggatgcggccgatatcatccgggtggatgacgctgcgccagtcgaactgcgtcgcctcctcgtaaccgacacccagaaactcgacataggcgcggttcacgaaccagcgtttgcggtcgagcgacgtcacccacatcggcaccggtgcggaatcggcgatcaggcggaaccgcgcctcgctttcccgggcggtgcgctcggccgtcgtgcgttcggtgatatcgctgaacgtgatggtgagagaccggtccggcagcaggacagcgcggatcaccacgtcgcggtcgggccgcgtggaggaccgcgtctcgaaacagatcttctcgcctgccgcggcacggcggagctgccgctccgtctcggtccccacgatctcgggcacaccctcccaaagagtgcggccgatcagctcggcacggtgtcgccccacgaactcggccgcggccctgttgaacagccggatgcgccattcgccgtcgaccgcgacatagccgtcatcgatgctgtcaaggagctggacgagccgtgcgtcgtcggatactccgtccagcaatccggccactctcaccgttgcatgttcctgacttcggacggaatacgcaccgtgagctcctccagatcggcgcccagatagatctggcaggcgagccggctgtgtcgcgtggcgccggc

SEQ ID NO: 3497 - DNA, 21555 bp, synthetic construct
  misc_feature 1..21555: note = Synthetic
  source 1..21555: mol_type = other DNA
aaggaagaaacgcggcatcgagatcgcaccgatggcgccgacctgcgacaggtaatccggccagcggttgcgccagaccgcggtcacaaggcccagcgggatgccgaccacgaccgcaatcgccatggcggcgatcaccagttccagcgtcgccggcaggtaggccgcgatatcggccgcgaccgggcggcgcgtcagaagcgaggtcccaaggtcgccatgggcaaggcccgcgacataattcaggtattgcgtccagatcggctgatccagcccgtattcgcgcgccagcgcctcgatttcggcgggcgtcgcgttcgggccggcggccagccccaccggatcgcccggcaggacgcgcgcaatcgcgaacatgatgatggtcagcccgataatgaccgggatcagaagcaagaggcgtcgcagaatgaaatacagcatggcggagcacctttcctgagaaatggcccgggcgtatcaaatccggcgcccgggccggcggcctcagccgacagacagcggccatgcctcgatggcgttcgaggcgaccgggcagaagctgtagttctcgaccgtgtcgcgcatccccagcttgcgccgttccagcacgccgaagatgtcgggggcatcctcgaccaccttcttctggaactcgccatagatctggatgcgcttttcgacgtcgatctcggtgcggccggcctcgatcagggcgtccacctcggggttggaatagaccgcgttctgccagttgccgttctgcgacgaatgataggcggcaaaggcgatattgtcgggatcgccgtaattcgcggtctgatagaccgggaacaggtcggggaaggtgtcgggcgacttgcaggcggcgaccatgtcgggccagctcattggctggatttcaaggtcgatgttcagctgcttgaggctgtcgagcatgatcagcgaccagcggcgctgctgttccagccccgagatatggaccattttcagcttgaagccgccatcgggtttttcggtcttggccatgaactcgcgcgctttgtcgatatcggtgcgatagacgctgaggttcgggtcaaagccgaggatgccgatgggcagcggcccgatcatcaggtcggcatagccggcggcgtcgatgatcgcctgatagttggtcgcgtatgagatcgccttgcgcaggttcaggtcgctgagcggtcccttgacggtgttgagcttgatcgagaaggtgcggtattccggttcgatcacgcgcacgacgcccggcgcaccctcaagcgaatccatgtcctcggaggtcaggtcgacggcgatgtgacattcgccgcgttgcagcatcagtcgctgggtcgcggtttcgcgggtgatctgccagatcacgccgccaagattgccgccgccgccctgccaggcctcgggggcgcgggcaaggtggtaaagcgtgccgatctcgaaccgggcaagctggaaggggccggcgccggcggtgttggtcatcagccaggtctggccctgatcggcgccaaggttcgcctcgacccgcgccttttcgacgatgaagatccagggcaggacctgcaggaaggcggcatagggtttggccagcttgaactcgaccgtggccggatcgaccgccaccacgccctcgggggtgacgatattgcggatcatccaggaattgcccttggcgagcaaaagcgaccgctggaacgaatagaccacgtcatcggcggtgaccgggttgccgctgtggaatttggccgccgggttcagcttgaaggtataggtcagtccgtcatcgctcatctgccagctttcggccagcgcgggcaccggctcgggcgggttgcccgcaacgcggaccagcggctcatagacgttgcgcatgaagaacgaggccgaatagcccgtcgcggtatgggggtcgaaattcgggatgtcctgccccgaggcgatgatcaggacggcgtcggtgccttgtgcgaaaagccgcgtcggcagcgtcgccgcagcaaggcccgcccctgccatggcaagaagcccgcgccgggaaatgcgaaaatgggtcgatgacatttctgcgttactccgtgttggtgctgtttttgtcatgtcgcgccccggcacccgccgcgactggcgggcgccgggggcagggctcaggcccagacggtggtcggctgcggctcggcctcatggcccgcgggaacggccttgctgccgtaatgctgccgggcgtgttcggcggtgatgaaccctagcgcaaggtcgcgggcgaccgcggcatggtcgcgctcatcagggtcgccgaagcccgagccgccgcccagcaccagttcgatgatctggctggtattgtgcagcgagaccagcgccccggtgccgcaatcgcgcaccagccggccgtccgcgccctgcacaaggccgcgcgcgccgccgcccgcctgaccgccggacaggccggggatcgggttgtcgacgccctcgggatagaccgagaccagcatttccagcccgtcgtcgtcgcgcttgcggaagcgcacgacctgacccaggccgccgcgatggcggcccgcgccgccgctgtcggcaaggaacgccttttccagcaccagaaccggcacccggctttccatcagctcgatcgaggtattggccgccgaggtcggccacaacagcgaggaatggccatccttgcggtccgacccgccctgaccgccgccgcagaacaagaggtccgaataatactgcccgtccgcacccatgccatagacgttggccgcgaccgcaaggccggtgaaggactgcaccatgtcgggcgcggccttggccagcgccatgaagatattgggcgcgatataccagccggtgcgcgtgcgcaggttcaccgccgccggataggtcgggttcaggatcgagccctcgggcgccttgaccgtgaaggcgcggtagcagccggcattgccgcgcaccgtcggcgtcagcatgcatttcagcggataggtcgcatgtgccgccgtataattcagcgtcgcgttcagcccgccctgcggcagttgcggcggcgcgccgtcgaaatcgactgtgatcgtatcgcccgcgaccttgaccagcaccggatagctgagcttgtcgcccagggggttgttcgagatgaccgagcggtattcgccatcgggcagcgcccggatcgcgtcgcgcatggccttttccgacaggccctgcaccacctcggccagcgcgcccagatcgtgcatgccgtaatcgtgcatgaaggcgtccagccgctcggcccccagcttgttggcggccacgaacgagaagagatcgcccagcacctgatcgccattgcgcacgttcttgcggatcaggtcgatcagcgtctggttcggcacgcccgcatcgaacagcttcatcggcgggatttgcagaccctcttcatagatctcgcgggcatgaagcgaatccttggtgccgccgatatccgagacatggcccaccgtccccatcagcccgaccacacgcccgtcgcggaaggcgggggtgacgatggcgatgtcgaagaggtgcccggcgcacagccacgggtcgttggtgatcagcacgtcgcccggcttcagcgtgtcggcaggatattccttcaagagcgccttgaccgcacgcggcagcgtcaggttgaagaccggcatcgcgcgcgggctgtgggccagcgtctcgccatccttgtccagaagctcgcaggcgaaatcctgcgcctcggcgatgaccagcgagaaggcggtgcggcagacggtcagccacatctcctcgacgacgttcaccagccgcgaccacatgatttccagcccgatcgggtccgactggatgcgggcgacggcctgggcgcgggtcatttcgggcgtgaccagcgcctcgccggcgcggaccgcgccaagggagacgcagaggttctgaccggcatcgatggtgacgctgtcccacgggccgatgacggtggtggattcgcgttcctcgatgatcgcggggcccttgatctcatcgccctgccgcagggcatagcggtcatagacggcggtttcgaattcgccatcctcgaaccagcactggcgcttgcccttgatcttaggggcgttgtcgctgccgcccgccgcgccggtcagcgccagcgtgggtttcggtccggcgacgcggacgcggaagttgacggcctcgaagcgcgcgccctcgaagggttcggcatagcgcgcggaataggcgcgcacgaagctgtcgcggatcgcgggcaagtcggcctcgccgatggcggtgacgggcagggggaccaggatatcgtgcatctgcccgaccagccgcatgtcggcgctgcgctcgatgctggcgtcgttgcggtcgatgccggcgcgttccagatggcgcaggccctcttcctcaagctcgtgcaggacggcgttgatggcggcggcgtcaaaacccggcgccagttccacccgcagcgaacgcacgtcctcgaacgacagcggcgcggcaaggaagccaagcgccgaggccgcgcccgaggccggcgggatcaggaccgagcgcacgcccatgacgcgcgccacgtcgaccgcatgggccggaccggcgccgccgaagcccaccatcgcataatcgcgcgggtccttgccgcgttcgaccagatgcacgcgggcggcggcggccatgctttcgaccacgaccttgtggatgccaagcgcggcttcggggacggtcaggcccagcggcccggccacgcgggcgatggcggtctttgcggcctcaaggtcaagcttcatgcgcccgccaaggaagaagccggggtcgtaatagcccagcacaaggttggcgtcggtcaccgtcggctcgatgccgccgatgccatagcaggccgggccggggtcggagctggccgaatgcgggccgaccttcagcagccccacctcgtcgatggcggcgatcgagccgccgccggcgccgatctcgatcatctcgatcaccggcgccttgatcggcaggcctgaccccttggtgaagcggtgaacgcgcgcggcctccatcatcggggcgatctcggcgcggccgttctcgatcatgcaggccttggcggtggtgccgcccatgtcgaaggaaatcacgtccgaaagcccggcgccctcggcgaacagcgcggtggccagaccgccgcccgcaggtccgctttccagcagccggatcgggaagtcgcgcgccgtttccagcgaaacaagcccgcccgccgaatgcatcagccgcagcggaccggcaaagccctgcgcccgcagcgcctgttccagccgggtcagatagcggtgcatcagcggctggacaaaggcgttggcgcaggtcgtgaccacgcgctgatattcgcccatctcggccaccacctcgctggaaagcgagaccgcgatatcggggaaggccccgcgcacgatctcggcggcgcggcgttcatgggcggggttggcataggagtgcaggaagctgatggcgatggcctcgcagccctggctgacaagctggcgcgcggcggcaaggacggccgcctcgtccagcgccgtcaccacatcgcccgcggcggtgatacgctcatcgacctcaagccgcaggtcgcggctgacgaccggatcgggataggtcacataaaggtcatagatatcatagcgctgctcggtccccatttcgagaatgtcgcgaaagccgcgggtggtgatcagcccgaccggcgcgcccttgcgctcgatcacggcgttggtgaccagcgtggtgccatgcacgatttccgacacatccgcatgggtgatgtcttgcagcgccagcagttcctcaagccctttcagcgcggcttcggacgggtcgtggggggtggtcaggcgcttgtgcagggtgacggtcgcgttctggccgtcatacaggacaaagtcggtgaaggttccgccaatatcgaacccgacccgccagcgggactgggaaatagtcatgcgttgcgtcctttctatgaaatccttggggcgacgaaagcgcggtcgccaatctcggctgcaatggtgctggcgccagtggccagtgcggaaagcatgcggtcgcgttcgcctttctcgacgaccgcgtggggatagacgatgcaaaggctgaccgcctcgtccgaggcggggtcgcgaacggcgatggcgatggcatcgacgccaggcgtggtgtcctggcttgaggtcgcgtagccctgcgcacggatcgtggccagttgctgcaacagctcctccagctcgggcaggtcggcatagatcgcgcgcacctcggcgtccgtcagccgcgccagaagcgagcgtccggtcgcgcttttatgcgcgggcaggcggcggccggcattgctgaccacgcgcagcgtgttggtgccggggaaatccgcgacggcggtgacttcgcgcccggcgcgcaggctgacatagccggtatggccggacatgcgcacgacctcggacacgacctcgccggcgcggccgatcagcccggacgagtttttgaacgccgccgacagcgccagcatcagccgccccggccggtggtggcgggtgccgccgatggtttccagcatcccggcatcgcgcatcgccttcagcaggcgcgaggcgttggccttgggcatgtccagccgcactgcgacctctgacaccgtcagatcgctgcacccggccccgaagagcctcaatacgtcagcggcattttgcaggatggacatggcgtgttccataaaatggatcagtagtattgaaaaatggaactaatgcatcgcatccgattcggtcaacgaaaaaggccagcggttgccggaattcggtgcgcggcatgaggaaaagcccgggcgcctctggggcgtccgggccggagttctttgaagttattgtgaaaaatctcagccgcggatttcgatcagccgtgcgagaatgctggccccgaccggcaggatgctgtcgtcgaagatgaaaccggggttgtgcagcggcacgccgccatcgtgaccaaggttgaagaacgcccccggcaccacccgcagcaggtcggccatatcctcggaccccatggtcggttcggcatccgccgccgccctgtcgccgacgatgtcgcgggcggcgcggaccgcgtccccggcccgttcggggtcgttgatgaggatgtcgaagacatggcggatatcgacgctgatcgcgacctcgttcgccagcgcaaggcccgcgcagatctgccggatgcgtgcctcgatcaggtcgcggtcgctttcgtcgaaatagcggaaggtgccgcgcagcaccgcctgcgaggggatgacgttataggccgacccggcgtggaattccgtcaccgagaccaccgccgcgtgacccggatcgacattgcgcgagacgatgcgctgcaattccgccagcacgccgccgccgatggcgatggggtcgcggcccatatgcggcatggcgccgtggctgccgcgcccgtcgatggcgatatcgaagaatgccgcccccgcctgcgcgcgccccgggcggatgctgacccgcgaatgggcgctgtagggcgaattgtgcatgccgtatagctcatccgcgggaaagcggtcgaacagcccgtcggccagcatcgcccgcgcgccgcctaggccctcttcggcgggctggaagataaagaccgcgcggccggcgaaatcgcgcgtctgggccagatagcgcgccgcgcccaacagcatggtcatgtgcccgtcatggccgcagccgtgaaacacccccgcattgaccgagcgataatcgaggttcgtttcctcatccatcggcagcgcgtccatgtcggcgcgcagcgcgatgctgcggccgggccgcgcaccctcaagcacgccgacaaggccggtgccgccgataccgcgggtgacggcgatcccccagctttccagcagctctgccacccgcgccgaggtgcggtgttcctgaaagccgatctcggggtggcggtggaaatcgcgccggatcgcggtcaggtcaccggcgaaggcctggatttggggaatgaccggcatcgggttcgtccttggctatggcggcggcccaagcgttgcagatcggcgcggcggtctcaaggcattggcggcgcgattgtccggccgggccgacatatgctgtcagccgatggcgctttaacattcgcgcgggcaggataaatcaggcggtatcgaccgacgcatctggaggggacattccatgaagaccaccggcaacaccatccttattaccggcggcggctcgggcatcggcgaggcgctggcccaccgctttcacgatcttggcaacacggtcatcatcgccggccgccgccaggacgcgcttgagcggtcctgcgccgggcgtcccggcatgcacgcgatgaccgtcgatgtcgacagtgaggccggcatcgccgatttcgcccgccgcctgctttcggcccatccggcgctgaacgtgctgatcaacaatgccggcatcatgcggttcgagcggctggacagcgcgcgcgacctttcggacgccgaggagacgatcaacaccaatctgctgggtccgatccgcatgatagatgcgctgatcgaccacctgatcgcgacgcccgacgccgcgatcgtcaacgtgacctcggggctggccttcgtgccgctgacgacgaccccgacctacaacgccaccaaggcggcgatccattcctataccgtcgccctgcgcgaggcgctgcgcggcaaggtcgaggtgatcgagttggcgccccccgcggtgcagaccggcctgacccccggtcaggaaacccgcgagggctatctgccgcttgacgccttcgccgacgaggtgatcgcgcttttccaccaagagccgacgccgaaggagatcctggtcgagcaggtcggcttcctgcgctttgccgaggccgagggccgctttgacgagacggtgacacgcctgaacgcctttgtggccagcgtcagcggtcactgacggcgggtccgggtggcaggggcctcgcgttccacgccatgccgccagccgctcgcgggatttcggggcagggggatcggaaatccgggttggtggtgaaaggcgggacgagccatcgccccgcaaaggccgctgaaaatgggcgatggctgaggttgtcgaccggtagcattatgcagttatcattggttttccgcatcagcggcagttcattgcgcaaccgaatatccgacccaatctgccccggcaggctttcagcgaaccccgtcgccatggccgatccgaccgatggcgccttcgcgcccgatctggacgaatgccgcaccgagccgcgctttcattctcgtgtcgttctggggggcgcggcgtctgccggcgtagagagaggcctttggcatcggatctttcgcagaagcagccgggccgcctcttgcgacaattctataaactctgccggcccggtcagggccggacctgcgaaaaagaataggcagggccgtagccctgcccttatttggtgcagtcaagctgcttgttaacagcgagcccgcggtttctgagctttaaacatcggacccgcaacgtcaaaagtcaagcggcctgaagcggagtatttccaaaacttggaggatggaaatatggaggcggcgataaaattcatccgccgtccccgtcaggcacttttataattgcctgacgggaaggttcagaaatgcggactgatcgcaaccagtcaccaccgtatttcgctgcatcgtggtaatcacgaaactggtttaactgctaacgcctcccgttgtgaacgaagagcgctctcgttacactggtttttgcaaagctgacacttcgctggtctgccagatttcaggggcacatctgaccggacagacatccgtctgcagtattagtatcttgcctatattttatcatggtggcgactgggggacgcggtaacggctatgacaattacactcggcattgatttgggcacctcgtctttgggctggagccttgtcgaacacgacgcggacaaggcaaccaacggtcgtattcttgaccttggcgcgatcatttttgcctcggccgcaggggcggggcgcgatccgcagtcgggcgccccgcttgctgaaggtcgacgcgaggcgcgctcggcccggcggcgacgggaccggtttatcgggcgacgttcggcgctgctggccaagctgatcgcgctggggcttttgccgggcgatccgccagcgcgcacgggcaggcggcagaacgaggcggttccgaacgacgatacccgtgtgctggcggcggcagacccctacgatctgcgccgccgcgcattgagcgggccgttgtcggcgcatgaaatcggcagggcgatctttcacctgaacacaaggcgcgggttcaagtcgaaccgcaaggcggatcgcggccggaacgagcccgagaacggcaagatcgcctccgccggccaggcgctgaacgaggcacttgccggccgcacccttggccagttcctcgccgatcggctcgatgccggcgaaccagcacgcgtgcgcatgggtggcgagaaccaggcctatgatttttatccgcaacgcagccatctggaagccgaattcgacgcgatctgggcggcgcaggagccgcatcacccggacctgctgaccgaggctgcgcgtcttgccattcaccgcatcctgttctttcagcggccattgaaacagcccgaggtcgggttctgcacctttgccgggatcgccggcgtgcccggggacgagcggcgcctgcccaaggcgcaccctctgtttcaagagcgtcgactttatgaggaggtcaatcagttgcgcgtcgtcgcggcaggcgccgccgggcgggaattgaccctcgacgaacgcgatcacctgatccgcgtcctgcaagataagaaaaaggtcagcttttccacgctgggcaagcagatcaagctggccgagggcgagcgcttcaacaaggaaagcgaaaaccgcaaggatctggccggaaacgaggtgcgggccgaaatgtcggacaagaagcgcttcggcaatcgctggctgcatttttcgcttgagcagcaattggaaatcatcgaccggcttcagaacgaggaggaccccgacattcttctgggctggctgaaaacggactgcggtctggatgacgataaggcggtcgcggttgccaaggccaatctgcccgaggggcatggccgtttcggtgaaaccgccacgcggcgcctgatcgaggcgctgagggccgaggtcgtcacctatgacaaggccgccgagcaggccggttttcaccatagcgatttccgcaccggcgaggcattcgatcttctgccctattatggccagatcctgacacgcgagattgcccccggaaaggccgactatggtgacgcgctggaacggcagtttggcaagattaccaatcccaccgtccatatcggcttgcggcaattgcagaagctggtgaatgcggtgatcgcacggtacggcaagccggatcgcattgtcattgagctggcacgggaactgaagctgaatgaaaaggaaaaggaacgcgaaaagcgccgtattcgtgacgataccgcctcggccgaacggcgcagcgccgccctgatcgaggcggggcgccccgataccggcgccaatcgcgcaatgctcaagcagtgggaggagctgaatccggcgaacctgatcgaccgtcgctgtccctattgcggtcagccgatcggcatggcgcagattttcaacggtgataccgacatcgaccacatcattccctattcccggtcgctggatgacggtccggcgaacaaggtcttggcgcatcgcaactgcaaccgccaaaagggcaatctgacgccccatgagaaatggggccacgacccggacagatgggcgatcatctcggcccaggtcgcgcggatgcaccgctcgaagcaatggcgctttggccccgacgccgccgggcggatcgcgcgggacggcggatttgcggcgcgtcagctgacggacacccaatacctggcgcgcatcagcggcaaatatctgcgcagcctctatcccacggcagagcacggccgtgtcgatgtcattccgggccggatgaccgcgatgctgcgccgcgtctgggggctgaacagcctgcggcctgaccatgaattcgtcgagaacgaacattccaacgcgccgaagaaccggcttgatcaccgccaccacgcgattgacgcgaccatcgccgcggtcacgtcgctggcactgatgcagcgcatttcccgggccgcaggaagcgccgaggaaatggagcttgaccggatattcgagaaactcgacccaccatggcgcgggtttggcgacgaactgggcacgcgccttttccgaaccgtggtcgcccataagcccgaccacggacgcacgggaaagccgtcgcctcagcgcgatgtgacctccggcaggctgcacaatgataccgcctatgggctgaccggcctgacgacgcccgatggcaagacgcccatcgtcgtccatcgcgttcccttgtcgtcgttgaagccggcgcagatcgctgaccctgatgccattcccgacgagaccctgcgacatgcgctgtggatcgccacgcgggataccagtggcaagtccttcgaccaggccttggcccgtttcgccagggaacatccggtgttcaaaggcatccgtcgcgttcgcctgcgcgagcctctgagcgtgatcccgatccgcgatgcctcgggccgggcttacaaggcttataagggggatgcgaacgcccgctatgatgtctggcgtctgcccgatggcaaatggcaggcggatgtggtgccgatgttcgacgcccattccgctgcgggtgcagaccggcgcccgcatccggccgcgaagaaggttctcagccttcggcagggcgatgtgatcgcggtcgagcggaacggaccggaggcggagttgatgcgggtcgtcaaattctcgaccaacggatcgatcatcttcgctccgcccaatgaggccggaccgcttaaggcgcgcaacgaagcgtcagacgatcaggaccccttcaggtattaccaggcggcggcaagttcgctgaaaaaagccaaagcccggcaggtccgcatcgacgccctgggccgcgtcttcgaccccggcccccgcgaccaggcaaggccgggcgatggaccggatcgttgatattgccaccgacggcctgcatctctcgctccaccgtggttttctgctggtggaaaggggccgggccgaggtcggtcgcgtggcgctggacgacgtccacgccctgatcgtccacgcgcatggcatcacctggaccggcaatatcgttgcggccctggccgagcggggcgcgcccattgtctattgcaatgcctcacacgcgccggttgccgtgaccttaccgctggatggacatcacgcccagaacgggcgaatgcaggcccagatcgccgcttcgggtccgttgatgaagcagctctggcggcgcatcgtttcggccaagatccagatgcagggtgcgcttctttccgcgcgcggcattgcgggcgccgaggcctttcccctgatggcgcgccgggtcacctcgggcgacaaggaaaaccttgaggcgcaggcggcgcggcgctactggccgttgctgctgggtgccgactttcgccgcaatcgcgatgcgggcgatgtcaatgcgctgctgaactatggctatgcggtgatgcgggccacttgcgcccgcgccatcgtggcggcggggctgcatccgacgttgggtatccagcgctcgaaccgcggcaatgccttcgccttggccgatgacctgatcgagccgtttcggccgctggtcgatgccctggccgaaagcatgatgcgcgacgggatttccggtcttgatccggtccagaagcgccgctttgtccggctgatcgcgtttgatctgcgtattgccggcgaaacctcgccggtcaccatcgcggcggtgcggctggcgcaatctctggccaaggcatttgaaaccgggcgccccgatctgatcctgttcgacccgccggcgccgctggactgggtcagccttgggcatgacgaggcaggtcagtgaagaaatccgacccttcctatctgagtggataccgcctgatgtggattttcgtgatgttcgacctgccggtgggaagcaagaaagagatgcgggaggcgacgaagtttcgcgagttcctgctggaccagggattcgagatgagccagttctcgatctacgcccgcttttgcaacggcaaggacagctacgagtcgcatctgaaacggatcgagagtaacttgcccgagaagggtgagatccatgtccttacatttaccgacaagcaatacgagggaatcgtccgattctcgagccagcgccgccgcaagccccgtgaaaacccggatcaattggcgctgttctagctttgtccggatttatacggcagccggatgcgctgaattctcgatacttttcaacgagatgtcaacgcatccagcttaaccgttcagaaaccgcaggccaaccgcaactatcgcttgtatgtaccagttcgcttgctgagcttaaccgttcagaaaccgcaggccaaccgcaactccacaccgacccatgccagcgtgcctgagagcttaaccgttcagaaaccgcaggccaacagcaactcaggcttagctcgtactcgtaaagcgcaaagcttaaccgttcagaaaccgcaggccaacggcacgatcacccgcatcgcgatcatcacgagcttacaggtccggccgccccgtcaggcgtagtgaacctgtcccttgggcaagggcgggaaggcatcggcatcggtcaccagatggtcgatcgacgccagcccgcaaatcgagacgcggctttccgtcccgatcttcgaggaatcgcacagcatcatgcaggactgcgcgcggcgcatcatggcgcgggcgatctcggcctcgtgcagttcgtaatcggtcgccccgcgctgcggatgcagaccgaccggcgatatcaccgcgaaatcggcaagaaagcggtcgatctcggacagggtcatctcgccgtaagtgccgggcacgtcgcggtgggggcggccgcccagaagcaggatctggcaattctcggacagggcggcaagctgcgcgatctcgatggagttggtgatgatgcgcacatcgcccttgaccagcagcgcgcgggcaaaggccagcgtcgtcgtgccggtgtcgatcatcagggtggcccctgccgggatcagctcgcaggccttggtcgcgatcgcgtccttggcctgcgcgtgatcgccaaggcgctgcgcaaaggcgggctcgggcaggatctcggcgccgggcaggatggcgccgccgtggacgcggctgagactgcccgacgtctccatctccagcaggtcgcggcgcaccgtctcgcgcgagacggccagcagttcggccagatgattcgtcagaaccttgccgtcccggccaagcagttcgagtatcttcgcctgacgttcatgcgaccacatgcgctttcccctgatcttgctgcctgcccggacgcccggcggcgccgcccgtccagcctagaggaacgtggcggattgtggaaatccctttaattgccaaccaaagatacacgcatttccacccattcggccatgaagaatgcacgaaagtaagaaaaatggccgagagtgacaatttttgtggatttgattgcgaagaatcgcatagccttgattcaagttccacgcaaatccacgggatggcggcaaatgaccgacctcgaccacgcgctgagctttgccaaccgtgcagccgatgaggcgggccggatcgcggtgcgctatttccggcaagggctggcggtcgaacacaagggcgacgaaagccccgtgaccatcgcagaccgcagcatcgaggcctgcctgcgtgcccggatcgccgaggcatttcccgaccacggcattttcggcgaggaagagggggccgagaaccttgaccgccgccacatctgggtcgtcgatccgatcgacgggacgaaaagcttcatcaccggccatcccctgttcggtggtctgctggctttgctcgacagcggcgagccctgtctgggccagatcgatatgcccgtgaccggcgaacgctggtgcggcatcgcgggtcggccaagcaccctgaacggccggccctgccggacaagcgggcggaccgaacttgcggacgcgaccgcctacaccaccgatcccctgcttttcaccggcgcgggcgccgccgccttccaggcgctgcgcgaggccgtcgggctgatccgctttggcggggattgctacaattacgcgctgcttgcttcgggccattgcgacctggtcctggagacggggttgcaaccctatgactatcttccggtcgttcaggtgatccgaggcgcaggcggcgtgatcaccgactggcaaggccgggcgctgacgctgcaatcctcgggcgaggtgctggcggcggcgacccccgaacttcaccgggcgatgctggcaagactcgcccaggcgcaagggcatcaggtggcatgaagaccgccggtgccatcccaacccaacaggagagtgagagatggacagacggaatttccttcgctacggcaccgcggccggcacgcttttcggcatggcgcgcatcaatcccgacttcttcttcacggcggcccgcgcgcaggatgcccgtccgctggtgtttctgtcggccgagaacatcaccggcaactgggatccgatggcccacaccacgctgtcgcagttcaatatcgaaggcttcgtcatgggctatctgacccgctcgcccatgacgccggaaaagcccgatgaggtggtctacgagcttgcgaccgagatcaagctgcttgatccgaccaagctggaaatcaagctgcgccccggcgtcacattccacgacggcaagccctttacgtccgaggatgtgaaggcgacctttgaatacggctcgcagcccgaacgcgcgcggcaggtctatccggggtcgaatgacagtttcgaggtgacgacgcctgacgacctcacggtgatcgtggacacgtcgaagggcggttatggcgcctcgatgttcatctttctggcgtcctatctgccgatcatgtccgcgagcgacattgccggcggcccgaacggccccctgtcgcagcggctgaacggcaccggcccgttcaggttcgtcgaacagaagggcaacgatacggtgatggccgcattcgacgactacttccgcggcaagcccaagatttccggcgtgacctattcctttgtcggcgatgcgacgacacggatgctgtcgctgatgtcggggcaggccgatatcatcgaacggctggaacccgagcaggtcgagacgctgagcaaggaacccgatatccgcgtctcgcgccaggtctcggtcgagaacaaatacctgtggttccgctgctcgaagccgcccttcgacaatccgctggtgcgcaaggccgccagccacgccatcgaccgcagcatgatcatggagatcatgggcacggcgggcgaggcctcgtcgaacttcgtgtcgccgatcaagttcggctatatcgaccttgagaacttcccgaaatacgaccctgacgagacgcagcgcctgctggccgaggccggtttccccaagggcgaggggctgccggaactggaatacatcacctcgaccggcttctatcccaagaccaaggaatatggcgaactgatcgccgccatgttgcaggagcagggcttccccgtcacgctgaacgtgatggaggtcgcggcctggaacgagcggctttacgaccggcccggcggcggtcccggccatatgatcgactgcggctggaccagcgcctcgcccgaacccgatctggtcctgcgcacgcatttccattcctcgtccaagcgtatctgcgggatcgtggacccggaaatcgacgcggcgctggatgccgaacgcaatgccccctcgctggaggcgcgcaaggaatcgcttcagaccaacctgatgccgatgctggccgacaaggtgccggcgttgccgctgttcacctcggtgctgatgcacggcgtccgcaaggaggtcgaggggctgatcctttatcccgacggcaccgccaacgcggtcgagaccacgatctcctgacccgtcccccgacaggcgcggggctgcctcgcgccttcctcaccttcgcggcccgtttgcggccacgtccagaaggatgccatgttcgttcttcgatttctcgcacgccgattgatgcaaggggcgctgatcgtctttcttgtctcggcgctgatcttcacccttctgcgcgtcgttccgggcgatccggtgcggctgatggccggcggcatggcccccgaggcgctgatcgaacagatcgcgaccgacatgggcctgcgcgatccgatctggaagcagttcgggcgctatatgggcggcgtcgtccatggcgaccttggccaaagcttcgtgcgcccggccagcggcgcggcggtggggggcgcgcgctttgacgacaatacgcgctctgaacgcgccgacgtcctgaccctgatccttgagaccgcgccgatgacgctgcaactggcgctgctgtcgatggtcttcgcgctgatcatcgcggtgcccatcggggtctggggcggcttgcggccgggcggctggcccgaccgcatggcgctgtatctgtcatcgatctttgtcagcctgccgaacttctggctggggatcgtgctggcgctgcttttgtcggtgaagctgcaactgatgcccgccatcggctacaagggctttgcctatacgatcctgccggcgctggtgctggcaatcgagatcgcgcccttcatcatccgcacgctgtcggtatcggtcgccggcgtcatgcgccagaacttcatcgacatggcgcgggtgcgcggcctgacccgcaaccagatcgtctttcgccacgcgctgaagaattcggcggtgccgctcttgaatctgctgggcgtgcagttctcgatgctgctgggcggggtgctggtgatcgaattcatcttcgactaccccggtctgggcctgctgaccatcaatgccgtcatgcagcgcgatttcccgctgatccagggtatcgccatcgtcaccgccgccgctttcgtgctgatcaacatcgccgtcgatcttgccgcgaccgccatcgatccgaggctggaatactgatgagcacactcgacattcccgccgacactgccgcccccccgaccgagcgcagcgttgcctcgcgcatctggcggcaggctttcgcctcggtcgaattcaggatcgggctgatcgtgctgacgctgctggtgctggcggcgctgctgtatccgacgatctcgggcatcgacccgaccaagatgaacatcaaggccaagttgacgccgccgatgtttctgggcgagggctggagctttgcccacccccttggcaccgaccagttggggcgcgacatgctggtgcgctcgttggtgggcctgcgctattcgctgctgatcggggtgtcgaccacggtgctgatggtgctggtcggcgcgctggtcggccttttcgcgggctatttcggcggacgcatcgacaccgtgctgatgcggctgaccgacgcgcaactgtcgatcccgatgatcattcttgcgatcacgattctgggcgtgtcacggcccacgatcccctcgatcatcatggtccttggccttgcaggctggccggtctatgcgcgggtcatgcgctcgaccgtgatggccgagcggaaaaaggaatttgtccggggcgcgatgatcctgggcgcgaccgactggcggatcatgttcacgctgatcctgcccctggtcctgccgcccatggcctttgtcgcggtgctggacgtggcgcggatgatgatctttgaatccgtgctgggctttctgggccttggcgtgcagccgccgacaccgaccttcggcaatatcatcgcagacgggcggaaatacctgatgaacgcatggtggatcgccaccatgccgggggtgtttctggtccttgtcctgaccagcatcaacctgatgggcgccgcgctggagcgggcccggaacgccatctatggaggcgcctgacatgcaggagcaaagccgggccccgtcgctgctgtcggtgcgcgacctgtcggtggtcgccgatctggccgacgggccgcgcatgatcgtggatcgggtcagtttcgatcttgagccgcgccagatccttgcggtgatcggcgaaagcggctcgggcaagacggtgctggcgcgggcgctggcaagctggctgtcgccgcccctgcgcatcgacagcgggcaggtgcttttcacggggcgcgatctggtcgccgaccccgcccatgcccgccgccttgccgggcgcgaaatcgcctatgtcggcggcaacccggccggggcgctggatccgacgatgaccgtcggcgcacaactggtcgaaaagctgcgcgccgtccgcgccgacatgtccgcggccgaggcgaaggccaaggcgatccggctgttgcaggcggttcatatcccctcggccgaacggcgctttcacgaatatccgtttcagtattcgggggggatgatgcagcgcgcgatgatcgtggacgcgctgatttccgacccgatgctgttgatcgccgacaatatcacgcagccgctggacgtcacggtggccgcgcagatcctgaaactgatgcgcgagcttaaggacgagttctcgaccgcgatcctgttcatctgctcgtccttgccggtggcctgcgatgccgcggatcgcgtgatggtcgtgcacaagggccgcgtcgtcgaaagccagcgcccggcggcgctggtggcgcatcccgaacatccctatacgcgcgggctgatcgccgagctgccgacgctgtggcaggacaggcccgacccccggcagccccccgccggacaggcccgcaccgcgatcatgtcggtgaaaggcgtcgcgaaggcctatgaaacccgcggcaaggccgggcgcgcgcttgtgcaggcggtgcgccgggtggatttcgacgttttcgccggcgacaatttcggcatcgtcggggaatcgggctgcggcaagtcctcgttgatgcggctgctgacggggctggagcgtcccgatgccggccagatcctgttcgagggcgaggatgtcggcaccgcccccgccagccggctgcgcgcgctgcgccgcaagttccagcttgtgctgcaagacccctacggctcattgccgccgcaatcggccatcggcgcgatccttgaggagccgctgaagatccaccgcatcggcaaccgcgccgagcggcgcgaacgcgcccgcgccgtgatggccgaggtcggcctgccggcctcgctttacgaaagcctgcc

SEQ ID NO: 3498 - DNA, 18550 bp, synthetic construct
  source 1..18550: mol_type = other DNA
  misc_feature 1..18550: note = Synthetic
cagcccacgccacaggagcaaggcaccggctcgaccgcaacttctccgcaaggttcaagcgcgacagcctggcaatggaggagatctgtgctgaactgacagcatccttcgtgcttgccgacctcggaatcgcccaccatccgcgcgccgatcattctgcttacgttgcatcgtggttgcgcgtgctgaaagacgatcatcgcgccatcttctctgccgccagcaaggctcaggctgctgctgactggatgcacgcccagcagccccagcctgaggagttcgctgcatgacctgcgctttggaagtctacgcgggaaggcacatggcgctggcatgtcaggaatgtggaagcgctctgtccggcaatctttgtgtccaacagcgcctccccgataagcgccacgaccgccgcgcctgcgccatcagtgctggtgcggccaggtcgggggtgagcaaccactcctgcctcgtcgtcgtccttgccatgccgacgcgtttccccgcgcttgtcgtccgcaaggccgcaaactcaaaaatccgcgccaaagggcgctagttgaggagaagagaccatgggttggctattcatgtcacgcgatggcatggctccgttcgccacgccgcaagcctatctcgacaaccagtgcacctatccgcccgaccccgacaggggccggacgacgggcctgcgtgtcctgaagtcgacggttcgttcaggtgcctactacgccgcctgccagagctacgacgctgatggcccgcgcgagactttcgcgatcatctgcctcgtcaaatggaagcccgccgcgcgcagcagcgaggcgttcggctacaaggatctcaccgaaacgatggggccgtacaattacgactgcccggcctcgatcctcgacctgctcgggccacccggcaatgaacatgccgcgcagtggcgcgaacactgccgtcagcgccttgccttgaccgcgcgccgcaagccgtcgcccggcgatatgctggttctcgccgagccgctgaccttcaccgacgggcagagcgagcggagctttcgcgtagtccagtcgggccacaagacgatcctgtgccgcgtcagcgatggggtcggggtgaaaatcagcaggctgatgagcagggcctggacgatcgtgccgccggccatcgccccgtctgcctcctgacctggcagcaagcgggcagcgccatgacggatcgcgcgccgaggcaatgctcgtccagccggatcgccacacaggtcgccgagcatgtccaggaccacttaagatataggaatgcaaggctcgaccaggtcaccaaccgcgcgttcccgccagcgcttcgccacccgcgaaagcagtacgaatgatctgtcgagcgcttcagaatgcgcctgagacagattgactgttcagatagctgctcgaagacgcgcagcgcgactggacggcgatcggcggcttgccgtcgatattctcgatctggctcgctggaagattggcgaggcaatctacgcgcccgagggagccccggggctgggcatcgcctttcacgctcaggctcgacgctgccgatgtcgcggcgatagatggtgcggcgaaggggagggggcaccggcaaggctctcagccaggccatgagatgcacgccgcatgtccagcgcggcttgaaaaagggctagccaacggtgccagtgcctcgaataacggtgaccagggcaagcgatcaagctcatgcctcacaatgctatcgctatgggcaagcagggcgtgtcccggccaacgcgttacaagccctgcgaagagtccgctcgcgcgcatggattatcgtctcttgccgcgccaaacccgagcgctgcaagatcggcaaatgtggtcctgcttctgcccgatcaccgaatcgtaatttcttgaattctatggaggttatgcgatttgaaccggcaaaggaatgatgatgcgcaactggatcgctgccctcgccctggttgcagccttggcctttccggcacacgctcaggttataacgggcagtgcaacggcagcagatggcgattcccttgttgtcgcaggccagaaggtccgcttgttcggaatcgatgcgcccgaacttgctcagacatgccagcgcgatggcgagacctgggcctgcggccaagcggccaaagagcaactttccgccttgattgcaggtgcccaggtccattgcagacgcttgagcacagacagctatggccgggcggtgtctatctgcaaggccggttcggaagacctgaacagggttctggtcgagaatggctgggctacagcctatcgcgagtacagtctcgactatgtcgatgcggagcttcgggccaaacgctacggccttggcatctggagcagcaccttccagatgccagccgattttcgccatgcaggccaacctcgagatcgtgccgctaccgcacgagcctccacgtctcgcccgtcgcgcgtgtccggttgcgtgatcaagggaaatcgcaacaggcgcggccagtggatctatcatctgccggggatgccctattatgaagccacccgcccggaggaaatcttctgtagcgaggcggaggcgcaagcggcaggatacaggcgggccatcgtccggccgtgagatgcagcgcacgctcgaaccgtcaacggccgtgttcacccggcgatcgacggcccggccatctccgccgctaaggcacacccgcaaaaccattgccggaaagtcgatggcacgcttgcattaatcatgaatggcaagccttgcttgccatcggtcagatcatcctattgccggtgctctatcgatgaattgccggctgctggcatccctgtggcaccggatggccgtcaaggtcggcatggcgcagccagatgcggcagcccggttgtgtgggttcggcgatcatcgccaaggtgactttcgtttcgcgtcaggcccggtggtcggtcattggcgggaattgcggggcgactgccaatttgcgcattgcgcagcggctcaagttacggctcgtaactgaacgtaggggttgatccaggacgacacacaaagatcgcctgcaaggcctggaagggaagaacggtccttctcagaggagcgagaaaagcttgtccattgtgaagggtttgcgcagaaacttctctcgatcggtcaacgccgccggcatttcggcataccctgtcatgtagactacgcgagcatccggatcgctgtcgagggcatgacggccaagcatccagccatcgactttgccaggcatcctcaagtccgtgacgatcacgtcgaacctgtgatccgaacccagcagggccatggcagcatcaccgttcgaggcactttcgaccttgtagccgccaagttcaagctcatcgacgagaagctcgagaagcaacggctcatcgtcaacagccagcactcgcttcatctgcccctccaacacgtcgcggaaaagaaagcttcacgctggttccagttcccggctcggactcgatcttgacctgcccaccgctttgcaccacgaatccgaagacttggctcaagccaaggccggtgccagaaccgacaggcttggtcgtgaagaacggttcgaccgcccgtgaaatggtctcgctgtccatcccgacgccttgatctttcacaaagatagcaacggacccaccttccagggcagtggtgatccgcaaaagaccacctgccggcatcgcgtcccgggcattgagcgcgaggttcaggatcgctccgtcgaactggttcttgtcgatcgcgatatccagggacgcgggccacaagtccgtctcgatcgtcattttcccattggtcgtctgttcgattagcggcacaagatcgcagactgcctgattgacgtcgaccgggacgatcaggaggggctgcttgcgggcaaaagcgagcaactgaccggttaaccttgccgcccgttcgctggctgaaagggcattctcgatgcttcttgcggccttgtgctcgtcatcaactccgcgcttcagacgctccagattgccattgatgatcgtcaaaagattattgaagtcatgtgcgatccctgcagtcaactggcccacagcctgcatttttagcgactgccgcagcatttcttccgcgcgttggcgctcggccacctcttcatgcaatcggtcaagtgcggattgcagctggctcggcgagggtacggcaaccaactttggtagaagtggccacaaaacaatcgctgtcacgatcgaggcgccagccgtgatgaccttgacgagcgcttcgataccgtatgccggaacccacaacacgagaatgctgatcaggtgcgttgtgccacaggccaggatgaagagggcgaaaaggcccaggacccaaccgaattcaaggtccggacgacgcctcagaaacagccagagaaccactggaattgagtaatacgccattgcaatgagcgcgtcggcgatgacatgcgtccagacaagacccggatcccaaaggaggcaaaagccatggggcggcaagcctgtctgcaggataaagcgcattaacctgtcgagcatttccatcgatcgctcctaacagggtcgagcatcgtcgcaatcgccattggaagcaatcggcctgcttgcgcggggtggctcaatcctgagccccaatacaggattctcctcacggacgtgatcgagactgtgttggattgatcgcaagcgcactgtcgccctgtgccgccaagcggctccgcgactgacgggcaagcacccctcgccagtagggctccctggacggattgccaaactcggtgagttatcacggacccgttgagttcgttctttatgcgggcattggcctagcctgccttgccatagaggttcagcttggagttgaaggccgcggtaactcgagcgccggcggtgaaggtcgcggccggtggaaaagtcacggtgctattgatgccgtcgtcgtaaacgcttcttgccccgaagaccgcggatctgcgggttttcatgtgtcatggatccccctcagcggaacgcggttgaagaaggcgaagccctgggcttgggcgtcaaacaccatctcgtgtgtctcgcggggataggcctgacatagaccggaagataccgccacttgcgcctttgagtgtcgctggtcgagctaattcagcgcgagactcaaataaatcgcgctgtaaaaatgggggccgcagcccccaccttatttggtgcaatcaagttgcttgttaacaaccagacctgcaatttctgagacttgaaaataccatgtcgcttgcagtcgtcaatatccctcgtcaaaatcggatatcggcttacagcaggatttgcgatgggtacgcgtctcggtctcgacattggcacgaacagcattggttggtgccttttcaatcttgatggatcaggcaggccgatcggtatacgcgacatcggcgttcgcattttctcggacgggcgcgatcccaggtcaggagcgtctcttgcggttgagcgacgagtcgcacgcgcaatgcggcggcggcgtgatcgctatattcggcgtcggtcagctctgctggaggccctgataaacactggcctcatgcctgctgacgttcaggaatccaaagccctgaccgggtgcgacccttatgttctgcgcgcgcaagcgttggatagagcgttggatgcccaccttcttggccgagtgctcttccatctgaaccagcggcgaggcttcaaatcgaaccgtaaggctgagcgcaaagcaggggatgacaaggaggggggcaagatcgcagacggtgcaaaggcgctcgatctggcgatgcatgaagcaggcgcgcgcacctatggggagtttctggctggcagggattcaagacgcgtgcggttgcgcgcggaaggagatggctatgacttttaccccgagcgccgccatctggaagctgagttcgatgcaatctgggacgcgcaggccgcatataatcctgcgttgttgaccgatgttgtccgtgaccgcttgcggcgcatcatctttttccagcgaccattgaaggcaccgaaagtcggaggctgcacttttttcaacgaagagccacgcctgcccaaggcccacccgctgtttcaggaacggcggttgtatgaagaggtcaatcagcttgaaatcacgagagcgggagcaccatctcgaaagctgacgctcgaccagcgcgacaagatcatccgcaaactaaaatcggcgaagaccgcgagtttctcaggcctggcgagactgctgaagctcgctgatggtgagagcttcagcagggttaccgaaaaccgcactggtcttgccggcgatgatatcttcacctcattcagcgacaaaaggtgctttggtgatcgttgggcgcatttcgatcccggcgttcaatggtcaattatcgagacggtgacagaggaggaagatccggtgcgcctgcgcgactggttgatggccacgcacggtgtcactgtggaacaggcggaagcaattgggcgtgtgcgcctgccagaaggccatgggcgcctcggcgaaacggccagccgattgattctcgcccaactcaagtcggggtcgaaagatggacatccgctgacatacaacgaggcagtggaagccgcgctcggaaagtcgcacagcgatttccgcaccggcgagatactggagcagctgccttactacggtgaaatcctttcacgggaaattccgcccggctcgctcgatccggacgacgacgacgaaatacgctggggcaagatcaccaatcccacggtccatatcggcctgaaccagctccgccgcttgctgaatgcccttatcaaggctcatggccgcccggatgagattgttgtcgaactggcacgcgaactgaagctcagcgagaaagacaaggccgaacacaaccggcgtatcggcgctaacactcgcgctgctgaggccaggtcgaagaaactactcgaaagcggacagcctgataccggggcgaaccggtcgctcctgaaattgtgggaagacctcaatccgaacaatccgctcgaccggtgctgtccgttttgcggacgtcacatcgggcaaatggcgctgttctcaggcgaaaccgagattgaacacatcattccctattcccgttcactcgacgatagcgccgcaaacaaggtcatcgcgcatcgcagctgcaacagggagaagggcaacaggacgccttgggaagcctggggacacacggagcgctgggcgatcatcgccgagcaagtgtcacggctccataaatcaaagcaatggcgctttgccccggacgcaatcgaacgcttcaatcaagagggcggctttattgcgcgtcagctgagcgacacgcaatatctgtcgcggatggcacggacctatctttcgagcctttatcccgacactgccggggtttatgtcattcccggtcgcatgaccgcgatgctgcggcgcctatggggtttgaacgagcttctgcccgatcataactatgtcgagaatccccatagcggcgcgcccaagaatcgcctcgatcatcgccaccatgcgattgatgccgccgttgtcggggtcacgacacggggtctgttgaacgagatttcgagggcggcgggccgcgcggagcgtcaggatctcgacaggcttttcatcgatctgcctaaaccttgggaaacattccgcgaagatttgcatgagtctttggcgcgcgttgttggcagtcacaaggccgatcatggccgcaagggcgttccggcaaagggcaaggatgccaccgccgcacggctgcacaacgagactgcctacggactgaccggcctgaccagcgaaagcggcttgccgattgtcgtccaccgtgtgcctctgctcagcctaaaaccggatgacctttccaatcccatccgcatcccggacgctgctttgcagcgggcactgcgggaggccactgacggcaaatcgggtaaggatttccaggaggcgctggcccagttctccaaatcagaccctgtgttcaagggtatacggcatgtcagagtgcgggaaacattgaaggtcatcccgatccgtgacgcatcgggtcatgccttcaaagcctacaagggcgatgccaacgcgcgatatgacgtgtggcggatgccggacggaaaatgggtatcaagctggagggacagggacgggaaagctcattcgggcatcataaccatgtttgcagcgcaccaggccggccagcctgtccagcgcccacacccagcggcgaagagagttttgagtttgcgccagaacgatttggtagcggtcgagccgcaaggtcagccgcgcaagattatgcgggtcgtgaaattttccagtgggggtcagattacctttgcagaacatcaggaagcaggacccttgaaagcgcgagacgcgacttcgcccgatattgatcccttcaaatatttctattcttctgctggcggtttgcagaaggctagagctcggcagatccgtatcgacgaacttggtcgtatctttgatccgggaccgcgttaaccagtcattatccatggtgtgccagccttcaaccccgaaaggctggccatggatcgcattgttgatattgccacggatgatcttcacctgtccgcgtatcgcggatttctggttgtcagtcttgatcgtcaggaacaggggcgggtggcgctcgacgatattcaagcggttattgttcatgcgcacggcgtaacctggacgaccagccttgtcgtggcgctcgcagaacactgcacaatcctggtgccttgcacttacaccgatacggcggtcgccttcatatcaccgattgacggccaccatccccgggcagcgagaatacgggcgaaagtggatgcggctcgcccgctattcaaacagctttgacagaaaagccttgtcaccaggattacagtgcacgcgtgatcgctggcagcgcgaggcaggcagaagccagagcactcatgctgatggtgcggcgcgtccgctccggcgaccgcgacaatcttgaggcgcaggcggcacgaaaacattggccggctctgatgggcgctgactttccccgtgatctgaacgccggcggtgccactgcccagttgaatcatcgctgcactgtcgtgcgatcctgcgtgcccggggcgatcatcggggcaggactgccccctgtaatcggcctgcaccaccaaaaaatcggataaacggttcgcgctcgctgacgatcgtgtggaactgtttcgccctcgggttgaccggctagtcggcggatgatcgacgaagatatcatgtccggaactccagaagcaaaacaagggctttcccggctgatcgggcatgatttgcgtctgggcggaactatttcgcctgtgtctgtggcgatccaacgccttgctcaattgcttgcgaggcgtttcgaagaacgcgagtcggcactcgccattgagattaagcgcattttcgctgtgacagatggggtttttcccaatcccaattcaactggttagacgcccatctgtcacagcttttccgaaatcgcagtccagctgcgaccccggcacttcacttcgctctgctagccatcaaagcatttcagaaatcgcggtccagctgcaacaacgccctaagcgtcaagcgagcgacgacaatatagcactctggaaatcgcggtccagctgtagcgcgattcggacccagatgggacccatttggaggaatgttaaatcccagagtcgcgcgacctttatcgcttgcatctgaccagcccaaagcccttccaagcagccagacagagtctttcgctggccacccagtcgaaggctgcccggcttcctgcacgtcgagattagcgtgttctggcttgcgaaaggcactcctcaatcagcacgtgttcacaaccgctggttcctatagcgttgaacctcaatgaagcttcccagatctcttcgcgccggatcaggttgggatagcctgtcaaccagccagcgcccggcatgatccgctcgctttggactggtgcgtcactcttgtggcatgggcagcacgggagccttcgaagcagctttcagggccatttccagctcggtgaccaccttgtcgggcccgccggctgcgtcgaaggcaaagtcgatcggcttggatgaacactgcagcagttcgccggcgctgccttcctccaccgcgtgaagagcaaaatagtgaccgtgatcgatgatgcgataggaccaagccatagccgcgcactccactatcccgtccaacggcgcaacggcgcagggggccgctggtttcacggcgccgggattcaatgcaacgtccccgtcagtgccgcagcctggacaacctccgccggttggccaccacggccttgcgatagtgcacaaggcaggcgctcgcggccgagtatggcgtccgtccaagctgcccagtgattgcgcgttgttgcagttccagggcagtaccgatcttctcggaaaccatcagcagcgcttcgtgttgcgagcgggcatcccaggtggtgaacctcgcaaggcgcagggcgatcaccgcagacgcttctgccgccaaggtccagctttcaagcccgaggctcatccagttcgaaatgcgcatatgggtgaagcgcttggtccggtccatcgttcccggcaactgttcgccgcgctcggtttcatcgggcattggctgtacgggctttctggccatgccgcgtgaaaaccgctgaaatgagcgctatgcgctcgacagcggcataggcgtcagtttctagctcctcgccgaagacgtccggatcgatctcccgatagcgcaagtcgcagtcgtagcccgatgccatcgcgccaagcgcttcgcgcaggtgatcctgcccgcgaaggatcgcactgccggtatagaggatgaactttcctccggacgacaggcgctccactgttgcaacggccatgtcataagcgacctgacctccgtgcatgtcgccgccgtcacgataggcacgcgctttgcggtcgatcatgtagggaggattggccagggcaatgtcgatgggcccgcggacgccgtcgagggtctccccctggaccgaacgaaccctgatgcccgctgcgcaggcgttgatccgggccagacgcaaggcgttcgggttgatatcggtcatggttaactggagacccggctgtacctgcgcggccgtgatggcgcccaccccggacccggtgccgatgtctacgaggtggcaaccatctgccagggcaagcggtgcgagttcgcgctggacgaggcttgcgaaacgatagctgtccggcccgaagaagacggcgtcttccgaaatggtcgggtaggaagagtggagatacaggtcggtgccgagactggagacgcgcaaggtgcacttccatcgcccgtcccgaaacctgtcgagcgcgccggctgcgtcgaggaggtcgcggatctccggatcgagcaggtccttggcgaacggcatgttccatcccaatgcgtcgcgcaggtctgcggcatcgcgtgtcggctcgcgggcacggatccgcgcgtgcgtcgccggagttggcgtgacgaagacatagcgccgcgccttcaaggcacgcagcagcgcaacgagagcctgatctggagcggacagagggttttctggtgtcggatcaaacatcagcaatcaatgtctgatccatggaatcgttgcggcaggagtgcaccgcagcggctggaagttcccactcagcctccatgcttgttcgccagctggcgggcagccgcggccagccacgcacgagcgtcgtccgcccttgctgccggcaacatgatccgggctaagctcgtcagcccagcgggcgtatggtggcgcctcagccctgaacgtgaatgatggcgcgcttggccgcgccgagaatctcttccagcgaactgatgactgccgccttcatcagctcgggatcgacagcgcctgaggcctcgaatgcggcgtaatcggcacttcgcaatgccagagcttcaaattgcgcgatccagagtgacggatcattggcattcttcgctgccatgggcagcaagcatgagatcagtgttcttaaagtattgatatgtatggccatcgtcgccacagaatattgctgctcgtctgcatttgaattcacgaccatttgacccccccggtgcaagtcatgcgggccatacgtatgcaaagcttattcgccaagcggataaactttatagagggtgaaaagggtgtggcgtttcaccctcggcactgcggcccaggtgtgcgaaatgcgccatgaccgattttaccgggagcgcagctcatgcgggatcggggcgcaccggtcgggccaaccagttccagcctgctcgtgtcagcgctgcggccatcatcgccgggttgagcttttcgctttcaagccggcgagatggccccgtgcaatcctcagccctctgttgcggccggttcaagcgcctcgagggacttcacgacgtagaaggacttgaacgcatcgacgagcttctcctcgttcgagtaagggcccggctgataaccgtcggtcttgatccccgcgtggttgttctccgcaagacggccatcctgggcgttggtggcgcgccacacctcggtgagcttgtccacgtcatagtccacgccttcgacggcatcctcgtgaaccagccaactggtgcgcagcagggtacggtcggcggcgagcgggacgaggctgaacgtcaccacatggtcgcagcagaagtgatgccagctgttgggttgcgtccacaccgacaggctggtttccacctgatcgccatggggccagatcagtttgcgcgatgccggcttgccgctcagggtctgggtaacagcacccggagcaaggccgaggcgggcgacgctatgccaccagccgtccggaaattcaatcaggtcgcgatagatgcccaatgcttcccattcggcccgctgtgcctcgaccgcccggtcggcgtcggtcttcacgccgcagacgttgtcctcgggcaagcccttgccaaagcctgatccatccagtgacttcagcagttcgggggtgattgctttcgcagtgatagcactcccggttgttttccatcaccagcttccagttggcatggtcaaccagctcttcagtggctgcgatcttgagcttgtccaactgatagagtgcgatctggggaactaatgtcctccttcacccggtcgatcggcggcgggttttcggaaaggcagaggaacagcaggccgccgacattctggatggccaccggtcgcagggcgtgggctcccgtgtcgaagccctcgggcatgtcgcgcacggcaataacagcggatgatcagtcgccttctgcttccgccaatttggcgggtggtgggcgaaacaaccacccccagtgcatcccgcattgccgccttcggcttgccgtgtcgtacgcctcggtggggctagagatcgttaccgccgtcagattgaccgattgagcctgatcttgaacttctcgaccagcccgttgagaatttcgtcctggcttggatttctcattgcgcgatcgcctggacgattaatgtccgcccaatgggtaataccgtcaatagggtcgtcgaacccgccgctcctttcccaatcgtcggcattccagctcgctaccactgcgccgtcagcatcccaaagaagcaggtatcggccatcttttcggttgtcaggcatgctttcaatggggcgccactcgatcatagaaaccaacctcaagttcattagacccgactccactaacaccgaagtgcgaagaatgagttgaaaactgaaaggcttacctctttttcagatcttcaatcaccgcacggcgcatgtttatgaaagcagcggacgcgaagccctttgacgctgatacttggacggctcgaaaaactctggagtttggtgacctgacctgattcactgcccttgcggatgagcggaggcgatgatggcgggacagcccggtttctttgatctttcgaaccagtacgaggccttgagcgcagcgagtgatccgttggagcgtctgtccggggtggtcgactttgaggttttccgggggccattgatcgccgctctgcgccgcagtgttcgtggcaaaggcgggcggccgccgtttgacccggtgatgacgttcaaaattctggtgctgcaggcgctctattcgctttcggacgaggcaacggtattccagatcaagtatcgcttgtcgttccagcgcttcctgggccttgggctcgatggcacggtgccggatgcaacgacggtgtggctgttccgcgagcgcttggtgcaagccaaggcaatcgacaagctcttcgcccgcttcgatgccgcactgaccgaccggggctatctcgccatgggcggccagatcatcgatgctaccgttgtgcctgcacccaaacagcgcaacaccgaggaggagaaggcagcgatcaaggacggccggatcccggaggcatggaaggcaaagccagcccggctccgtcagaaggatcgcgatgcccgctggagcgtgaagtacaccaaggccaaggtgaaggagggtgccgatcccaaggccttcaagccggtcgatctcgccatcccgatgttcggttacaagaaccacatcggcatcgaccgggctcacgggttgatccggacctgggatgccagcgccgccaatgccaatgacggcgcccggttgccgaatctgatcagcacgagcaacaccggctcgggcgtctgggccgataccgcctaccgttcgaagaaggacgaggccttccttgagaagggtatgttcaagagccacatccaccagcgcaagccgaaccgccgtgccatgcccgagcgtgtcgccagagccaatgcgaagcgctcagccatccgctcggcagtcgaacacgtctttgccgggcaaaagcaccgcatgggcctgatcgtgcgcaccattggcattgcccgcgcccgcatcaagatcggcatggccaaccttgcctataacttccagaggctcgcctggcttgaggggcgtagtgcgcctgcataacgcgaaaacctcgttcggaagtcggatccaccaaggaaatcagcggatcagccaaccagcaccgaggctcaccatctcctcacaggccatcgcgtccctatcatgccggaatcagacggttcttcgaaccgtccacttttgtcgccgcatttctggacctcgttcaagaggtggcaatagcagtgggattaggcgacaagattgaccgtttcgacatcgaatccggctactatttgaaggcgtctgggaaactcgacgaggcagctattgctgatgctgagcgaaagatcgcggtgaaagcggaaacgcaaaacagctaatgcccttgtaaggttcgacactcactccaaacgagtgtaggagatcgatgtcaccagccagttcgcctgctggtgcttgagagaccaccgcgctcccggcatgcaacgggacgcgtcaaatgcctctcctgcctgtaatcctgatcgttgttgtcggcctggctgtggccttgttcctggcggaaatcttgtctcggaaattcgtgtcgcgcgaccgaaccgaggatgacgaatttcccaattaatcaatgggaaagaacgccttggtacactgttgagactcacatttaggtgagccgtctgcaaggcattgttggccttgcaactcgcagtgaacggctagggaccccatgaagctgccagattggaacgctgcagagtgggtgctggtcctgacgcttgcagggcttggttgcttactcgtcggcatgcttgcaggcttggggttgtattccgataagctgccctagcccttgctggatcacccaagggctagggcatcacgaccaggcgactcaagccctgtcgtgatggcaagatattaccttcgttgaagaaccgggcaacgttcggccttcgcagcatgtttgccatccaaaaaactccgatctgatgaccagaccggagtattttgtgcaaccggtaaaaggggccggataaggggcgtccggcctcttctaccaacagcccaatcgacccttcgttcccgtggagacagggggggcttgtcataactaaagtcagtaggctttaatgcgccgctccagagtgacgactcgccggagggcatcgtaatgccgatcataccagttctcgcaatagtcctacttggatttatcgtcgcatgggtaatcgccgacatgatttgcaaacgcttccgaagctccggtcaattggacgacgtgcgcaagggcgatcacaaataattccagccacgtcctatgcggggctctgacgcaacgctgcacaagcagggccgcagcctgatgatgatgttcgtcgagcctttgcttaggtgctcgaaatgacgggtgcaaggatgtgcggtgtgggccgatttggaaggactagcccggttcgggttcacctttgagcctcgccagcttgatgccgacctcgtttaaatcctcccaagcctgctgctcttcgatgctggcttcgtccggatcaacttcccagatgtcgcgggcctgtttgatcaaggctaacatttctaccatgtcatccattgcggccacctcctacttgcgttgacgcaactaagtcattgctccgcatagattttaccgaatcacacgccttgcaaccagtcgcccatgtcttggggctgagtatcgcctgcgagcacgtcgacgaagaactgcgccgatgccgcgccttgccccggcacaagccctgtcatgtagccagcagcttccagagtgttacgggttgccctcttggtttccctgccctcagcggcctttcgaacgtcaccagcgacacgctcaagcgattcccggaggccttggattcgcgagaagcgatagccgtaagaccgatcgcctgcgagtttgcggccgaccacaggcacgatatcgcgcgccaacgggataggagccgccaaaccatacaccgaagtcttggccgcccattcggtccaactttcctcgttgtcatcgtcaggcccttgccctgacagcagcgcaggcaggataggagcaacgacagccagcaacaggccgcgcatcgccagttccggcaccatctcccattgcggctgcgaacagcctctccggcgtcccaagccaactccagaaaccgctgatagttcgcgaactggaacgagtagaacatcgtcagggacttgcccatctcaccggcaggaccgctcccgcgctggattgcagccagatccttggcagcgcccgcaccttggctttcacggacggcggagtccgcttcgtgcaccgcttggtcttcgtccatgcccgccgcgatggccttgttgtacgcgccgatccaggtcggaatgacgacgaggcgatcgaagaagctgatgccggtgaacctgtagcgctgcaccattgaagcaaggtcagtcttgccagcgaagcggcgcacgttttccctgatgtcgcggtccagcgtgtcgaagcggctcttgagttcaaggctacgatcgagagcgaaggcactggcctctttaggattgcgcagcgtcgtgttcatgcccgccgcgaaccagtgaggaccaatacgctccaccgagccgacatagccaccaagctgagcgaacatcgtacctaggcggtaagccatgccgacgagcgttgtgtcgcccgcatgaaggcttccagcttgctcatgcccgcacgatcgtaaacccattcattcgcgatgaattgcagccatggacggaacaggcccgcaacgtccgaccccatcgtttcctcaaccgttgccaagttgacattaccctcgatcccagcagtgggtttttcaacactattggtcggctgctgtcgcaatggatcaacggatcgtgagacgaagcggtcatttgcgacggactcggattacgagcagtgtcgctgttggcctcccttcgatcggtcgcggcccagtgcgatttaaaatcgcacaaggccgcaacttcctcggcattgggagcactgacctaaatcgccgggaagttcacttccgtgcccgcaacgttgttgatcaggttggtgaagaagatctcggccaacacggcgacgatttcgatgatctggccttcgctgaacccggcttccttcaccgcctcgatatcctctgccgaaaccttgcctcgagcttcggcaaccttgcgggaaggcggaagcggctgcggcacggggatcgtccgaggtgccccggccaaaccccggccaaggccgtcgagcagatgcgtctggttgcagcgcggctgatgatcgaggagacccgtcacccgatggaccagatcgcgctggaatcgggcttcatcgacatccgtcgtatgcgcgaggcgttcgtgcgccagtatggccagccaccacagaccccgcgtaggctggccaaggcggcttagatgctaaatctggctcggtcgtcaaacgttcggctcgcccctgttgtatcacagctgagcagatcat

SEQ ID NO: 3499 - DNA, 16157 bp, synthetic construct
  misc_feature 1..16157: note = Synthetic
  source 1..16157: mol_type = other DNA
cgattgcgtccaacgatttgttggcgctccggctgcgaaacgaccatctccgatgcgtctgaaaattgaggagatcagaaatgggacgcgattttgacagccataactgggccgacgcccatcatcatctgagcgattctgtcgcaacgctgattcaaaagctgtcttatggattcaagcggcttaccgagatccagtttgacgccccctggaagcactcgcgccgctgacccggctcaaccttttgcgcctcgggaagggcgcggagggatgtgcttcccgaaacggaacgctcgctcgtggcatccagttgggcgccgcccaaaaaccggttacttccctgtcaaccaacagggaggactcgatgcgagtcgtatgggctttggcggcgctggcgctgctcgcgggttgcgacaatgggacggcgaaaccctccgcagccaaggacaaatcggaattcgccactgcggcggatgcggaagcctttgcctctaccggcacgggatttgattatcgctatgcctatcgcctgcccggcaaccgggtgaagggcgtgctccagtcgaacgcggatgcgtgcgaccggctggggccggcgcgctgccgtatcctgtcgatgcgctaccgggtggatgattcgaaccatacccgcgcggtgctgacgatccgcattgacccctcgatcgctcgcaattttggcgacgccgtcaccaacaacgtcaccggttcggacggcgtgctgatcgacacggaaatcaagggttccgacgcgaccacccaggcgcgcagcacggcggtggtcaaccgcctgcgcgagcggctgagcaacgcacagggcctgcgcacgcccgaaggggcagcacgcgcgcagcggatcactgcggcgctggcggaaatcgcggagagcgaagcaagccagggtcagaccctggcgacagcgcctttgctgctcacctatgaatcgagcaacgcgcttaccggtctcggatcatccagcgccaatttccgcaatgcgggacagacgctgaacaactcactggcgcaactggtggtgatcctcgcgggcgtgggaccgtggctgctgctgatgctggtggtggtgcttatcctgcgctggatcatccatggtcgcccggttggcaatggtgacgccgagcccgccgcctatcagcacggcgatggcgattatcacgcgcctccgccccccgctcgcgacaagcgcacgctgatgcaacgctggttcgatcgggacgaagattagcggtcgggaccagccttgccacaatttcaccgtaaatgtggcgcgattgtgtcttgattaagtcatagcgttgtgatggcattatctcccggactacgggagataatgccatccgcgccttaattgccctttctgtcgccacctttagcctgagcgcctgctctgcagacaaggacagcaccgccagcgaatccgtcggaaccgccgccaccgcagacgacggcgcaaaggcggacaccgtcgcaggaagcgtgccacaactggcctacgcttggtcgctcggcttcctcattcccgaggacaagctcgccagcacgcaggaccggcaccgcggcctgtgcgaggatatgggcgccgcgcgctgccagatcctgtcattggagcgcggcacgggtaccgatcagaccggggccggctctctcaagctgcgcgtcgtcagcagcgaggcccgcgccttttccagcgagctttccaaggttatcgaagatgcaggcggccgttccaccgatacgaaggtggagggcgaggacgtttccaaatcgatcgtcgacacacaggcacggatcaagcagcgcgaattgctcgtggcgcggctcaccgccgtgttgcgcacccgcaaaggcagcgtaagcgagctggtcgaggccgaacggagcgtcaccgccgcgcaggaggaccttgagcaggcccacgcctggctgaaaacgcagcagggccgcgttgcaatgtccgaattcgacattcgatacctggccatcgcgccttcggccaatgcaggcagcgtcggcgcgcaactcggcgatgccacccaggcatctgccgccaccttcctgatcgggctgcgcgccgtcttcacgctggcgatctacctgctgccgtgggtgctgctcgtcttcccgctggggatgctggtccgctggctccgccgaaagggcgaaaggacacccgcctaaccctgattgcgtggcggcggcccttccgatataggcccggccattccacggccccggcgcagacgcggtcctccgcggcgccggggccatgtatttcaggggactcaaatggcacgccgccggcagatctacgagggcaaggcgaagatcctctatgagggcccggagccgggcacgctcatccaatatttcaaggacgacgcgaccgcgttcaacgcccagaaaaagggcacgatcagcggcaagggcgtgctgaacaaccggatctccgagcatgtctttacgctgctcggcaatatcggggtacccacacacttcatacgccgtctcaacatgcgcgaacaacttattcgtcaggttgagatcgtgcccattgaagtggtggtgcgtaatgtcgtggccggatcgctcgccaagcggctggggatagaagagggcacgcccctaccccgcacgatcatcgaatattattacaaggacgatgcgctcggcgatccgatggtcaccgacgagcatatcctcgctttcggctgggccgcgcaggaagaactgcacgacatggccgacatggcgatccgcgtgaacgacttcctggccggtcttttcgcgggaatcggcatccgcctggtcgacttcaagctcgaattcgggcggatctgggataatgattatccgcgcatcatcctggccgacgaaatcagccccgatggctgccgcctgtgggacatgaccaccaacgagaagctcgacaaggaccggttccgccgcgatcttggcggcgaggtcgaagcctatcaggaagtggcgcgccgccttggcctgctgcccgagggtgaggattctgcggttctcgatctggaaacgcaccggaagaagcgcgggaagtaacactcccgcgccatcggatgaaaaggcagtaaagcggcatccgagccgcgaataacatggccaggcgctatagttgcgcccgggtcatccctttttacgctttgggcataaacagcttcttaaccacatctgcttacccctgcatcggaactctcagggggattttcgatgcgttcgttccgcaacctggttgccctttcgggcgcggtcacgctggccgcctgtggcggcgacactcgcccgcagaccgtcggcagcgccgcagccccggtgggcacgcccacccctacgcacagcttcgtcagccccaccgagagcaagacctatgaaggtctcggggcggtccagcattatcaatattccacgctgtctgacggcgcaggacaagccggacagctttacgcgggcgacgcaaacacggcgcgcgatagcggcatcagcctgacctataatccccgcgacgcgatcttcgagctgacgatcacccggccgaagggcatggtgaacgtcgcggccttccgcttccaggaccccgcgcaccgcacggactttggcggcgcgatccagccgcagccgggcgttcccaatttcgattcggcgcggcagatccagtatctggaggcaggcagcggcagcggttcgctgctatcccccgccagcgcctattatacatcgggctatggcgccgcaggatcgacctatgcggtgggtgcggacggctacacctcgaccaaccagacattcttctaccagaagcccggcaccaccacgaaatacgtcacctatgccggtttcgtgcgcaacacgatcagcgccgccgaggagacgccgacaggatcggtcacgccgcgcctgcgcgagaattacagcctggaccgcgcggcattcgtgttcggcgagcggaccaacaacaccgccgtgcccaagaccggctccggcacctataccggcgagatgatcgcatcggtcgcgttcaaccccaatctcgacaccgatcccagcgcccctacctacctccaatggatgcagggcacgcacagcaccgacatcaacttcgcaacgctggcggtcgcctccaccttcaccggcacgatgctggcaccgacctatgacgcctataccagccgcgtgcattcgctgccgaccggctcggtattctcggcgaatgcgatcggcacgatcgatctggtcaacacgggcggcttcaccggccgcttcaccaccgcgaccttcacccggcccggcctgggcagcttcacgctgctgatcgcgggctcgagcttcgacggcgcattcttcgggcccaacggccaggagatcggcggcggctggcgcatcgtcggcggcacgcccgatgagcggatcgacatcctcggcgcctacaccggcaagaagccgtaatgcgcttcctcgcggcgtttgccctgtgggcggcgctgctggcgccggcagcggctggcgcgcaatccctgtccaacggatccctgctcgaccagtgccgggcagagacctgcaaggcccggctgaccccggatcagctcctgggcgagacggccaagctgatcgaggccaagcgcttcgatgaggcgcggccgatgcttgccgcgctcgcgacggtccccgcgtacaagctcgaaacccgctacctgagcgggcagctggcagcggcgcagggccagcacgcggcagcagccgaattctacatggcgatccttgccgaagacccctcgcagacccgcgtgcggctggagctgggccgcgagatgctggcgctcggcaaatatcagagcgccgacaagcagtttcgtctggccgagcagaccgacgacctgcccgaggacgtggcgcgcacgatccgcgcggtgcgcgacgtgattcgcgcgcggcgcgcatggcggctcgatctggatttcggcatcgcgccggacagcaacatcaacaacgccacctcggtggatcaggtgagcatcaatttcggcggctggcagttaccgctgacgctggatgcgcaggcaaaggcgcgatcgggcaccgggcagaccgcctcggtttcgggcgggctgcgcctgccggttgcggagcgcttttcggcactgatcgatgtggacggcagcggcagcaattatgccggaacagctttcgacgacgtgcagacccaggcggcagccggggccgaataccggatatcggaaggcaccagcgtatcgctccaggcgttgaccgcgcggcgctggtatggcgggcggctggtcaccagccagttcggcatcaagatcggcttccagatgcgtctcagcaacactcagcagatcggcgtgcagcttgatacgcgcaagaccgacgcgcgcttcgacggcaactatgacggttggcagaccggcctgtacgccacctatgagcgcgcagtgagcaagagcctcgtcgcctccgcaggcgtgttcgcgcggcgcgatgcgctggtcgcgaaagtctattcgagcaaggaactgggcgtgatcgcggggttcggcggagagctgccgcatggcatcaccttcgggatcagcggcacggctagccgggcggtctatgacatgccgatgacgatcttctccaacgactcccgcaaggactggcgctattcggcgcgagcgacgctgggcaatcgttcgatccggctctggggcttctcgccccaggtgagcgcttcctattcgcggatcgattccaccctgccctatttcgccaacgaccggctgcgcttcaaattcgcggtggcgcgttatttctagcgcgcatgccgctctctttccgggcgcgggcagatttcacgttgcgagactcggcccggcacgccatagggcgcggccatgaagctgcgcatcatcgtcaccctaaagaacggcgtgctcgacccacagggcaaggccatccagcatgccctgggcgggctaggattcgagggcgtcgacgacgttcgcgcgggcaagatcttcgagctggaggtcgcggagtcgaccagcgacgccgcgatcgacgagatgtgccgcaagctgctcgccaacacagtgatcgagaattaccggatcgaaaagcagtgaagaccgcggtcatcgtcttccctggctcgaactgcgatcgcgacatcgcagtcgcactggaaagcgtgaccggccgcaaacccgaaatggtgtggcatggcgaaagcgaactgcccgccggcctgggcctgatcgcgcttcccggcggcttttcctatggcgattatctgcgttgcggcgcgattgctgcgcgctcccccgtggtgcgcgcggtggtcgaagcggcaggacgcggggtgccggtgctcggcatctgcaacggtttccaggtgctcaccgaaaccgggctgctgccgggcgcgctgatgcgcaacgccgggctgaacttcgtatgccgcgatgtgccgctcacggtcgagacttcgcagtcgatcttcacatcggcctatgctgccggggaaggcatcacgattccggtcgcgcaccatgacggcaattattttgccgacgcagcgacgctcgacgagatcgaaggcgaaggacgcgtcgccttccgctacgccaccgacgtcaatggctccgcgcgcaggatcgcgggcctactcaacaagagcggcaacgtgctgggcatgatgccgcacccggaacgtcgcatcgaagcggcgcatggcggcacggacggacgccgcctgttcgaagggctcctcgaagcgatcgcctgagcggaacaagccgattccgccagcgattcgcccccggaccttctattccccagatcggcaagcccgctcagccggacctctcaatcgcgtccgctcggctccagacagggagtctcatttgccgccgcagccgcgtcacggatatttttatccaaataggcttcccacggggataattctctgctagagagcgagcatcatgaccgcaatccctctctgttcgcgtccgcgacccgctacccaccgacattgacggatagctaggctgcgcccgtctgacgggtgcggtcataaagtcaggcacgcggttcaagccggcaagccacagcctcatgaaatcccgatttttccgagcttttctgctgccttcaggtgtggccgaacgcaatatagtgcgcggccggtttgtgattccggtgctagcgggtgcaaatcccgccggccacccctgagggcagcggcttggcccggcccgggtccgagtggcgaaatgggaacgcagcggcttgcaaacccgtgaagagccggttcgattccggcctcggactccattgccgaacaaacctatatggttttgtcggccgatgccgcgcgcccgtccgccgctctcctatacgcgagccgcgagccacaccccgatatccgccatcacgctttccttgccgtaatcggcgagcagatcgtggtaatggccctcatagagcttgagcgtcttgtccgccgatccggcggtttcgtagaagaacttgctgcctgcgggcatcgtcgccttgtcttcggtgccgtggaggatcagcagcgggatggtgatcgtgggaaaatccacgcgcatccggtccgcagcatatagcagcgcggcgacggtcgctgcgggctgcttctcattctgcgtatatggatcggcatccagcgccgcgacccaggccggatcgcgcgagaaatccttgttatggagcttgagcacgccgagcctgggcacgaccttccccaggaacttgatgatcgccagcgcgaaggcgggcgcaggcacctgaaatgcgaagctctcgcagatgaacccgtcaatctcgtgctggtgatcgagcacatagagcgagcccgtcacgccgcccgcgctatggccgagcaggaagagcttgatccccggatatgtcgccttggcgatcgcaatcgtgcccgcgacgtccccggcataatcggcggcatcctcgacatagaagcgccgcccgtccgagcggcccctgccccgcaggtcgagcgcgaacacagcgaaaccctgctccgccagccgctcggccgcccagagatactgcccgccatgcgaattgacgccgtggcagatcaccaccacggcgcgcggcgggccttctggccgccatgcccggtagaagatgttgagcccgcccgatccggggaacgtcgcctcggtcgccgccatgcctgcctcccgtaaggtcagacaagactgcgcacaccttcacattcgcgcaagtgattactgtgcaaccggttcaattgctgggggtgcggccaaaagccggagagaagcgcgcgagcagcaggatcgcgcagggccagaacatcgtgttccacacgtcatgccaattcgcccagaggtttatgggcgtatcgaacgccacgctgtcacgcagatcccaggcctcgccgatcagcgccgccgcgagcaccaccgccagtggcttccagctccgcaccggccatctgaacgccagcgcgacaccgaagaacagcaacagcccgacatagatgtgcagtgcatccttcgcgagatggacatgatcgatcagccagaatttggccgattgaagcgggctcatcagacctgggccgtgaacggggtgaaatcagtatccttatcgaagatgtccacgccctcgcggcgcttgaggaaacccaccaccagataggtgaccggcgtcaggatcacctcccacgaaaccttgaacagccattgggtgaggagcacggtgatgacgagttcattggtccagcccgccgcgccccagaaggcgagcggatagaagatcaggctgtccaccccctgccccgcgatcgtggatccgatcgtgcgcgcccagagtgccttgccccgcgtccagaccttcatccgcgcgagcacataggaattgacgaactcgccggcccagaacgcgcagaccgacgcaagcacgatgcgcggcacctgtccaaagatcgtctcgtacgcgccctgattggtccagctcggcgcgggcggaagcgccaccaccacccacgacatcagcgccatgaacaataccgcgacggtgcccgcccagatcacccgccgcgcgcccgcataaccatagacctcggtcagcacatcgccgatcacataagagagcgggaagaacaggatgcccgcgccgaacggccaccagacgtcgaaccccggcagccagacctgcgcgaccttccccgcccccaccacgttggaaagcagaatgatcgcaacgaaggcggccatcacgaaatcgaaatagcggaaatggcgcgcagccacttcatgcgctgaaacctgagccggcatcgctttcccccgcgccaagtgcggccgagtttatcgcagtttgcaccccatgcaatccgcgctaacgggatgcggcgcgcgcccgtagctcagctggatagagcacatgccttctaagcttgtggtcgctggttcgaatccagccgggcgcgccaatcgcgattctggccgacgcgcccggattgcccttatccggttcgcgccggggactgccgcgcgtaaatgccgtcacggcgccttctcccggcggaggaggcaatggcaccgttttggcgaagctctgcgcaatctgcgttgacatgaggcagtgccgggcgcaatctgaccattcagaaatcgcgggccggctgttaacaagcagtctgactgcaccaaataagggcgaggctacggcctcgccttttttgtttgagggcgcgacacgtcggcgcggggtctttcaaaatatgatctccgaaaacctcgcggagcggagttctatcggcggtcagggaatctgttcgattttgaactgtccggcggcttcttcccacaaagaatattgaccaatcaaccaatccacttagcgttacgttacttccactgacttgaaccgtggagatgggggatttgagacgggcggctcgcgcgagtcactgtcgcgcgttggggggggcgaaagtatgcggcggctggggcttgatattggcacgaattcgatcggctggtctctgatcgaagacgatgcgcggattatcgatatcggcgtccgcatcttctccgatggccgcgacccgcagtcgggaacgtcgctcgcagtcgatcggcgcgaggctcggtcggcgcggcggcggcgggaccgctatatcgggcggcgctccgcattcctggacgctttggtggtgcatgggctgatgcccgcggacacggacgaggcgaagctgatcgcggcgctcgacccctatgttctccgcgcccgggcgctcgatgagaaactgacgccgcatgagatcgggcgcgcgctgctccacctcaaccagcggcgcggtttcaaatcgaaccgcaaggccgagcgcaaggcgaacgacaatgaggacgggaagatcgccagcggggcacgtgcgctggatcaggcgatggccgaggaaggtgccgatacgctgggccagttcctcaatcgccgcgagacgaagcgcgtgcgaatgggcggcgagcaccaggaatatgacttctacccgcagcgccgccatgtcgaatatgagttccagcgcatctgggaggaacaggcgaagcatcaccctgccctgctgaccgaagccgcccgcgccgcgctccaccgcatcctgttcttccagcggccgctgaaggaacaggaggtggggctgtgcaccttcgcgcccgacgagcgccgcctggccaaggcgcatccgctgttccagcagcgccggctatacgaagaggtcaaccagcttgaggtgacgacgcccggcgaggccaatcgcaagctgacgctggacgagcgcgaccggctggtgcgcgagttgtcgcacaagaaggcgatcctgttcacatcgctggcgaccaagatcaaactggcgcccggacagagcttcaacaaggcgagcgagacgcggacccaactggcgggtgacgagatccgcgcggtgctgggtgacaagaagcggttcggcaccgcgtgggagcatttcgaccgcgaccggcagtgggagataatcgagcggctgctggacgaggaggatcccgatgcgctccacgcctttctgactcaggaatgcgggctggacgaggcgcaggcggcgaccacggcgaagacttcgctgcccgagggatatgggcggctgggcccgacggcgacggcgcgcattctggacgagttgcaggccgatgtgatcacctatgacgaggcggttcgccgctgcggctggcatcattccgatcaccgcagcggcgagatcctgccgcaactcccctattatggcgagctgctgagccgcgagattccgccgggcacgcagaatccgaacgatccgcccgagaagcgctggggcaagatcaccaaccccaccgttcatatcggcatgcgccagctggagaagctggtgaacgcgatcatcgccgtccatggccgacccgaccagattgtcgtcgagctggcgcgcgagctgaagctcaacgaaaaggacaaggaggagcataaccgccgcatccgccgcgataccgctgcggcggtgaagcggtccgaaaagctgctcgcagaaggatttcccgataccggcgcaaaccggatgctgctgcgcctgtgggaggagctcaatcccgccaatccgctcgaccgccgctgcccctattgcggcgacccgatcgggatgcggatgctgttttcgggggaggcggacgtcgaccacatcatcccctattcccgctcgcttgacgacagcgccggcaacaaggtcgtcgcgcaccgatcctgcaaccgcgccaagggcaatcgcaccccttatgaaaaatggggccatgacgaggaacgctgggaggtgatttcggcgcaggtggcgcgcctgcacaaatccaaacagtggcgcttcggccccgacgcgatggcgcgcgcggaaaaggacggcggctttctggcgcggcaactgacagacacgcaatatctgtcgaggcttgccggcaagtatcttggcagcctctacgcgaccaaggacgaaggcagcgtctatgtcattcccggccgaatgaccgcgatgctgcggcggctgtgggggctgaacgatatcctgttcgaccacaatatcgtcgagaacaagcacagcaatgcgccgaagaaccggctggaccaccgccaccatgcgatcgacgcggcggtggtcgcggtgacgacgcgcggcctgttgcagcggatcgcgcggacggcgggccaggccgaggacaagaatctcgatcggctcttcgaagggctggagccgccctggcccggctttcgcgagcagctgcgcgagcggctgcttgccgtgaccgttagccacaagcccgatcacggccgcaagggcaagcccgcgccggggcgcggcatgaccgctggtcggctgcacaacgacacggcctatgggctgaccggcataacctcggccaaggggctcccgatcgtggtgcaccgcgtgccgctggccagcctcaagcccgccgatatcgcagacccggagcggatcgaggatcccgtgctgcgccaggcgctcgccgacgcgactgcgggcaaaatgggcaacgacttccaggcggcgctcgagcgcttccgcaagaaccatccgcagtttgctggcatccggcggctacgcgtgcgggaaccactgagcgtcatcccgatcaaggatgcccaggggcgcgtgtacaaggcctataagggcgattccaatgcgcgcttcgatgtatggcggctgcccgatgggaaatgggtgtctgacatcgtctctatgttcgacgcgcaccagcccgaccaggccgaccgccgaccgcatcccgccgccaagaaggtgctgagcctacgccaaaacgacatgctcgcgatcgagcgcgacggtggactgcgggagattgtgcgggtggtgaagttctcaggtaatgggcagatcgctttggcccgggacaacgaggctggcccgctgaaagcgcgggacgcgtctcccaacgagcttgacccgttcaaatatgtcctctcctcggcgagcgggctgaagaagataaaggcgcgtcaagtccgggtcgatccattagggcgcattctcgaccccggcccgcgctgacacggtggccgccctcccctagcctcagccgcgggagggcgagtggaacgtatcgtcgatatcggcaccgaggggctgcatctgtcgtcccaccgcggcttcctgatcgtgtcgaaggatcgcgatgaggtggggcgtatcgcgctggacgatgtgcacgcgatcattctccacgcgcatggttgcacctggaccggtaacctcgtcgccgccctcgccgagcgcggtagccccatcgtgttctgcaacgcgcaccacagcccggtggccgtcacgctgcctattgcaggatttcatgcccagggtgggcggatgcgggcgcaatgggaagcgagcaagccgcttaccaagcaactttggcagcgcatcgtcaaggcgaagatcgcgatgcaaggcgcgctgctggatttccatggcgcgcgcgaggccggggcattcgcgctgctcggccggcgggtgcgctccggcgatcccgaaaatctcgaggcgcaggcggcgcggcgctactggccagcgctgatgggtcccgacttccgtcgcgatcgtaatgcgcccggcgccaacgccctgctcaactatggctatgcggtgatgcgggcaacggtggcccgggcagtcgtcgctgcggggctgcatccgacgatcgggatcttccacgcaaaccgcggcaatgccttcgcattggccgacgatctggtggagccattccgtccattggtcgatgcgctggttctgtcgctgatcggccagggcgtcgagaagctcgatcccgcgatcaagcgccgcttcgcccagctgatcgcgttcgatctgcggatcggagaggaaatgtcaccagtctcggttgcggcgcaacgcctcgcccagtccctggcgcgcagttttgaaacaagtgcatccgatttggtgctgtttatcccaccggcgcatgcagggtggatgaaactgacccgcccgctggatcctttcgcggccgaatgagcgatggaacgcatctcagcggctatagattaatgtggattttcgtgatgttcgacctgcccgttacgaccaaggagcaggcgcgcgaagccaccaaattccgcgagttcctcctcgatcagggattcgagatgagccagttttcagtatatgctcggttctgcaatggccgggagagttacgattcgcatctcagacgaatcgaacgaaacctgccggagaagggcgatatccatgtcctcacctttacggacaagcagtatgaaaatatcgtccgcttctctagccaacgccgcaaacggccgcgcaataatcctgatcaactggcgctattctgatccgacagccggtttttgccgggccggatgtgagactttcctgatggcatacaacaggttggcggcacatccggcctagcagttcagaaatcgcgggccaacagcaaccaatcatggataaaatcagccggattgaaggcctagcagttcagaaatcgcgggccaacagcaacaatgcaggcgctgcgaccacgaccaacgtcggcctagcagttcagaaatcgcgggccaacagcaacatcccggagcgacaggccgcgcgccagccggcctagcagttcagaaatcgcgggccaacagcaacgagatgatccgcttcgtcgccggcgtcggcggcctagcagttcagaaatcgcgggccaacagcaactcaagctttcgctctccgttgtggattgagggcctagcagttcagaaatcgcgggccaacagcaacgccctctcgatgatcatgaccaacgatggtggcctagcagttcagaaatcgcgggccaacagcaactggtcgcggtcgcggacgagagtcagggcaggcctagcagttcagaaatcgcgggccaacagcaacaggcccagcaacaggagcgcatggcggccaggcctagcagttcagaaatcgcgggccaacagcaacattcgaaggcttggggcgagttccgcgtctggcctagcagttcagaaatcgcgggccaacagcaacagaacaggtgacgcgcctttgcgcgcggaggcctagcagttcagaaatcgcgggccaacagcaacctggccggagtgcgttctcaatcccgctaggcctagcagttcagaaatcgcgggccaacagcaaccttcacgcgcgagacttcgcggtagatcttggcctagcagttcagaaatcgcgggccaacagcaaccggcaatcgaggaaatggtgcggcccatcgggcctagcagttcagaaatcgcgggccaacagcaactgccatcctgcaaggcggtggcgaattgagggcctagcagttcagaaatcgcgggccaacagcaacagcctgggtatcggcaccaaccggctcggtggcctagcagttcagaaatcgcgggccaacagcaacaaagacgaggtgcagcagtgaagctccaggggcctagcagttcagaaatcgcgggccaacagcaaccggctgtaaacaaggccgttgggggcgtctggcctagcagttcagaaatcgcgggccaacagcaactatgtccgcaaggttggcgccaagacactgggcctagcagttcagaaatcgcgggccaacagcaacattcccatgcgcggcgcccagggcttctggggcctagcagttcagaaatcgcgggccaacagcaacagaacgccgcgcgcgtgctcgacgaagtcgggcctagcagttcagaaatcgcgggccaacagcaactcacgcgcatcggtccgctcggccaggtcgggcctagcagttcagaaatcgcgggccaacagcaacgggccggtgatgcgaatgcgcttcatgctaggcctagcagttcagaaatcgcgggccaacagcaacacttcgtgaagacggcaagggcaactacgaggcctagcagttcagaaatcgcgggccaacagcaac

SEQ ID NO: 3500 - DNA, 16064 bp, synthetic construct
  source 1..16064: mol_type = other DNA
  misc_feature 1..16064: note = Synthetic
tcggtgcttgaagcgggaacccgacgatgcgacgctgtaccatgggcacccccgcccacaaagcgaaagcgcccgcatgccccccgccccccgccgtccggtcgcccttcgcgcgcttgcatgcccggccctgctcgcggcatgtgcgcccatggccccgcccgccacgcctccggcccccgcatcaccgcccgccgcatccgcgttcgcgccgctgacctggggcgacctgctgaaacgcccgcgccccgtcgccgatgcgaccctgtcctacggcgccgcgccggagcagaaggtggatgtctggctgcccgaccgtcgcgggccgcaccccgtggtcgtgatggtccacggcggctgctggcagacggatatcgcggaccggacactgatggactgggtcgcggcggacctgcgcgcgtcgggtgtcgcggtgtggaacatcgactatcgcggcgtcgaccggccgggcggcggctatcccggcaccttccgcgacgccgccgccgccaccgacctgctgcgcggcgaggcgaagcggctgaacctcgacgcgagcaaggtcgtcgcgatcggccattccgcgggcggccacctcgcgctctggctcgccgcccgcccgcgcgtgcccgcgggcagcgtgctgcgcacccgcgatccgctccccgtcgcgcacgtcgtctcgctcggcggcctgcccgatctggaagcgacggcggcgtcgcccgacaacggctgcggcacggacgtgatcgcgcgcctcgtcggcggcaattacgccgacacctcgatcccccgcctcctcccgctcggcgtggcgcaggacctcgtcaacgggcgcgaggaccgcatcatccccttccgcatggcgaccgattacgtcgcccgcgcgacgacggcgggcgaccgcgcgacgctgcataccgtcgcgaacaccggccacgtcgaactcgtcacccccggcaccgccgcatggaaggaagcgaagcgcctgacgctcgccgccctcggcgtgcccgatcacgcgcgggacacggcacgatagctccggtcactcttcaagctgaaagacgcggaaggcaatattgtgccagtcgtccttcgataccgcgagcatgtcgatcgtgccctccatctcgcgtcgctccggaccgcccgaccgcaagacgaggtagaacatgctgacatcgcgcaggatcaccttcgccggaaagcggtcggcgtcccggatgaggtccacgacggtcccctgatatccgatctgccgcccgtccgcgccgatcttgcccagcacataggcgacgatgaaccggcccgacccgtcgcccttgcggatcagctcggcgagggggccgtaaaggaacttgtcgcccgcgatccggctggcgtgcgcccccgcgagccgtccgcccagataggccgtgacgcacaaggacagcaggccggcgaacatcgcgaacgactgttgcggcgaacgcagcccgccgcgatcggcagcgaacatcagatagggatccgcgagcggcaacggcgtccatgccggcaggcatgagacgacggacaacgcaccggcgtacacgacatggacgatcaggctcgccgatccgaccagcgcgatgccgtccgcgctggacagcggcggactcgatggctccacctcggcggtcttcgccatcgcgaagaaggtacggatcgcgattattccgggcagcagcaatgcggcggtcagcaccgcaagcaacgtcacacccatcgacgactaccccgcggcgtcaccgcgttcccgcacgggatggtccggcgcatcgcgcaatcgcacgacgtagacaccgttctcgtccggtctggcgacccgctcgaccgcgccccagccaccgaaagcagccatcatccgcgcagcggtacgcaacgactcatcggagttcatgcggctcgtgctcatgggacaaagctaggcgttcaccaactgttcggcaagtcccaccccctgattgcaccccccgcccccatcccctatagccgccctcatcccgccccggtcggccgcgcgccgccggggccgctcgtttccaggggaattcgccgatggctcgtcgccggcagatctacgaaggcaaggccaagatcctgtacgagggtcccgaacccggcacgctgatccagtatttcaaggacgacgccaccgccttcaacgcgcagaagaaggggacgatcaacggcaagggcgtcctgaacaaccgcatcagcgaacatatctacacgctgctgaacaccatcggcgtgccaacccacttcatccgccgcctgaacatgcgcgagcagttgatccggcaggtcgagatcgtcccggtcgaggtcatggtccgcaacgtcgccgccggctcgctcagcaagcggctggggatcgaggaaggcacgcagcttccccgcacgatcatcgaatatgcctacaagtcggacgagctgggcgatccgatgattaccgacgagcatatcgccgccttcggctgggcgtcgcaggaggagatgcacgacatcgccgacctggcgatccgcgtgaacgacttcctgaccggcctgttcgccggcgtcggcatccggctggtggacttcaagctggaattcggccgcatctgggacaacgactacggccgcatcatcctggcggacgagatcagcccggattgctgccgcctgtgggacatggagtcggccgaaaagctcgacaaggaccgcttccgccgcgaccttggcggcgaggtggaggcgtatcaggaggtcgcccgccgcctcggcctgctgccggaggaaggcgcgacctcggtcctcgacctcgacagccatcgcaagcggcgtggaaagtaggcacggttgacggcctgttaaccccatttccctaatcccccacccatcggaacgggttgttcgggggtttggtgatgcgggttacgtcgatcatgctggcgctgccgttgctggcgctggccgcctgcggcggcgcgggaccggaaagcgcgggcagcgtcgccgccccgcctgcgggcacgggcggcaccggatcgggcggcacgggctccggcgggagcggcaccggggtcggcgccgcgcccacgccgacgcccaccccttcggcgggcttcctgtcggtcgcggaggaaaccaccttcaccgcggtcggcgcggcgcattcgttcgactatagcagcaccaacggcgtcatcacctcggtcctgtatcagggcaatgcggggacggtgcgctcgcccagcggctcggtcgcctacagcccgcgcgacggcatcttcacgctcacgctgaacgacacgaaggcgggcatcacgcgcaccaaccggttccaggacccggcgcatcgcagtgacttcaaccccgaaagcacgccctcgctggaggcgccgaacctcgccggcttcaactatctcacgtccgggaacgccacccagacgacgaccttcttctaccagcgccccgattcgacgatccacgtcacactgggcggcttcagctatctggcgaaggacgccgccggcgtcctgaccgagcgcgatcacggcgtcatggtcttcggcgcgctgacgccgcagacgcagatcccgatttccggatcgggtacctataacggcggcttcatcgcgtcggcggtcctgaaccccacgttcgattccaccagcccgcggaccagctacatgcagtggatcacgggcgacagccgcgtgctggtcgatttcggccggtcgaccgtcgcggtcgatctttcgggtcggctcggcccgacgttttcggagggcacgcgcatcgccgacgccgcgctgctctatcccagcgggacgtatttcgccgccagcgggtcggcgacgatcgacctgatccgcaccggcggcttcgcgggcgtgttcgacaccgccttcctcggcacgcgcgcgatcgacttcgccggcatcagcgcgggcagcagcaccgcgggcgccagctcgatcgacggcgcgttcttcggccccaatgcggtgaacgtgggcggcagcttccgcatcgtcggcggcgtgccggaccagcgtgtcgacatccagggcgcgttcacgggcagccgctgaccgtttccccaccacgcaagggtccgcgatgtcgcgtttcctgttcgtcgcggccctcctggccgggctggccgccaccccggcggcggcaggccccggcccggtggcggcagggacgcccgcgcctgccgctgcgaccgtcgcagcggacgcgggcacgccctgtcccgccgcgccgtgccagctgcgcttcaccccgccgcaattgctgtccgcgatcgagcggctggtggtcgagcgccgctatgccgaggcgcgcggcctgatcgccgtcctgcggctggcccccggcttcgcgctgcaaacccgcttcctgaccggctacatggcggcgcaggagggcgatcacgccgccgcggcgggggcgtacaaggcgatcctggccgacgatcccggccagacgcgcgtccggctggaactgggccgcgccatgctcgcgctgggccaggccgccgccgccgaccgtcagctccggctggcgcagcagagccgcgaactcgatcccgacctcgcccgcctggtgcgcggcgcgcgccaggtgatccgctccagccgcgccttccgcgcggacgtcagcatcggcctggcgcccgattccaacatcaacaacgccaccgacgcgcgcaccgtcaacgtccgcctcggcgatgtcgaactgccgctgtcgctgaacgaggatgcgcgcgcgcgctcgggcaccggtgtcaccgcggtcggcgcgatggcgggacgcctgcccgtcgccgcggacctgttcctgctcggcaacctcgatgccagcggcacgaactatcccggccgccgcttcgacgactatctggtgcagggcgcgctgggcggcgacgtgcagctgtccaacagcgtcagcgcctccttacaggcggtggcggcgcagcgctggttcggcggcgcgatcgccagccgccagctgggcatgcgcggcggcgcgcaggtcgcgctcgacgacgtgcgccggctcggcgtccagctcgacgtccgccgcacgcggtccgatttcgaccgcggcttcggcgggtggcagggcgggctgtacgcctcctacgaaaccggcctgggccggtccgcgatcgccgcggcgcaggccttcgtccgccgcgactggctgaacgccgatgccttgtcgaacgtggaggtcggcggcggcgcgacgctggcgggcgaactgccgttcggcatcaattattccttcggcggcaccgtcagccgcgcgctgttcgacgcgccccagccgatcttctccgccgatccgcgccgcgactggcggctgatctcccacgcctcgctgggctatcgcaagatccgcctgttcggcttctcgccgcaggtcgcgtggcaggcgagccggatcgacagttcgatcggcttctaccgcgcgacgcgcaaccgcgtcaccctgacggtcgcgcgctatttctgatcgcgacatttctggccgcgacgggccgcgcgatcctgccgaccctcgctcttcccgccccgggatcgaagcgtcgccgcgaagccttcgacgtcgccctgcccgaccggcgcaggaagcccggacccgggcgtcgccgccacgatgcctgccgggcggccttcgccggttccgcctcgcctggctcgccgttcccgccgtgatcgacacaccggtgtgccccgatggacgcgctcggcattcgcgactgggatggtcgaataggaaagacggataggcggtaacgaagggtgaagcggccattccggactatggtgtctcgccgcgatcggtcggccgattatcggccgtcccgttgatccaacatgggataagccatccccgatactcggatgctctcgcccgcgacgtcggtgatgtcggcgaccagctcgcaaggttggcccatatcctcaccttggtagattttgatccttccaccgtgcggccatctcacgtcgcgtagaaggcctccgagcgcggcagccgcagcgcccgttgccggatcttcatatacgcctccgatggcgaatggattgcgagcgtgaaagacggtcagcgtctcggcatagatgaagctgaccgtgccgatcccctcgcgccgcatgaactcgcggcccgcgcccaggtcgtaatgcatggccttcagtgcggctcggtccttcaaggcaattaccaagtgatccagacccgcatgggccaccgccggcgatagtcttggatcaagatcgtcccctacgtaggagaataggtcgagcgcggttgctacgatctctgacgatgctggccggctcgatgtcggcggggattgaagcgccgcccatgccccttccgccgtccgccgcccctctacggtaatatgcgcgttgttgagcgccagttggaagatgccgtcttcataacgatctgccaatgccgcgccgagcgccagtgtggcatgaccacagaattgcaccgctgcctcaggagagtaatagcgcacccgaaactcgttgccttgtgacgctgcaaataccgtctcggaatatccgacgtctgcggcgatagcctgcatcgattccaccggcggcaatacagcgccaatcacgaccccggccggattcccgccgtggttcccgatagagaaggcggcgtatcgctgcacatcgattgccatgccatcggcgggtgcggtggtttgattaggcatcgtctatgtcgtcacgtccaagatgctccctgaaatatggggacattctaaaaacctaaatttggaatgtatcatgcgaacgtaaggcacaagaagcgtttttgcttgattttgttaggctcatttggttgagcggcttacatgctcaaatcagcccttgatagcttcgatcaatcgatcatcgacattctgctcatcgattcccgcacgagcctccgggcgatcggcgccgagattgggctgacagcgcctgccgtgcgggaccgcatcctcaggatggaggacaccgggatcatcgaaggcttcagcgtccggctgaacgcgagggcacttggcttcatgctggaagcgatattgaacgtcgaacctcttccgggcaggctcaaggaagttgagcagattttgcgggacaccccagaagttttggaatgctccgtcgtcacaggaaatgactgcttcgtcgcacgcttcgttctgaaggatgtgggtgatctggatcgaattcttgagcctcttcacaatgtagctcgcaccaaaacaagcattgtgcatcgcaaacccataccgtcgcgccgcccaccgttttagtttcccgtttgggacatgaagcgagtatccgttcgccccaagcatattggcgcacaccccctttcccgaaacccgttcccggataatccttcccgaaacggtcgatcggacgcgtgatatcgggagccgggaccgtccgatcgtggccgaccgccgccatgacatggcagcacgatcgcccggaccgacggacaggccgtccggccgccgccgtctcgatcgccgcgaccatccggtccggccggaaccgacaatccttgcccccgcgctcgcgccgcggcataggcgcgggcatgaaattgcgcatccatgtgacgctgaaacccggcgtgctcgacccgcagggcaaggcgatcgaacatgccctgtccggcctcggcttctcgggcgtggagggggcgcgcgtcggcaagctgatcgaactggacgtcgccgacaccgtcaccgacgaccaggtcgacgccatgtgccgccggttgctggcgaacaccgtgatcgagaattaccggatcgaacgctgagatgaggaccgcggtcatcgtcttccccggcagcaattgcgaccgcgatctggcggtggcgttgcgggcggtaacgggcgtcgcgcccgcgatggtctggcatcgcgataccgccttgcccgacgggaccgcgctggtcgcggtgccgggcggcttctcctacggcgactacctgcgttccggcgcgatcgcggcacgctccccgatcatgcgcgcgatcgtggagcaggcgggcaagggcctgccggtgctgggcgtgtgcaacggtttccaggtgttgacggaggcggggctcctccccggcgcgctgatgcgcaacgcgggcctggacttcgtctgccgcgacgtcgcgctgacggtggacggcgcgcgtacgtcgttcacgcggctctatgccgcgggggaacggatcacggtccccgtcgcgcaccacgacggcaattacgtcgccgacgccgcgacgctcgaccggctggagggggagggccgggtcgccttccgctacgccgaacccgtcaacggcagcgcccggaacatcgcgggcatcacgaacgatcgcggcaacgtgctgggcatgatgccgcatcccgaacgccgcgtcgaagccgcgcatggcggcaccgacggccggcggctgttcgaggggctgctggaggcggtggcggcataggcgccggccgcgcatgcggcgaccgaaagccgctgtcctacatcgtcgggtcgcgctatatcgttgatccgtcgctgtttctcatccgccactccgcaaccgacgcgccgcaaggggcggtcgcacccgcccgccgcgtacatcgcgatcgactcaacattcgcaacattcgcgcccgccggcgggcgtcagaccttggcccggaacggcgtgaaatccgttccccggtcgtacacgtccagtccctcggcgcgcttcagccccccgacgacgacgtacgtcaccggcgtcagcagcacctcccacgccactttaagcgcccattgcgtgaacagcaccttcaccaccagcgcccccgtccacccgctcgcgccccagaaggcgagcggatagaagatcaggctgtccactccctgccccgccacggtcgatccgatcgtccgcatccacaggtgccgccccgcggtcgccaccttcatccgcgccaggacgtaggcgttgacgaactcgcccgcccagaaggcgcagatgctggcgaacacgatccgcggcacctgcccgaacacggtctcgtacgccgcctggttggtccagtccgcggcggggggcagcgccacgacgacccacgccatgaacgccatgaacaatgtggcggcggtcccgacccagatcacgcgccgcgcccgggcatagccatatacctcggtcagcacgtcgccgatgacgtagctgaccggaaagaacaggatgcccgcgccgaacggccacagcccgacgcccggcaggtcgatcaccgcgaccttccccgcgcccagtacgttggacagcagcaggatcgcgacgaacgccgccatcacgatgtcgtaatagcgcaacgccccgcccgtcagcgcgcccgcatccgtccgtgtcacattctccatcgccgcggactatgctgacggtttcgcgcttccgcaatccgcgctaaccgcatcgcacgcgcccgtagctcagttggatagagcacgagccttctaagcttgtggtcgctggttcgaatccagccgggcgcgccaatccccataaacccgtttcggtcggaaaacggtgccggcgatattgacaccgacggcgcggcggcgcagattgcgattgttcagaaatcgcaggccggctgttaacaagcagtttgactgcaccaaataagggcgaggctgcggcctcgcctttttggttttcgggcaatcaggcgacagtccttgcggcgatccgtcgacgcagaaaccaccgcgtcatgtcgcccgcacgatcccaccgtttcggaccgaagacgtcgcgccgcaacgcatggggtattgaccggtcacccggcgtgcgtagcctttgcgcccgtgtgccggatggtccggtgaacgggtcgggcatggcggacgcgacgcgggtcgccggtgaaaaggggcgacgatgcggcggctgggtctggatatcggcacgaactcgatcggatggtgcctgacacaggggccgggcgacgaggcggacgggatcgtcgacatcggcgtccgcatcttttccgacggccgcgatccgcaatccggcacctcgctcgcggtcgaccggcgcgatgcgcgcgcggcgcggcggcggcgcgatcgctatatcgggcggcgctccgcctttctcgacacgctggtcgcgcacggcctgatgcccgccgacgcggacgaggcgaaactggtcgccgcgctcgatccatacaccctgcgcgcccgcgcactggaagcgccgctgaccccgcacgagatcggccgcgcgctgttccacctgaatcagcgccgcggcttcaagtcgaatcgcaaggcggagcgcaagactaacgatgccgacgacgggaagatcgccaccgcggcctacgcgctggaccgcgcgatgctcgacggcggcttcgacacgctcggccagttcctgaacgcgcaggagacgaagcgcgtgcggatggacggcgaggcgcagggctatgatttctatccgcaacgccgccatgtcgaatacgagttcgaccgcatctggaccgaacaggcgaagcatcaccctgccctgctgaccgagacggcgcggtatgcgctgcaccgcatcctgttctaccagcgcccgctgaaggcgcaggtcgtcggcaaatgcacctttgtccatagcgaggatcgcctggcgaaggcgcatcccctgttccagcagcggcggttgtacgaggaggtgaatcagctcgaggtgacgaccccgggcgaggcgaaccggaaactgaccctcgacgaacgcgaccggctggtccgcgaactgtcgcacaagaaggcgatcgcgttcacgtcgctcgccgccaagatcaagctggaacccggccagagcttcaacaaggccagcgagacacgcacccagcttgccggcgacgaagtgcgcgccgtgctcggcgacaagaaacgcttcggcccggcatgggagcatttcgaccgtgaccggcaatggacgatcgtcgaacgcctgctggaggaggaggaccccgacgcgctccatgccttcctgacgcaggactgcgggctggacgacgaacacgccgccgccaccgcgaagacctcgctgccggagggctacggccggctcggcgcgacggcgacggcgcgcatcctcgccgaattgcaggcggaggtcatcacctatgacgaggcggtgcgccgctgcggctggcaccattcggaccatcgcacgggcgagatcctgccgcagcttccctattatggcgaattgctcacccgcgacatcccgcccggaacgcaggatccgaacgatccgcccgagaaacgctggggccggatcacgaaccccaccgtccatatcggcctgaaccaggtgcgacagctggtgaacgcgatcgtcgcggtccacggccgccccgaccagatcgtcgtcgaactggcacgcgagttgaagctgaacgaaaaggacaaggaggaacacaaccgccgcatccgccgcgatacggccgccgcgatcaagcggtccgagaagctgacgcaggaaggcttccccgataccggcgcgaaccggatgctgctgcgcctgtgggaggatctgaaccccgccaacccgctcgaccgccgctgcccctattgcggggccccgatcgggatgcgcgcgctgttcgcgggcgaggccgacgtcgaccatatcattccctattcacggtcgctggacgacagcgccggcaacaaggtcgtggcgcaccgctcctgcaaccgcgccaagggcaatcgcacgccctatgaaaaatggagcgacgatcccgatcgctgggacgcgatcacggcgcaggtcgcgcggctgcaccggtcgaagcaatggcgcttcggccccgacgcgatggcgcgcgtggaaaaggacggcggcttcctctcgcgccagctgaccgacacgcaatatctgtcgcggctggccgggcgctacctgagcagcctgtatccgacgaaggaggagggcagcgtgtacgtcatcccgggacggatgaccgcgatgctgcgccggttgtggggcctgaacgacatcctgtcggaccacaacatcgtggagaacaagcacagcaacgcgcccaagaaccggctggatcaccgccatcacgcgatcgacgcggcggtggtggcggtgtccacacgcagcctgatgcagcggatcgcacggaccgcgggacaggcggaggacaggaacctcgaccgcctgttcgaggggctcgatcccccctggcccggcttccgcgaccagttgcgcgatcgcctgctggcggtgacggtcagtcacaaggccgaccacggccgcaccgggacgcccgtgccgggcaaggacgcgaccgccgggcgcctgcataacgacaccgcctacggcctgaccggggaaacctcggccaagggcctgccgatcgtcgtccatcgcgtgccgctgaccagcctgaagcccgcggatatcaccgatccggatcggattcccgatcccgtcctgcgcgacgcgatcgaacgcgcgaccgcggggaagatggggaaggacttcaccgatgcgctggcgaaattcggcaggagcggtgcgcaggaaaccgatcggaagggggagcggctgttccgcggcacgcgtcgcgtgcgcgtccgcgaaccgctcggcgtcatcccgatcgccgacgcgtcgggccgggtctacaaggcgtacaagggcgattccaatgcccgcttcgacgtctggcgattgcccgacggcaaatgggtgtccgacatcgtgtcgatgttcgacgcccaccgccccgaccagggcgatcggcggccgcatcccgcggcgaagaaggtgttgagcctgcggcagaacgacatgatcgcgatcgagcgcgacggcgcgccgcgggaaatcgtgcgggtcgtgaaattctccaccatcgggtccgtccagctcgccgccacgacggaagcgggaccgctgaaggcccgcgacgcctccccgccggacgtcgatccgttccggtacatcaattcctccgcgggcgggctgaagaagatcaaggcccgccaggtgcggatcgatccattagggcgcattttcgaccccggcccgcgctgacaccgcccctccccgtccgtagcatgggcggacgggcgcggagggacagtggaacggatcgtcgacatcgcaaccgacgggatgcacctgtcggcctatcgcggtttcctcatcgtggcgaaggagcgcgaggaggtcggccgcatcgccttggacgacgtccatgcggtgatcctgcacgcgcatggctgtacgtggacgggcaacgtcgtcgccgcgctggccgagcgcggcagtccgatcgttttctgcaacacccaccacagccccgtcgccgtgaccctgccgatcgcgggcttccacgcgcagggcggccggatgcgcgcgcaatgggatgccggccgtccgctcgcgaagcaattgtggcaacgggtggtgaaggcgaagatcgcgatgcagggcgccctgctggcgttccacggctcgcctgcggcgggcgcgttcgacctgatcggccggcgcgtccggtccggcgatcccgacaatctggaggcgcaggccgcgcgccgctactggcccgccctgatgggtcccgctttccgtcgcgatcgcgacgcggccggggcgaacgcgctgctgaattacggttacgccgtgatgcgcgcgaccgtcgcccgcgcaatcgtggccgcggggctgcatcccacgatcgggatcttccacgccaaccgcggcaacgccttcgcgctggccgacgacctggtcgaaccgttccgcccgctggtcgacgcgctcgtcgtgtcgctggtgggccagggcgtcgacacgctcgacccggcgatcaagcgccgcttcgcgcggctgatcgccttcgacgtgcggatcggggaggagatgtcgcccgtgtcggtcgcggcgcagcggctcgcccagtcgctggcgcgcagcttcgaacgatcgattcccgacctcgccctgttcgccccgcccgcccgcgccggctgggaaaccctgacgcgcgcgctcgacccgttcgaggacgcatgagcgatgacgcgcatctcagcggctatcggctgatgtggatattcgtcatgttcgacctgccggtcacgacgaaacagcaatcgcgcgaggcgacgcggttccgcgaattcctgctggatcaggggttcgagatgagccagttctcggtctacgcccgcttctgcaacggccgcgaaagctacgattcgcacctccgacgcatcgagtataatctcccccaaaaaggagaaatccacatcctcacattcacggacaaacaatatgagaatatcgtccgcttctccagccagcggcgaaaacgaccacggaagaatccggaccagctcgcgctattctaacgccagccacgaaattcgctggaccggatgctatcgtttcggccgttttcataacggcttacgacaacatccggcctagcagttcagaaatcgcaggccaacagcaacgcaaggtgtgggtggatgagtgctatatccggcctagcagttcagaaatcgcaggccaacagcaacgtgtcgcctgtagcccaccagcgcgcgaggggcctagcagttcagaaatcgcaggccaacagcaacaggtcgaattcgggagcgggcggcagtcgcggcctagcagttcagaaatcgcaggccaacagcaacaacgcgggcgcggacccggcggaacagcagggcctagcagttcagaaatcgcaggccaacagcaaccaagtccagcacggcgcgcgcgcggcaaccggcctagcagttcagaaatcgcaggccaacagcaacagcgcgatgggcgcgatcgcaacggcgagcggcctagcagttcagaaatcgcaggccaacagcaacttcaggaagcgggtggccgcgccgacggcaggcctagcagttcagaaatcgcaggccaacagcaaccaccggcgcgtcgtcgccaacgccatcgacggcctagcagttcagaaatcgcaggccaacagcaactagccgcccatgcgccttcggatgcgttctggcctagcagttcagaaatcgcaggccaacagcaacccttcgaatcggtggcgctcatgctccccgggcctagcagttcagaaatcgcaggccaacagcaactgagctatagcaaatgtcaattcaaaagtaggcctagcagttcagaaatcgcaggccaacagcaacaaccgcgacgattaccgcgcgaggtggcggggcctagcagttcagaaatcgcaggccaacagcaacggctttgactacgacgcggatgggctgggcggcctagcagttcagaaatcgcaggccaacagcaaccgcgttaggctgtccgccgacgcccgcaacggcctagcagttcagaaatcgcaggccaacagcaacacgccggcaaaccgttggcatcgttaaagcggcctagcagttcagaaatcgcaggccaacagcaactcccgatccgcatcttgcgtccgtggtcgaggcctagcagttcagaaatcgcaggccaacagcaacagaaccggcaaggctgtcacggggaaggttggcctagcagttcagaaatcgcaggccaacagcaacaaacgctggaacgccatcgtcgcggcctccggcctagcagttcagaaatcgcaggccaacagcaacttctcgtcgacggtcttcggatcgggcgtcggcctagcagttcagaaatcgcaggccaacagcaactcaccccggcagcgcctgtcaccgcaacctggcctagcagttcagaaatcgcaggccaacagcaacgtcatccccaacgtgttgctcgtcgccggcggcctagcagttcagaaatcgcaggccaacagcaacgatattgacgtgctccccaaagctctaccagtcataactggagtccggggttggtatggtgcccc

SEQ ID NO: 3501 - DNA, 16048 bp, synthetic construct
  misc_feature 1..16048: note = Synthetic
  source 1..16048: mol_type = other DNA
ggtcttttcgtcgggcgcgatcagcccggcgcgcgcaccgtgctcgatcgccatgttggaaacggtcagccggccctcgatcgacaggctgcggatcgccgagccggtatattcgatgacatagccggtgccgcccgccgcgcgcagcacgccggtgatgtgcagcaccacatccttggccgaaacgccgagacgcagatcgccctccacgcgcacttccatcgatttcgactgcttgagcagcagcgtctgcgtggcgaggacgtgttcgacttccgacgtgccgatgccgaacgccagcgcgcccagcccgccgtggcaggcggtgtggctgtcgccgcacacgatcgtcgcgcccggcagggaaaagccctgttccgggccgacgacgtggacgatgccctgctcgatatcggcgtccccgatcaggcggatgccgaattcgggcgcgttgcgctccagcgcggccagctgcgaggcgctttcgggatcggcgatgggaatgcgccgcccctgcgcgtcgcggcgcgcggtggtgggcaggttgtggtcgggcaccgccagcgtcaggtccggacggcgcaccttgcggcccgatacgcgcagggcctcgaacgcctgcggactcgtcacttcatgcacgagatggcggtcgatgtagatcaggctggtgccatcgtcgcggctctcgacgacgtgggcatcccagattttctggtaaagcgtgcgcggattgctggtcatgcaaggcggttaggcgcgcccctgccgcatttcaagcgggaagaggcgcgccggaaggttggtttacgaaattttcttgcgcagccgccgcgcaggcgcgtcagccgcgacggccgtcccagtcgcgccgttccatgcgcaggtggacacggacgtcgttgacgcggtcctgcaacctgcgcacctcgttgcgatccagccccccgcgcgaaaacgccgcgtactggcgctggatatcggcagcctcgcggcgcaacccgctggcctcgcgcggcgagatcgtgcggcgggcctgggcgcgatcgatgtcggcgcgcaggcgctggatgtcggagcggatttcggcattgcgcgccggcgtcagcgcccaggcatcgttgtgccgcggcggcatcggctgcgcgagcgcgggtgcggcgacgccggccagcgtggcggggatgagggcggcgagaatgaacttcttcatggcttcggtcctttcaatctgcggtctcttccgcacaacgccgttcctgcccccgggtgcctgaatggcccgaaaatgcacgtcgcagcgctgcaagaaagtgtcgcgatctgtcgcgccgggcggtaaggaaacggccatgaccacgcttgccgccacgctgatcgtccttgccaccgtgatcgccatggaaggccttgcgtggagcagccacaagtatgtgatgcacggcttcggctggggctggcaccgcgatcatcacgagccgcacgacggctttttcgaacgcaacgacctctacgcgctggttggcgcggcgatctcgatcacgttcttcgcgctgggcagcccgctggtgcgcggggcagcggcgtgggctccggccacctggatcggcatcggcgtgctggtctatggcgtgatctacacgctggtgcacgatgggctggtccaccagcgctggttccgctgggtgccccggcgcggctatgcccggcggctggtgcaggcgcacaagctgcaccacgcgacgatcggcaagcacggcggcgtcagcttcggcttcgtcttcgcgcgcgacccggcggtgctgaagcgcgagctgaaagcgcagcgcgaaagcggcgtggctgtgctgcgcgaggcggtggagtaacgcgaacagcgctggatgatgaaatggtgcggctgagggcttcgaaaacgtatcagaaaatggctgatttacagtcttttttgaatgcggttttgacgaaatgcccccaaatatgcccccaaattcgctgactgggcacccgtcgcatcgggatttggattacgattcctcgcatagacctcccgcgccagatgcgcttgcgcggcggagcgtattgccatggcgcaatggtggagcgactatctggacgaattgcgggatgccggcaatgttcccccgccaacgggagaagatcgagggatggaccacgatgacgacgcccgctcccttcggagaattgtcttacggcttctccatgaggacgaagatgaagcacgaagggaactggacgacattatccgcaaggtagcggagtatgtcggaccggaatcttccctttatacctgggctgtaccggtcctcctcactattccgccattgctcctggcagcgtccttgatcgctgggcgtttctcggaagtggccggaaatatccttttcggggcagcccagatatcatgcctcatcccgctatacgccttatggaaatggtaccgctttcaatatggacgcggctggctttggacaccgcgtgaagccctctatgtgaacgtgagcgacgagacaaaagagacccttgagaaattcttcgcccatatccagcgtgagggcggcccgaaggcatatttctgggatcgcaaaggcagaaagcgctatctggaccgccactactctttcgggaagctccgtgtcctgttgctttcggagttcggagcgtttcgagcgctttgcctcttgccgggcgggaagcgcatttcggagacgatcaagattgaggcggccccggatgagattatcaacgtcctcaatatcaagccgaaacgttcaggcgggccaggccgcaacgtcaaatatgcctatgtcgaagcggccttcgatctgcgcgccgatccgaggctcgaaacgctggacctgaacgacgagacggcggcggtccgttcgctgaccaactggctcgacgagtggttcgacagcgcggccaacgtgtccggggagatccccaagcgcgaccggctgacgccctacgccagaaaaatctacgcccacctcaagaagtccacgtctcccgacggccgttgagcgccacttttgattttggcgaatcgggaagggctttccggcgcgcggcgtttgttttctgtgccatgcgccatcggcggatttctgcggctttcccattacggggagggccgctggcaatcctgtgcaaccgggcatgtctcccgccgccagtcggccaacatggagatgcacatggaacctcttaccctatcaatcaatgacaccgccaaggcgctcggcatcgggcgatcgtcggtctacgccctgataaagtcgggtggcctcgacgccatcaagatcggccggcgcacgctgctgaccaccgagtccatccggcgcatcgcccagtcccgatccctcgcctgaaccacagccgcttgccggtcccggcctgatcgccgggtggtccgggcgcggctgaatctcccagcacacaaaaccccaaacaatcgtgatttcacgaaaggatgatccatgccttccatccgcaacaccatcgatcggctggccgcctggctggcgggccggtcctatgtcaccctgcgcttcaccgtccatcagcggcttgcgcccatcgtcgagccgctgatcgagcgcctgctgcccttcgatgacgatggcgagacctaccgctgttcgatcagccactggaccctcaacgaacgtcccgttctgcacacccaccggggcgtcgtatccaccctgcgggtggatggtccgttgcagcgtgcaggcggaagttacttcccgctgggcgggctggtcgaagccccgcatgtcaccgcgcatctcgatcccatcgcggcaaggcggctcgacaaccggttgcaggatgccatcgaccgggtgatcgaggaatggatcatcgagcacggcctttacgaccaaccccgtcagcgccgggagatcgatcgccccagggccgaccgcgaagccaagcggatcatcgccgcctgggtgtcccacgctaccgctgacgccccgggcgaagcctgccgggaaggatcggaccatgcctgatccggtcgcccaaaggacaaggttgcagggctgcgatgctacgcatcgagccgacaattcagatacacacctcacgcacgggtgcatcgcgcatttctgcgggtttgacgggatgcggatagcatcccgtcaaacgggaggacacggaaacggcgccattgcgccgttttccgcgatggcgaatagcatctcggccggagcggtgcgatgagcgcccacgcccagaccgtgcggctctctccggcccagcaccgcacccttgccggcttcgccagacaacgcggattgagcgaatatgccatgctcgcccgcgtggtggacacgggactggccgccctcgtccaggggacaggcggagggatcgacgcccgcgagatcgtcactgaactggcatcggtcggcacgcgcatcgtcgatgtcgagcggatgctggaccgcgcgctgttcaccgcctgcgccgcctattgctacgcccgcagcgcggccagcggcgcgcgcaagagcgacgcgatcgtcaccgaggagatcaccgccgcctacaaccgccagcggggccttgcacgggagaaccggccatgacccgccccgacgatcgccgcaaccatgccgatgccttgcgcaagcatcatctcagcacgcaaggcgcgcgcctcaagcggcaagtcctggtcatgctggcctccgttgccctcggcggcctggcgctgcccaacatgatgctgggccgcgacgcgatgctcgccaccggcacctactactgggcgaggaccaagctctgggccgtgtccggctgggaaactgatacggggatcgacgttcgctttcccgaccatgtcgaggaaggacgatcggcgcgccagatcatcgcccatccctatttccggcggcgcgtcgatcttgtctgggcatgggccaggcggggatgctggctcggcctcggcacctggcttgcgggcctgatcgcttcacgcggcgcgctggcgcggcggcgcgagcgcctgctcgccgatcgctggatcggcggaacgcaggtggtgggcgagaagcggctggccgggttgaccggcgggcaagctgacgcacgcaccttgtcgatcggcaaggtgccgatccccgcccgtctggaaacccgccacatggcgatgatcggcacgaccggcagcggcaagaccaccgccttgcggcagttgctcgatgggatcgaagcacgcggcgaagccgcgctggtctacgacaccagcggcgagttcatcgcgcactactacgatccggcgcgcggcgacgtgatcctcaatccgttcgatgcgcgctgcgccttctggtcgccctttgccgagatcgcccatccggccgatgccgaccgcatcgcccaccagttgatcaccgagaccgggcaacacgacagcgacgtatggctcgacaccagccgtatcctcgtcgccaacatgatccgcgccctgtggcaggagaaccggcgcaccctgcccgacctgctccatgcgctgaagaaccggcccaaggatgatctcaaggaatggctcgccaccagttcgtcggcccgcaccttcgccgacgatgccgaccgggccacgggcagcgtgctgttcatgctcgccaaggcggcggacctgatccagttcctgcgcgccgaggccggcaaggccaggccctttgccttccgcagcttcatcgaagcgctggaccggcagcccggtgcgcggccctggatattcgtgccgaggaaggaggactacttcgaggcgtcgaagccattgctcgcctgctggctggaatgcgcggcgagcgcggtactgggcctgcccccttccgaggaccggcgtatctggttcgtgctggacgaactggccgacctgccccgtgtcgataacctggcgcgactgctgcccgagggccgcaagttcggcgcggcggtcgtgctgaccttccaggcgctggggcagatgcagcaccgctatgggccgcagatcgccgaatccatgctgggctgctgcaacaccaagctgttcctgcaaaccatcgacagcgacacccgccaatgggccagccagaccatcggcacctcagagatggagatcaggaccaagaccgacatgctgggcgatggcgacgaaggccatcgcatcaatctgggccggatgcgtgaggtgcggcccgccgtcatggagagccagctccgccttgcgcggcacgagggctatctgctgctccccgatggcttgcccgtggccaggatcaggctgaccgccgatcatatcgcgcggcgtggcgatcctcgccagccggggttcatcgccgccgatccggcgaccatgctttgggggcagggcgccaacgacaccgtaccgccatcatcgtcgtcatcagcatccccctcagcatcatcgtcgtcatcctccccgaagcctgacagtcaggggccggtgtgatggtggcgtccgtctctgcccttaccagttcggcgcaggccagcagctactacgaggccgacgactattatgccgagggcgggctatcgccctcgcaatggcaaggtgctggcgcggaagcgctgggcctgtccggcgaggtggaccgcgacgcgttccgcgccttgctcgacggcaggatcggcgaccagcagcttggcaccttccgcgacgggcagttggagcatcgccccggctgggacgtgaccttgagcgcgcccaagtcggtgtcgatcatggccgaggttgcgggcgaccggcgtttgatcgaggcgcatgggcaagccgtgaaaaccgcgatggcccatgtcgagcgccatatggccgccacccgcgtccgcgatggtggcaccgtcgcccgcgaagcgaccggcaatctggtgatcgcgagcttccagcacggcaccagccgtgcccaggacccgcagcttcatacccataatgtcatcctgaacgcgacgcgtggcgaggacggtgcctggcgcagcctcgaaccgcgcgcgatctatcaactccaaaagcagatcggggcgatctaccggcaggaactagccttgaaggtccgggaattgggctacgagatcgaggcgggcaaggagtccacgttcgagatcaggggtgtctccaaccaagtcatcgaggcattcagcacgcgcagcgcggagattgaggcggcattggccacacgcggtacatcccgcgagaccgccagcgccatcgagaagcaggtggccacgctcgacacccgtgaggccaaggtggccgccgatcctgccgcccttgtcgcggagtggcgggagacggccagcaaagcggggttcggcgctgagggaagacgggcaatggtccgggaggccgaagcaagggcggccgatcctgcccatcgcgcggccatggaattgcagggcgacggctccgccgtccgcgccgtcgtccatgccgccgacaagctgggcgagcggcagtcggtattcgccgccgccgccttgcaggaggaggctggacgggtcgggctgggcaagatcgggtacgcacagatcggggcggccatcgaggcggcgacgaaacagggcgacttgattgaccgcacccatatcgaccggcgtggggcggagttcgccgggtttaccacccgccagaatgtcgagaccgaagccaggatgctgcggatcgaggccgaggggcgcggcgtgctcgctcccatcgcctcgccgcttgctgccgtcagggctgttgccagcgcagccgcgcaggctgagcgcgctggccatggctggaatcccgaccagcgcgccgccaccgagcagcttctgaccagccgcaaccggatcacggccgtccaaggctatgccggcaccgccaagaccacgaccgtgctggcgaccttcgcccgcgaggccgaagcacgcgggatagccgtgacggccctggccccgaccgcgtcggcggcgatggtattgggcgaggcgctggggacgcgcggcgataccgttgcccggcatctgcttgtcccggagcgctccgatcccactcggcccgccgcgtggatcgtggacgaggcatcccttttgtcagcacgcgataccgcgcggctgttcgacctcgccgcgaagcaggatgcccggattgtgctcgttggcgacgtgaagcagctggggtcggtcgaggcgggcgcggcctttgcccagttgcagggcgctggcatggaaaccgcgagactggccgagatcgtgcggcagaccaacctcgcaaccagagaggccgtgctggcgtcgatcgagggggatgccaaaaaggcgctggctgcgctggatcgaggtggcgggcaaattatcgagagtgccgaacgctcgacacgctttgcggccatcgccgagcgatatgccgggctggacaaggcaggacgtgcccgcaccatcgttatcgagccgtcgcgtgaggggcgcgatgcgttgactgtcgacattcgcgcggcgcttgccagatcgggggcgcttacagggcctgccgtcccggtggaagctctcgtcaacaaggggctgacacgcgcggaggcgcgcgatccgttgagttacgacaagggcgacgtggtccgcttcacccgtgactatgccgacaagggtgtggtgcggggcgaagcctaccgcgtcgagagcatcgatccggttagggcagcgatcgcgctcaaggcggaagatgggcgtgacgtggactggcgcttgcggcaatggggtgcgggtcatgcccaagccttctcggcgcagcccatcgacctgaaagcgggcgatgccatccggttcacccggaacgatcgcgaggcgggccggatcaatggcgcgcgcgccgaagtgattgccgtggatcagcaggctcgcaccgccacgatccagaccgggcgaggagcaaccgagacgctccatctcgattccgcccgcgatcggcatattgcccatggctatgtcgataccgcctttgccgcccagggacgcaccgccgatcatgtcatcgtccatgccgacagcaaggcggccaatctggtggaccagaagtccttttacgccgggatatcccgggcgaaggaaaccgccactatcttcaccaacgatcgcggcaggctcatcgctgcgatcggtgaacgggccgggcaggtgcagactgctatcgttcaggctgcggcatcggggttagaaactggcattgtgaaaggagctggtctgggatgaggtctggcttgcgccgatgcgtttgatcgagtgcgtattcgtgatggatcaaccggtcccgtgtccactgggcagcttcgatggctcaacactagtgcagggcagtcgtcgtttgtgaactttacggctagaacttgccttggacttagcggcaaagtcctaaatgaaagacggggccgtagccccgcccttatttggtgtgaccaagccacttgttaacggctggccccgatttctgagcttccagagttagcgaatccagagtgagagtcaatgctcttccgttttcgcggtcatgaggcccgacccaaaggaaatggcggaggctggaggccggcgcagtgatcaattctgtaactgctactgctcacgtcttccaggtgcaattagcagcagcagtggttcagaaatatggagccaatcgcaactagatacagaaattatctcgccaaactcgtagcgctcaataacccgtatactagttcgtacctggttgtggacgccggtaacttgcactacatcggtgttcgcgaagcaccactttgctagcctgctcatttcgggattggattccggatggcaggcgaccttctttgctggcccccccgatagggtgacccttgtctggagtcaatcatttctgtatctaaggtgatatgttttccagaaggcatgatgaaggaaaggccggtggcgccaggctttggtgacggcgggaccatacgtggggggtaatggggcgatgagacgacttggactggatattggtaccaatagcatcggctggtgcctgatcgaggacgacaagaagatcgtcgacatcggcgtacgtatcttcagcgacgggcgcgatccgaagtctggagcctctctcgcggtggaccggcgggatgcccgggcgatgcggcggcggcgcgatcgctatctggggcggcgttcggctttccttcaggcacttgtggtgcatggtctgatgcctgcggatgcggatgaggcgaagctggttgccgaccgtgatccctatcaattgcgcgccaaagcgctgcatgtcgcgctggagcctttcgagattggccgcgccctgtttcatctcaatcagcggcgcggcttcaaatccaaccgtaaggccgatcgcaaggccaatgcgggagaagacgggaaaatcgccgaaggcgcaaaggcgctcgatcaggcaatgagcgaagctggcgtcgatacgctcggccagtttcttgctctgaaagaaaccaaacgggtgcggcttggcagcgacggtcaggcctatgacttctacccgcaacgccgtcatatcgagtatgaattcgatcgtatctggaaagtacagtcggaatatcatccagcgttgctcactgaagccgcccgggccgcgctccaccgcattctgtttttccagcggccgctgaaggcgcaggaagttggattttgcaccttcgctggcgtcaacggcatagcggctaacgaacgccggctgcccaaggcgcatccgctcttccagcagcggcggctttacgaagaggtcaatcagttgcgtatcgtctcggctggcgcagcggaccggccgctgacgctggacgagcgcgaccgactgatcctcagattgcaggacagaaagaaggtcagtttcgacactttggcgaaaaaggacctcaggcttgcggatggggagcgtttcaataaggagagcgagaaccgcaaggaactgatcggagatgaagtccgagcggagatgtcagacaagaagcgtttcggcacgcgctgggtccatttcgggctggacgagcagttgcggattctcgccaaactgcaagacgaggaaaatcctgaagcgctgctcgactggctgcgcagcgagtacggtctggacgaggccgctgccgaaagcgtggccaatgcccgtctgcccgaaggctatggccggttcggcgaaaccgcaacgcggctgctgctcgacgcgctgaaagccgaggtcatcacctatgacaaggcggctctgcgcgcctttggccaccacagtgactttcgcactggtgaagtgttggatcgcctaccctattatggcgaattgctgactcgtgaaatcgctcccggcaagcctgagtatggcgaccccctggaacggcaatatggcaagatcaccaatcccaccgtccacatcggactgcgccagttggagaagctggttaatgcggtgatcgccgtccatggacgacccgaccagatcgtcgttgaactggcgcgcgaactgaagctgaacgagaaggagaaggacgaacacaagcgacggatcaagcgggataccgatgcggcgatcgcacgcggaaggaagctggcttccgaaggcttcatcgacaatggcgccaaccgcatgctgatgcgcatatgggaggagcttaatcccgccaatccccttgatcggcgctgcccctattgtgcggaacccattggtatccgagcgctattctccggcgaggcagatatagatcacattattccctattctcgttcacttgatgacaacgtcggcaataaggtggtcgcgcaccgcagttgcaatcgggcaaaaggaaacaagacaccttacgagaagtggggaccgcacatcgacccggagcgctgggagcggattagcgatcaggtcgcccggctgcacaagtccaagcagtggcgatttggtcccgatgccatggagcgtatcgatcgtgacggtggctttcttgcacggcaactgacggatacgcagtatctctcgcgcgtcgctggcaagtatctgcgtagcctctatcccacggcgcaatcgggccgggtcgatgttattccgggcagaatgacggctatgcttcgtaggaaatgggggctcaacagtctgctgcccgatcataactatgttgagaacgagcactctaacgcgcccaagaaccggcttgatcatcgccatcacgcgatcgatgcggcagtggccgcagtgaccacgctgtcgcttatgcagcagatcgcagatgcggcgggtcgtgccgaggacaagaatctcgatcgattgttcgaggatattccccagccttggcccggctttcgcgaggaactcggtgaggcgctgcggagcacgaccgtcagccacaaagctgatcacggtcgcaagcggcgaccgtccagggatcgagacgtcacggccgcccgcttgcacaatgataccgcctatggcctcaccggcgacgtggcggccgatgggaagacccctatcgtcgtgcaccgtgtaccgttggcgagcctgaagcctgccgacctcatcgacccgctgcggatacccgatccggtccttcgcgacgcgctctatgcggcgacccgggatcgcactggcaaggaattcgagcaggcgctcacccagttcgcgcggcatcaccccctgttcaagggcatccgccgggttcgcgtgcgcgagccgctcaacgtgattccgatccgcgacgcggcgggccgcgcctacaaagcctataagggcgacgccaacgcccgtttcgatgtgtggcgactgccgaatggcaagtgggtgtccgacatcgtctctatgtttgacgcgcactgtatggcggataagtccgatcgccgtccccatccggctgccaagaaagtattgagcttgcgccagaacgacatggtggcgatcgagcgatccggcgtgacgcagattgcgcgggtcgtgaagttttcgactaatgggtcgatcgcgcttgctgccgacaatgaggctggcgccctgaaggcgcgggacgcggcccccaatgatgtggacccgttcaagtatatcttctcctcagggggaggcctgaagaacctcaaggcgcgtcaggttcgtgtcgatccgctgggccgagtattcgaccctggtccgcgagaatagtggcggacagcggatggatcgcatcatcgacatcgcgacggagggtctccatctttcgatccatcgcggtttcctgatggtggagaaagatcgcgaggaagtcggccgggtggcactggacgatatcaacgcggtgatcgtccatgcccatggcgtcacttggaccgggaatctggtcgccggcctggcggagcgcggtgcgccaatcgtcttttgcggggctaatcatgcgccggtcgccgttactttgccgatcgaggggcaccatgcccagaacgcgcgaatgcaggcgcaactggctgcttcaaagccgctggtgaagcaactctggcgcaagatcgtggcggcgaaaatcaccatgcaaggttcgcttctagcggcgcgcggcattgccggtgccgaggcttttccgttcattgcccgtcgtgtcacatcgggagacaaggagaatctcgaggcgcaggcggcgcggcgttactggccattgttgatgggtcgggactttcgccgcgatcgcgatgcgggcggcgtcaatggtctgctcaactatggctatgcgatcatgcgcgcgacgtgcgcgcgcgccgtggtggcttccggtctgcatccgacgatcggcatccagcattccaatcgaggcaatgcctttgcgcttgccgatgatctgatcgagcccttccgaccgctggtcgatgcgttggccgaaagcatggctcgtgaagggatcgacggcctgaatcccggcctgaagcgccgtttcgcaaggttgctggcattcgatctaaggatcgccggcgaggtctcgcccgtgtctgtagccgcaggccgcctcgcgcaatcgctcgcgcgatccttcgaaacgggacgggcggacctcgccctgtttgatccgccgacagcgatcgaatgggctgcggcgggtatgatcgacgatggtgaggcgcggtgaaggcgaatgattcggcgcatctgagtggatacaggctgatgtggatcttcgtgatgttcgatctgccggtgggcacgaaaaaacagacgcgcgatgcaaccaagttccgtgaatttcttctcgacgaaggattcgagatgagccagttttctgtctacgcccggttttgcaacggcaaggacggattcgaggcggccctaaaacgaattgaatcacacctcccggagaaaggcgacgtccatgtgctcactttcaccgaccggcaatatgaagcgatcgttcgattttcgagtcagcggcggcaaaaagtgcgtaagaatccagatcagcttgcgttgttctagatatgtcttacggattgcgtcagccagatgccctgatttacgtttttattcaacgatttatcgaggcatcaggcttagcagttcagaaatcgggcgccaaccgcaacctacttcgggatctggtgcaacgacgcccgggcttagcagttcagaaatcgggcgccaaccgcaactgtacgccctgcgctccatgtggcgcgaggggcttagcagttcagaaatcgggcgccaaccgcaacgatgggggtcattagtttggtgttgttggcggcttagcagttcagaaatcgggcgccaaccgcaacggaagcgtgcgcccagcacgagccgctcaaggcttagcagttcagaaatcgggcgccaaccgcaactcgtggtcaatgcggtcgatcagggcgagcggcttagcagttcagaaatcgggcgccaaccgcaacggggccgccgtgcacgtcgcccgccttgaaggcttagcagttcagaaatcgggcgccaaccgcaactcaacgctacgatgagcaaagccgcgcaggggcttagcagttcagaaatcgggcgccaaccgcaacgactctgccttatgatcgttgggggagcaaggcttagcagttcagaaatcgggcgccaaccgcaacatgacgccgcgctctatgcgctggcgcaggggcttagcagttcagaaatcgggcgccaaccgcaacgccgcgctggaatgccccgctttcagcaaaggcttagcagttcagaaatcgggcgccaaccgcaacttggctggcgctgccgtcatggagaatgatgggcttagcagttcagaaatcgggcgccaaccgcaacacaatgtcgctggccgtggtgccggtcgcgggcttagcagttcagaaatcgggcgccaaccgcaactggtatgccgattacctggacctgaagtggggcttagcagttcagaaatcgggcgccaaccgcaacgaagagttcaaccggtggatggccaggaggggcttagcagttcagaaatcgggcgccaaccgcaaccgcacgctctcggaagcgttccagtacttgaggcttagcagttcagaaatcgggcgccaaccgcaacgcaccgtcgcgttgcgcaggctctgccggaggcttagcagttcagaaatcgggcgccaaccgcaactatcaggcggtgaggtaatggcagcatcacggcttagcagttcagaaatcgggcgccaaccgcaactcgaacacacggcactcgctggcgacatccggcttagcagttcagaaatcgggcgccaaccgcaacggcacgtcatactgatcggcgtcgcgggcgggcttagcagttcagaaatcgggcgccaaccgcaactcctcggcggaccagtgcgtgccggtatagggcttagcagttcagaaatcgggcgccaaccgcaacggtcgctcacccgggcatagcgcatggcctagcttagcagttcagaaatcgggcgccaaccgcaacggtcgctcacccgggcatagcgcatggcctagcttagcagttcagaaatcgggcgccaaccgcaacggtcgctcacccgggcatag

SEQ ID NO: 3502 - DNA, 15598 bp, synthetic construct
  misc_feature 1..15598: note = Synthetic
  source 1..15598: mol_type = other DNA
agcgcgagagcctgcgtctggtcgagttcgccaaggtgctggactcggccaccacgcgcttcctcgccttcgtcgagggcgtggcgccgggcaccgcgcccgaaccctgcggcgcctgtccgctgtgcccgtggcgcgaccattgctccgaagtgtgggaaaccgaggaccacctctcgcgcgtctgcggcctcggcaagccgcaggcggaaaagctccgcgccgccggcatcgccacggtcgccgatctcgccgcgctgcccgaagacgcacgggtgccgcgcatagccccggcaacgctggccaaattgcgcgcgcaggcgcagttgcagcaggcacgctggcagggcggcgcgccggtggtcgaacagttgccccccgaagagggcaggggcttcgcaaatctcccggagcccgatccggctgacctgttcttcgatctggagggcgatccgctggaggaaggcgggctcgattacctgtggggcgtgcattaccgcgacggttcgcggcctgagttccgcttccactggggccacaaccatgccgacgaacgcgctgccttcgaaagcacactggactggatggctgcgcatctggaagccaatcccggggcgcatgtctatcactatgcgccttacgagatcaccgcgctgcgccgcctctcaacgctccatgcgagccgggaagagatgctcgacaacctgctgcgccagcggcgtttcgtcgatctctacgccgtgttgcggcaggcgatccgcaccagcgaggacaacctttcgctcaagacgatggaggtgtttttcgccaaagcgcggcagggcgaggtgaccaaggctgaccagtcggtggtcgagtacaagagctggcaggcgagcggcgaccagacgatcctcgacggcatcctcgattacaacaaggtcgattgcgaaaacaccgaggcgctgcgtgactggctggtggagctgcggatggacgatctgccgtggcgcccggttggcccagttactgccgtacccgacgagaaggccgaggcccgtgccgaagcggaggaacgctccgcgcggctgctggcggccatcgccgaaggtccgctgccggagagtgaggagggcagggcgctcgtcggccatctcacccagttccaccgccgcgccgacaagcccgccttctgggccatgttcgaccgctgcgagcgcgagccggatgagctggccgaggatcacgaatgcatcggaggcatcgtgcccgatcccgacggcgacggcgtgtggcagcggcccgaaaagcgcagcaccatcagcagctatcgcttcccgccgcaggaaaccaagctgcgcgagggatcgacggtgctccatgcgcccagcctcgccaaggtcggcaccattgttgcgctcgattgcgaggcgggcacggtggagatcaagcgcggcaatgcggccaagggcatgtggccggcggaaggttcgctgatccccgagccgaccgtgcccaaccagatactggtggcagcggtgcgccgcgtggcgctgacctgggcggggatgaacgaggaccagtggctttacggggaaaccgatcccgatggcctcgaaacctggtcttgtggcctgaccgacgaggagccctaccgcgcactgctcgatctaatcgaacgccgcccgccgcgcctgcgcgactggtccggcggcgcgctggtgcgcgagggcgaaagtctggtcgaggctgccacgctgcgctgtctggcgatggacggcacaacgcttttcatccaggggccgccggggaccggcaagacccacaccagcgcgcacgtgatctgctctctgatcgcggcgggcaagcgcgtcggcgtctccagcaacagccacaaggcgatcaacaacctgctcgccaaggtggaggaggtagcggaggaaaccgggctcgttttctccggcgtaaagaaatgcagccgcggcaatgacgagcaacgcctcaacggccggatcatcaccgatgtcgagaatgcctccgacgtccacgaacacgcacccgaccttgtcggcggcaccgcctggctgttcgccgacgagaatttcgatcaggagttcgactacctcttcgtcgatgaagctgggcaggtctcgctcgggcacctgctggcgatgggatcggcggcgcggaacatcgtgctggtgggcgaccagatgcagctcgcccagcccattcagggcgcgcatccgggcgagagcgggctatccgcgctcgactacctgctgcagggcgaggcgaccgtcgcgccagatcgcggcatcctacttgacaccagctggcggatgcatccgtcgatctgcgagttcatttcggacgcggtctatgacgggcggctgcaggcccaccccgattgcgccaaccagcggctgcacctcaagccgggccatgatccggcactcgcggaaaacggcatccgctttgtggcgatggaccacactggctgcggccagcgctgcgatgccgaggtggcgcgcgcgaaggcgctggccgaggggttgatcgggaccgcatttaccgaccgccagggcaggccgggcaagatcgggtggcagaacatcctgatcgtcgcgccctacaacatgcaggtgaacgcgctcgccgctgcgctgccgtcagctgctcgggtgggcacggtggacaagttccaggggcaggaggccgaggtggtgatcgtgtcgctggcgacctccacccccgacgacctgccgcgccacgtggaattcttctattcgaagaaccgcatcaacgtcgccatcagccgcgcccgcacgctggcgctggtgctggccaacccgaagctgctggaactggacgcaaaaagcgtcgatcacctgcggctcgtgaacacactcgcctgggtggcagaggaggggaagtgagggataccgaataccgggcctggctcgaaacgcaggaattggccaagcgcagcatcgggaccaagatgtccgacgcccggcgggtcgatcaggagcacggtgatctcgacgcccatttcgaggaggaccggatggtgtctctgctcgacacattcgcctactccaaggctgacgaagctgcggggcgcgccaaccctaccaagctgaacatcgatgggaatctctacaacaatctggcgtcatatcgtgccgccctgaccacctaccgcagcttttgcgaggcgagggttcatccagaaggccgcctctcaggcctcgaccgccaagcgattctggacgccattgccgcatgcgaagctgccggatcggtgcaggcctttatcggccagatggacgaccgcggcgctccgcacaaattctggctgctgcacgaggggaagcgttacccgagcaaggccattgtccattgggcgatgcgcgaacgcggtattgacgcgaccgccggtggcagcctgtgcaaatcgacacttgacgaccttggcttcgcagtcgtcgactggcccgagctgcaacgggcgcaggaggagttcttgcgccagatgcccgacttcagcgattttcgcgctaaccgaggcacctattgggatgtcgagcggcgttacaagaatgccctgatcgaacaggcccgcaccattgccgctggcgacggcgatgatcgcgcggcgggcgagggcatctaccgcatccttattggcgggcagcagggcgtccccctgaactggcggaccttgcccgaggtgcaggctaccgaaccggtgctgcgcgatcgcttctacgccgcgctcggcgcgctggcacgcagcgatgccccactggaggaagccatacccgccgctgcacgcgagctggaggcactgcgcgatgccggcataacgggcctgcggcgcggcgaaatcctgtcgatcccgatcaccgtctgggccacgcttcaccccgaggaggcgagctggttcaagatcgccaggatcgaggaaatgggcaagcgctacttcggtcgcaacctcttccccgccagcgatttccgcttccgagagcaggacctcggcgaatggctgcaactgatgcgcgccctgttcggcctgctggaaacagaagtcggatggcacccgcaggacctgttcgacgtgcagggcttcgtctgggtcgcgctcggcggaaacgacagcgccgaagacgatgggaacattgatgaggcagcagagatgacaatctctctggatgacggcccgtactggtttcttggcgcggcattcgggcgaacagaagatcagctggagcgcttcctcgccgagggtatctgggagataagcgaaccgagtgaccggcatcgcgcgcaggtgttgagtatgcagcccggtcagcacatcgcgatcaaatcgacctatacaagaaagcaaggcctcccctttgataacatggggcgtgttgtctcagtcatggggatcaaggcgacaggtacgatcacgcaaaaccctggcacgggcgaaactgtttcggttgcgtgggacccgcccttcgaggcacgcgaatggtatcactacacctaccagccaaccgtttgggaagtttaccctaccaaggagatggcacggcgtctgatcgctttcgcttttcatggcgcagcgcaggactacgactggtttcacgccaatctgaagaactggagccagttaccggatgagccggaagaggaagtggacgacgaacttgcggcagacgcgcgccaaagcgatccgcagaatatcatcctctatggcccacctggcactggcaaaacctaccgtacaatggcggatgcagtcaggcattgtctggaactggacaagaaagatccgttgctttgcgatgctgcccgtcgcgaggagttgcggggggaatatgaagccttgcggaccaacggtcagatcgcattcgtcaccttccaccagaattttggctatgaggactttgtcgagggcttgcgccccaagaccatcgaaggctctgccggcttcgtgttgaaagaagagccggggattttccgcaatatggctgagaaggctgaaggcagtccggaacagcatgtgctagtcattgatgagattaatcgggcgaatgtctcgaaggtattcggcgaactcattaccctgatcgagccggacaagcgcctcggcaaggaagaagccttgcgccttcgcctaccatattcgcgcaaaatgttcggagtccccgcaaacctccacatcatcggcaccatgaacacggccgaccgctctatcgccttgctcgataccgccctgcgccgacggttccggttcgaggagatggcgcccgatacctcggtgccagccttccagcaggcagaaaccgacaccggcctgccgctcgccaaggtgctcgacagcatgaaccggcggatcgagtatctcgtcgatcgcgaccaccggatcggccacgccttcttcatcggctgcgacaacaagcgccaggtcgacgccgtcatgcgcgacaaggtcatcccgctgttgcaggaatacttcttcgatgactggagccgcctcgccgcggtgctgggggaaaaggacaagggcggtaacttcctttcctgcgagaccatcgaggatccgctgggcgagggcgatccgatgaaatcgtggcgggttcgcaaggagtttgacgagggcgcttaccaccgcctcgtgtcgggcaaggccgctcccacgccggatgccgccgatccggaggctgacccggcgtgagccatttcaccgtccgcgaatggggccatgtgaagctgggggagggcgggtttgcgcgcgcgcaggccgatgccctgcacgccgccgcctgcggccacccgcttgcccatcgcgacgggaccaacgtgctcgtctatcgccgtgaccggatcgtggcgcggcagatggtcggcatggtggcggccaaggggtgcagcctcgaaatcctgcccaaggtcgatcccgacgcagccgaagacgagcaagccgactcagtccgccgccgcctggtgcggatgctcgatgtcgcgctcgggctcgatctggacctcggcggcgaggcggcgatccaccggcaaagcaataccctgctcgaagtgctgatccgcgcctttgccgacaagctgctggccgaggtgcggcgcggcctgccgcggctctaccgccagcacgaggacgatctgcccgcgctgcgcgggcggctcgacgtgacccgccagttcacccgcaacgctgtgcggcctgaccggctcgcctgccgtttcgaccagctcgacgccgatacgccgctgatgcgggtgatggcggcggcggtggtctacctcgggaagcacgcgcgctcgcccgcgacccgccgcatgctcgacgaactgcgccacgtgctggccgacatcccgctcgtgcctgtcaatcgcctgccgtggaaggaggtgcggatcgaccgtaccaatcgccgctgggaaagcctgttccgcctcgcgcaactgctgctgcggcgtgactggcaagccacccaccatgcggcgcgctcgcccgagggcgtgaccctgctgttcccgatgaacgacctgtttgaaaaatatgtcgcggcactgctgcgcaaagcgctggcgggcagcgaggtggaggtcgtggaccagggcggccaccgtgcctgcctgggcatgtttaccggagagcacctcgaaaccggcgacaccttccgcactagacccgacatcatgctgcgccggggcggcgacattctcgccatcatcgataccaagtggaagaagctcgcccgcgatctgctcgaccgcaagcacggggtcagccaggccgatgtctaccagctgatggcctatgcccggctttatccgacgcgcgagttgatgctgctctaccccggcgttccgggcgaaccctgcggcgagcgggcgccgttcggcatggccggaggcagcgagcgcctcgccgtggccaccatcgacactgcgcaggcagaaggcgaagtcgtgcggcgtctggcaagactttgcgaacgattccacaccgtatcggatgttcctgtgacttaaggcttttcttgcacccgacaaacgtgcaccgtgcgtcagttccggtcgcaatgggtgcacggtttgggggagggcgcagtggccaggatggcaaagctggaccggctgctgacgctggttaacgccctccacgatacctccgacggattgacgctcgacgagatggccgaggcgatcggggccgaccgtcgcaccgcggaacggctgcgcgacgtgatccgcctgcacttcgacctcgaggaactgcccgacgaccgccgcaagcgcttccgcatcgttggcagcctgcgccgcgtgttcacccgccccaacgccgccgagattgccgccgtgcaggaagccgccgctgccgcgcgccgttcgggcgctgcacaggctccgctgctggaaagcttggccgagaaggtgaagggcgcgctcgatgatcgcgagaagcgccgcctcgatcccgatctcgaaccgctggcgcggctgcaacgccaccacgtccccgctggccccgcgctcaccgtttcgcacgaggttctggcgcaggtgcagggtgcgatcatggcgggcgcctgcgtcgaatttgattacctgcgcgacggcgcgagcgaggccagctggcggcgcgtgatcccggtggggctgatccacgggccggtcacctacctgatcggccagctgcccggcagcgagcgcgaaccggtgccctaccgcctcgaccggatgagcgcagtgcgcatcagcaaccagcccggttgcgcggcggaagactgggacctcgacgcgtggatgagccgcagcttcgggatctggcgcgaagaggggcatgatatcgtcttacgcgtttgtcccgaagccgcgccgcgcgcccgcgcatggcgctttcatccggcgcagcaaatggaggagggcgagggcggcgagatgttcgtccgcttccactccggcggcctgcgcgaacttgccgagcacctgttcacatggggcggggctgttgccatcgtcgcaccggaggaactgcgcgaggtgatgcaggaaaggctgacagcggtgcagggggcattgggggacatgcgaccggaattgacgcaaacgcagagtaggccaggttgatggatgtcaatattgctcttgatcgtgcaagactagccgcatttttttatgcctgcagggagcggaagcactccgcaaatcacactgcaaatctgccgcccttcctgaatgcgttgcggacttcgggtttgggtaatctgccggacactgcgggtaagcgcgatgtttttgcaaaacctgatcaggatttgctggcgcagttcttcggcgcatccatgccaatgttcgagacgttgaataaccgtttccggcacaatccttggcaaatggcggggattggccgctatgaaacgcggaattccgccgttctcggtcagttattcgacagcaccgtctcgcctgttgccgggccgagattcctcgccagctacttcgattgcgtgagaacgtccaacgacactcgttcggcactccccactctggcagaccttgaatcggggtatcgtattggaattgaacactgcccgactggtagtcagtccgagcgtgttgacctcaccgttgagggtaacgatttcgtcatcggtatcgagatcaagatcgacgcaggcgaggggccggagcagcttgagcgatacaagcaggtgatcagacatcgtgcagaagcgcgtcaatgcaacctcaacagtgtgatctatctttctcctcgaccaaccgcgacgttggacgtcctgcaatctagttggcgtcatatctcacgagccgctgataagacttctcaagaggtagctgcgaccaattcgcgggttgcctggctcctggcttgtttcgccgatcatgtccgtaatttctactgaaagagcacgatggaaaacgataaccaattggcgggccttatcattcgcaacattgcggaactggagggcgcgctgaaatatctggaagaacgggtaaccccgcgcctcgccgaggcaatatttgaaattgtcgagagcagtgccggagcctcagactggtatttttccgattcatccgaccctggaggctggttctgtctcaaagattggctgatcgccggacaatccaaagccgacgccaatatgtggctccagatcgagaccccgggtgatgatctttcggagacctgggaggggtcatttgcaggcgggctggcggcggagcacacggcggcgctagttgtgcgctatgcccgtgttggaaagcgacagtgggcagaattgagggccggtcttcccgatgcaatggatagcattcgtgcggccggatttgtggtcgatggagaccagatctacttttccttgccgcttgaccgcgaagcgctggccgaagcattcgagcagggagatatttccaccgcgcttggcaggatcgaagagatggcgcttgcgctggcaagggcgatacctgcactcaatgcgatccatcaggcgctgacacgtatgattgattgacccatgaaaaagccatgcaccaccaaagccccggaagatctcggtcggagtcgtccaattcatggagaaaacgtgaaggagccgcaataaaaacgggggccgtagcccccgccttatttggtgcagtcaagctgcttgttcacaaccagacctgcgatttctgaagacgagaaattcgttcattttggccctgttgtcaacagcgtttcagaaaccgtggtccggccgcaacatctcatatccatcatgagttcaggctatgcatatcgcgagtggttggctgaatgtcaaatatggatatgagataggaattgacttcaagccttgtttgccctgaaaagggccagcccgagagaaggatatcccaagggctggctccccggagggtggttgtcgtttccgtttgaccacagggcggcaaccacctttggtggatcaggatagaggattctgcaatgaccacaagacttggtctcgacatcggcaccaactcgatcgggtggtgtttgtttgacggcgacacgatccgcgatatcggcgtgcgcatcttttccgatggccgcgatcccaagtccggggccagtctggcggtggaccggcgcgatgcgcgggcgatgcggcggcggcgggatcgctaccttggccggcgctcggcacttgtcgaagtgctggttacgcacgggctgctgcccgcggacaagtctgctggccaaaagctgcacggtgaagacccctatgcgctgcgtgttcgcgcactcgatgagaagctgaccccgcaccagatcgggcgggcgctgttccacctgaaccagcggcgcggtttcaagtccaaccgcaaggcggaccgtgtttccaaagacaatgaggacggcaagatcgccagcggcaccaaggcactggatcaagccatcgccgaatccggcgcgcgcacgctgggcgagtacctgcatcggcaggatgtgaaacgcgtacggatgcggcctgatgccgatggctatgatttctaccccgaccgcaggcattacgaatatgaatttgagcaaatctgggccgcgcaggcaccacatcacccttcgctgctgacggacgaggcgaaagccgcgatccaccgagtgatcttcttccagcgcccgctgaaggcgcaggtggtaggcaagtgcagcttcgccgggtggtacggcattcccgaagacgaaaagcgcctgcccaaggcgcatccgctgttccagcagcgccggctttatgaagaggtcaatcagctggaggttgtttccgccggtgccccctcgcgcaagttgacaaaggacgagcgcgacaaactgatcctgaaattgcaggacaagaagaaggtcaccttcaagacactcggcgggatcatcaagctgcaggaaggggaacgcttcaacaaggaaagcgagaaccgcaaggatctgatcggcgacgaggtccgcgccgagatgatgcacaaggaccgctttggcccggactggacgaccttctccgccgcgaagcagtcggagatcatcgaccggctgctggaagaggaaaacactgaaaagctgctctcctggctgcaatcggaacacggtgttaatcgcgagactgcggaaaatatcgccaatgcccacttgcccgacgggcatggccgcttcggcctgactgccaccaccgcgctgctcgaacagctcaaggccgatgtcattacgtatgcccaagcagcggagcgagcaggataccatcatagcgatcatcgcactggcgagtgccttgatgaactgccctattacggcgaaatcctcgcccgcgaaatcgcgccgggcaaggaagattatggtgacgagttagaacgccagtggggcaagatcaccaaccctaccgtgcatatcggcctgaaccagctgcgcaggttggtgaacgcgattgtgcgtaaatacggtcgaccggaatatatctatgtcgaattggcgcgcgagctcaagctcaacgaaaagcagaaggccgagcatacccggcgcatcaagcagaccaccgatgcagcggctgaacgcagcaggaagctggaagagatcggccagcgcgattcaggcggcaaccgcatgctgctgcgcatctgggaacagctcaatcccgccaatccgcttgatcgcaagtgtccttactgcggggaaggcatcggcatagaagcgcttatgaacggatcggccgatatcgatcacatcatcccctactcgaagtgcctggatgacagtgtgggcaacaagatcgtcagccacacccattgtaaccggcaaaagggcgacaagactccgtgggaacggtggggcgaaaccgaccgctggccgatcattcaggatcaggtggcgcggctgcacaagtccaaacagtggcgctttggccccgatgcgatggagcgcatagagcgtgacggcgggttcatcgcccggcagctaaccgatacgcaatatctctcacgcatcgcgggcaaatatctctccagcctctacaccccggacgaggggcgccgggtctatgccgttaccgggcggatgaccgccatgctgcgccgcctgtggggcctcaatgatatcctgcccgaccataactgggtggagaatgagcattccaatgcgcccaagaaccggctcgaccatcgccatcatgcgattgacgctgcggtggtcggtgcaactgatgcgggaatgatccagaaaattgcaaccgcagcagggcgcgcagaagaacaggatctggaccgtcagtttgtcgacctgccaaaaccgtgggagggtttccgtgaggatctgcgcgaaaaactctatgccactaccgtcagcttcaagcccgatcacgggcgcaacggcaaactgcgcaaggatcgcgatgtcacttcaggccggttgcacaatgataccgcctatggccttaccggccgaaccaacgccaagggcgtaccgatcgtcgtcacgcgcaaaccattgctcagcctcaaacctggcgatctgaccgacccggagcggatgcctgatcacgatctgcaagaggcgctttactcagccacccgcggcaccagcggcaaggagttcgagaaggctttgcgcgaattcgccagacgcgacggccccttcaaggatatccgacgcgtccgcctgaccgaaccgctcaacgtcatcccgatcagcgacaagggtggccgtgcctacaaggcggtgaaaggcgatgccaatgcccgctttgacgtctggcgcctgccagatggcaaatgggtgacgaagtggaaggatcgcgaggacaatgaacagtccagcatcatctccatgttcgatgcccatcagcgcgattttgccgaggcgcgcccgcatcccgcagcgaaaaaggtgctcagcctgcggcagaacgatctgctggcggtggaacgcgatggcggtgagcgggagatcatgcgggtggtgaagttcggcgggaacggccaggtatttctcgccgcgcataacgaagccggaccattgaaggcacgcgattcggacggtggcgatccgttcaaatatgtaagtgcgatggctgggtctctgaaaaagataaaagcccgacaaatccgtatcgacgaactcggccatattcatgatcccggcccacgtgattgaaacgataaccaattaaccacgtccttacttcgatctgtcagacattgcttcagcttatgctggaggtctctcgtcaggcatggatcggattgtcgatatcgcgacggacaaggtgcatttgtctgcccatcgcggcctgttgctcgtcacgctcgatggcgaggaaatgggccgagtggcgctcgacgatatcgccgccgtcatcgtgcatgcccacggcgtaacctggaccaccaatctcgtcgtcaagctggcagaacgcggcgcaatgatggtgctgtgcgccgctaatcatgggcccgtcgccatgatggttccgcttgaaggacaccacgcccagaatgcccggtttcgtgcgcaatgggataccggccttccgtttcgaaaacgcgcatggcaggccgtagtgcaggcgaagatccgtaatcagggaagtctgctttccgcactcggccaggaggagggacaggccctcctgctgatggccgaaagggtcaaatccggcgacaccgccaatgcagaggctcaggcagcacgccgatactggcccgcgctgatgggcagggatttccggcgggatcgggatgcagacggcgccaatgctctgctcaattatggctacaccgtcatgcgcgctgccgtggcgcgtgcggttatcgccgccgggcttcatcccacgatcgggctccatcacgccaaccggttgaatgcctttgccctggctgacgatctggtcgagccttttcgcccgctggtcgatgcggccgttcaccggatggtggaaggggacgtggacgagttggatggtccggccaaggcccggttggcatcgctgctgtcggccgatctggacctgcaaggttcgacgacgcccgccagcgtggcaatccagcgcctggcccaatcactcgcggccagttttgaacaggggcgggtggagctggcgttgttccagactccggcgccgctcgcctggaacgccatcgctcgccatgcccctgacggcgaaatgcggtgaagggcgatggtgacacccatcttagcggatatcggttgatgtggattctggtgatgttcgacctgcctgtgggcaccaaggaggaaagtcgggctgcgaccaagttccgcgagtatttactcgatgaaggctttgaaatgagccagttttcgatctatgctcggttctgttccggcaaggaacaatacgaggcctatgtgaggcggatcgaacgcaatttgccggacaagggcgacgtccacattcttggattcacggaccgacaatatgagaacatcatccgctttaacggccagtcacgccgccgccagcgcaaaaatcctggccagcttgccctgttctgacgttgcggcaggagggttttgctgtccccgacgcccctcaaatacgttttcattcaacggcttgagagagcatccaggatagcagttcagaaatcgcggtccagctgcaactatgaatgggttgtgattgcctatcgtgaaaggatagcagttcagaaatcgcggtccagctgcaactgcgtcccgcgtcggcacaggcttgccccaaggatagcagttcagaaatcgcggtccagctgcaacacccgtcggggcgtccaagtcgtaatccccaggatagcagttcagaaatcgcggtccagctgcaactaaggcaacagcggcgactatatgacgaggaggatagcagttcagaaatcgcggtccagctgcaacgccacggcagcaatgcagttgcctccggagagggtagcagttcagaaatcgcggtccagctgcaactgcgatcatcgacaaggcggggattgagcgaggatagcagttcagaaatcgcggtccagctgcaacagcgcggtcagatatgcgcagataattaacataactattattatccgtttgtaatttctgtaggcgctaaatagaaatgacacccctctgctagatagagatgacaccctcgggcgtctaccagcagagcaacggtggcatggttctcccgacggatgggagaacgcttctatgacggtgctggcaatgagccatggcgagcaggacacccgcaagaggccggactgattgcagctcagtcctttgccgcgcacacggtgaagcagctttgggccgaattggccgcaacaatatccttcacctgaggcctgacttcagttaacaaaaatgtgcccgtcggtcagtcccgcgggtgaggcataggaacctctgtcgttgctaccggtcgaaccagtttcggccgggtggccgtcttctgtccagggctcgtcctaaaatggcggcgccttgtgggggtcggtacacagaacggacccagatatacgctaaggttttgccgtgccttcgacggcgcgcatctggcgaagcggtctgagcgcggtg

SEQ ID NO: 3503 - DNA, 14835 bp, synthetic construct
  source 1..14835: mol_type = other DNA
  misc_feature 1..14835: note = Synthetic
ggcgatgtcgtcacccgccttgagcgcgagccccgagacggtgcggacgaaatcctggaactgctcgttcttcgcgacgaaatcggtttccgaattgacctcgacagcggcgccgcgggtgccctcgacggcaacgccgaccagaccctcagccgcggtgcggctcgacttcttggcggcagtggcaaggcccttcgtgcgcagccagtcgatcgcggcgtccatgtcgccgttgttctcggtgagcgccttcttgcagtccatcatgcccgcgcccgatttctcgcgcagttccttgacggcagcagcggtgatctccgccatattcttcttccttcttgcttacgggacgggggaaggaacgttcccgctcccacccccgatcgtatcatgattatgacaccggccagcaggccggagccggatcagcttgcggcggtttccgcgacagccggttccgcaacaggtgccgcgattgccgtctcgacgggcggcacgacagccgcgccgatgtcttcaccacgcgactggcgcgcttcggtgccaccgcgggtcgctgcctcggcaatcgactcgcaatagagacggatggcgcgggcggcgtcgtcattggcgggcaccggaaaggcgatgccgtcggggctgacgttcgaatcgaggatcgcgacaaccgggataccaagcgtgttggcttccttgatcgccagctcttccttgttggcgtcgatcacgaacatgacgtccgggataccgttcatgtcgcggatgccgccgagcgaaagctcgaacttgtcgcgctcacgggtgagctgaaggacttccttcttggtcaggccgtgagtgtcgcccgacagctgctcttccagcgccttgaagcgcttgatcgatccggagatcgtcttccagttggtgagcatgccgcccagccagcgatggttgacataatgctgacccgaacggcgcgcggcctctgcgatcggctcctgcgcctggcgcttggttccgacgaacagaaccttgccgccattctggacggtctgtgcgacgaactcgagcgcacgcgcgaacagcggcacggtctgcgagaggtcgatgatatgaacgccattgcggtctccgaagagatacggcttcattttcggattccagcggtgagtctggtggccgaaatgtgcgccggcgtcgagcaacgcctgcatggagacggtgggagccgccataggattttctccttacccggttgaacctctgcggggcgggaaccgggaaacccggcaccggattatgtgccccacatgtggaatggacgcgcctttatgcgacccgccgtgcaaaatcaagggttgacagtccagaacaaatagtgaacatcaggaacggcacaccgtttcaagcgcttttcggcacaggaatcgccgagccgttgggaacggacgacaaaggatgaagactcatgcttcagttttttagtcttgttttgttctccggagttttggccgtctcggttgtggctatcgctgccacagtaaaggccgagcttccctatatcctgcgcgcgctcggtattgatcccgcaccgatgcccccgctgcagtcgacgcgcgagccgcgcgtccggatcattcgcccggtgcagcctgcggcgcgacaggcgctgcgcgctgccgcctgacccggccataggcgaaggcgctgaagggaatcgttacaaggtagaacagcatcaggaagctgagcgtatgccagggcgcggtgaacagcgccgcgccggccatcgccacaagcaacagcgccggcagtcgccaggcgcgcgagatatggagtgacgaccagctgtaggtcgcgaggtccgaaatcatcaggaaaccgatcagcgctgcccatccgcagatgaaatagggatcgcggaagatgtcgagaccgctccacagccacatcgccaccggcaggagcatcattcccgccccggtcggcgcgggaacgccggtcaggaagccggcggtcttgcgcggatgctcggcgctgtcgatcgaggcgttgaagcgagcgaggcgcagcgcggcgcagaccgcataaccgagcgcgaatatccatccaaagcgcggaatctcgttcagcgaccagagaaacatgatgatcgcgggcgaaacgccgaaggcgattacgtccgacagcgaatcaagctccgcaccgaagcggctttcgcccttcagcagccgcgcgatccggccgtcgaggccgtcgagtatgccggcgatcaggatcgcgaacaaagcccgttcccagtccccggcaatcgcgaagcgcaccccggtgaggcccgagcacagggcaagcgcggtcacggcgttgggcgcgacggcccgcgcggggatgccgcgcctgatatgtacccggcgaccgcgcatcatggcttcatccttgccctatatgtcctactgcgccgcgccgacggtccggtcggattcgccgagccgggcgatgaccgtctccccggcgatcgtccgctgacccagcgttacgcgatggccagtgccggccggcagatagacgtcgacccgactgccgaaccggatcaggccgatccgctgccccaggccgacgatatcgcctgccttgacgaagggaacgatgcgccgcgccacaagtccggcgatctgcgtgaagccgatgcgggtgccgtcgatagcctcgaccaggatatgctgacgttcattctcttcactggccttgtcgaggtcggcgttgaggaagctccccggaatgtaggcaaccttgcggaccgtgcccgcaatcggggtgcgattgatatggacgtcgaacaccgacatgaagatggagacgcgggtcatcggcgcatcgccaagcccatcctcgcccgccatctcacgcggcggcggcaccgtggtgatcatcgtcaccagaccgtcggcgggcgcgatcaccagcccctccccggtcggtgtggtgcggatcggatcgcggaagaatgccgcgacccagacggtgatgcccgccataggccaggcgagcgtttcccaggcgagcaatgcgaagacgagtgcgattaccgcggcgagcaggacgaacttgcggccttcggggtgcacgccgggccagcgccacttgaccgaagtggttccgatgtcgggtttatcgagtgatgtcatgacgccatcctagagcctgatcgtctgaggtggaagcgctttgcgcttccgctgatgacgtgaatcaggctctatacgatggctggaccttgattcacgttttcaggcttttcagcctgaaacgatcaaggtctagggctctgcgcgggcactgacaatcgttgccgccgcgttcctgttccgggcttcctcgcgaaatgcctgataaatcgacgcggccacagttgatccgggggatttcgtgtcttagggaccacccgcattatccctccccggagactgagaaacatggcgaagatcaaggtgaagaccccggtcgtcgaactcgacggcgacgagatgacccggatcatctggcagtggattcgcgagcgcctgattcttccctatctcgacatcgatctcaaatattatgatctctcggtcgagaagcgtgacgagaccgccgaccagatcacgatcgacagcgccaaggcgatccagaaatatggcgtcggcgtgaagtgcgcgacgatcacccccgacgagcagcgcgtcgaggagttcaagctcaagaagatgtggaagtcgcccaacggcacgatccgcaacatcctgggcggcgtcgttttccgcgagccgatcgtgatcaagaacgtccccaggctggtgccgggctggaccgacccgatcgtcgtcggccgtcatgcattcggcgaccagtatcgcgccaccgacttcctcgtccccggccccggcaagctgcggatgatctgggaaggcgagaatggcgagaagatcgagcatgaagtgttcgactatcccacgtcgggcgtcgcgatgggcatgtacaatctggacgaatcgattcgcgatttcgcccgagccagcatgaactatgcgttcgaccgcaaatggccgctctatctgtcgaccaagaacaccatcctcaaggcctatgatggccggttcaaggacttgttccaggaagtgttcgacgccgagttcgccgacaagttcaaggccgcgaacatcgtctacgagcaccgcctgatcgacgacatggtcgcttcggcgctcaagtggagcggcaagttcgtctgggcctgcaagaattatgacggcgacgtccagtcggataccgtcgcgcagggcttcggctccctcggcttgatgacctcggtgctgatgtcgcccgatggcaagacgatcgaggccgaggccgcgcacggcacagtgacgcgccattaccgcatgcaccagcagggcaagcagacctcgaccaatccgatcgcctcgatcttcgcctggacgcagggcctgcagttccgcggcaagttcgacgagacgcccgatgtggtgaagttcgccgagacgcttgagcgtatatgcatcgagacggtcgaaaagggcggcatgaccaaggatctcgcgatcctgatcggccccgaccagccctggatgacgaccgagcagttcttcgaggaaatccgcctgaacctcgaaaaggaaatgtccacctgggcgtaagctcggttcaactctgagatttgggcgtcattccattggaatggcgctctttttcattggcgaacgaatatgctcgcgccgcacgcccagcccgaccactcgcgcggggatgcgctgcaggatcgggaagcggtcaagcatcctgagcgcgaacggcgccttcatcttcgcggtggcgccgagcgccgggccgagcacgctggcatggaccgcgcgttgcattccctggatgacgcggacgggaaacagccggcgcttctgcacgtcgttcaacagctgatcgactggctcgtcctgcgatagcggcaaggcaagtatattggcggcggcgaccgcatcctgaatggccaggttgatccccaccccgccgaccggcgacatggcatgcgccgcatcgccgatcgcgagcaggccgggccgatgccaacgggtcagccggtcgagcgacaccgccagcagcttcacgtcgtcccaggatgtgatcgcgccaagatcaccggcgatttcgggcacggcagacgcgacccgcctgcgaaaggcgtcgatcccctcggcacgaattttgtcggccccgcccttggcgaagacgaacgcgcattgccagtaatcgccgcggtcgatcatcgcgatcaccgtgcccggcgaaaactgcccggcggtctcgttgcgtgggctccgctgcttcggcaccctgaaccagaagacgtcgatcggtgcgccgagatcctgcttttcgagacccgccgcatcgcgcaggaccgatccgcgtccatccgccgcgatcaccagatcggcgccgatctcctccccgccggccaggcgcacgccgctcaccctgcccgcctgctcggtcaatcccgcgacttcggcatccatccgcagcgagaagcacggataggccgccgccgcgtcgcggacgaaatcgaggaaatgccattgcggcatcatcaccatatagcggtggcggaccggcaaatgggtgaggtcggcgacgcgataatagcgtccgtcgacacgcgcgctgatgtccgtgaccttgtcatgctcgcgggcgagcagcgcgttggcaaggccaagttcgtcgaacagcgcgatcgtcgagggatgaacggtatcgccgcgaaaatcgcgcaggaaatcgccatgcttctcgatcacgagcgtctcgacgccggcgcgggcgaacaacagtcccgccatcatccccgccggtccgccgccggcaatcaccagtcgcttatgcatcaccgaaaccctcccctgatggctggcaattttgttgcgttgcagccactatcgcccccatggccttttcactcacctcggcagccttcagcgacacattggtcattctcggggcggcggggctcgttatccccgcctttacacgattcaggatcagccccgtcatcggtttcatcctggtcggcgcactggtcggtcccaatgcgctgggccatctgatcgatgatgtcccctggctctattatgtgacgatcagcgacccgcacgcgatcgagcctttcgcggaattcggcatcatattgctgctcttttcaatcgggctcgaactcagcttccggcgattatggggcatgcgccgcgcagtgttcgggctcggctcatcgaagctgctgctctcggccgggatcatcggcgtcggcctgtgggtgttcggcgagctgcccggcggcgcgctcggtctcggccttgcgctggcgttgtcctccacggcgctggtgctgccgatggtcggcacgaccggcgcggtcggcaagcgcgccttcgcgatcctgctgcttgaggatctcgcgctggtgccgatcatcttcatcctcggcgcgctcgccccctatggcgacaatgccggttgggacggcctgctgcgcacgctcgccatcggtttcgtggtgattgcggcgatgatgatcggcgggcgcttcctcctgccgcgcctgtttgcccaggccgcgcgcgcgaagaacccggagatgttcctgtcggcgagcctgctcgtcgtcatcctggccagcatcgccaccacggccgccggtctgtctcccatcgtcggcgcgctgatcgccggcctgctgatcgccgagaccgactatcatgccgaggtcgagcttgtcacagcgccgttcaaggggctcgcactcggcattttcctgatcaccgtcggcatgtcgctcgatccggcaatgctcctcgccaactggcacgaactcgcgctcgcggtcgtcgcggtggtgatcgtcaaggcgctgatcaccgcgctgctgttgcgcttctggggcgccaagcgcgcggtcgcggcggaaaccgggctgctgatgtcctcgccatcggaaacgacgctgatcgtgctcggcgtggcggcgcaggcgcggctgatcgcgcccgcggacgccgccttctggcaggtcgttaccgccatcggcctgacgatcacgccgatcctcgcgaaggtcgggcatgatctcgcccgcaaattcgacgatcgcgagagccagcccgatcccaatatccccgcctcggttcagggccgcgcgatcatcgccggcttcggccgggtcggccgactggtcgcgcagatgctcgacgcgcacggacgcccctatctcgcggtcgacgccgatatcgacgcggtgatcagcgcgcgacgccggggctatgacatcatgttcggcgatatcgcccgccccggcatgatcgagcatctcgatctcgccagcgccagtgccctagtcctgacgatggacgatccggtccagctcgttcggatcacccgttacgcccgtcagctccatcccgagctgacgatcgtcgcccgcgcgcgcgatcccaaccacgccgccgagctctatcgcgccggcgcgaccgatgcggtgcccgagacgctcgaatcctcgcttcagctgtcggaagcggtgctggtcgacctcggcgtggcgatgggcccggtcatcgcgtcgatccatgagaaacgcgccgaactacgctccaagatcatggagatggggcagatcggccgcctgccccgcctcggcggccgccgccttggcgatgaggacatcgacgaaccggcggcctgatgtccgcttagggctgcgtcactgatcgatgtcgcgcttatatgtctccggcagaaagacgaggccgatgaccacggtcgccgatgcgacgatgatcggataccacaggccgtaatatatatcgcccgtggcggcgaccatcgcgaacaccaccgtcggcaggaagccgccgaaccagccattgccgatatgatagggcaacgacatcgacgtgtagcgaatccggctgggaaacagttcgacgagcagcgccgcgatcggcccgtagaccatcgtcaccagcagcacgagcatggtcaggatcatcacgaccttcggcttgtcgatcgctgcgggatccgccttggcgggatagccggccgcccggagcacggcccccgcctcgccctggaacgcctcgatcgcggccttgcgctcggccccatgcgccttcgcaggatcgggcgcggcgatgctcgtgccgccgatccggatcgacgcgatcgtcccggcgggcgcctcgacattgctatagctgacgccgcccttggcaaggaacgccttgacgatgtcgcagctcctggcatcgaacttgttcttgccgatcgggtcgaactggaccgagcagtcgccgtcatgcgcgaataccgtgaccggggccgtcgcctgcgcgcgcgccagcgccgggttggcggcctcggtcagcgcgctgaacaatgggaaatagctcatcgccgcgatcgcacagcccaccaaaatgatcggcttgcgcccgatccggtcggacagccatccgaagaacacgaaagcaggcgtggcgatggcgagcgcgatcgccgtcaggatattggtggtcgcgccatcgaccttgagcgtcttttccaggaagaacagcgcatagaactggccggtgtaccagaccaccgcctgccccgcgaccgcgccggtcagcgcgatgatcacccatttcagattgccccagcgcgcaaaggcctcggtcagcggcgccttggaggtggtgccctcgtccttcatcttctgaaagaccgggctctcggcgagttgcaggcggatccacatcgatacgccaagcaggatgatcgacagcaggaacggcatccgccagccccagtcgccaaaagcatcctcgcccagcgtgaagcggaccccgatgacgaccagcagcgcggcaaacaggccaagcgttgcggtggtctggatccagctggtatagagcccgcgcttgttgttcggcgcatgctcggcgacataggtcgccgccccgccatattccccgcccagcgccagcccctgcaacagacgcagcgccaccaggatgatcggggccgccaccccgatcgtctcataggagggcaacagcccgaccgcgaaggtcgagaggcccatgatccccatcgtgacgaggaaggtgttcttgcgcccgaccagatcgccgatccggccaaacaccagcgcgccgaagggacgaaccgcaaaccccgccgcgaacgcacccagcgcgaggataaaccccgtggtctcgttcacccccgagaagaatttggccgagatgaacgtcgccagcaggccgtaaagatagaagtcataccattcgaacacggtgccgagcgacgaggcagcgatgaccagcttctcattctgcgtggcgcgatgatgcttcggacccgatccttcggacgctgacgccatattcaccctctcctgctcggccgcgccatgtttcggcgaatttttcggataagaccagaggcgggtatccgtcggaagatgatatgagagggtgccgtcccgatgactgcttcgcgccccaactgtggtcactcgggagagaccttcgcgtcagaaaagctgctcccatcaaaagagtcaattcacactcagtcattgaactgatgtcgttagatcaatcgccgcgctgcggcgaagtttgtgcagcagtgtggcacccaagctccacccttaccgggtactcggggaagccgaaaccatgcacttgatcgaagcgtctagcgtgaatgcccacggcgattcccgctaaacgccggggataatagccatcacgaaacaaaaaaggcgaggccgtagcctcgcccttatttggtgcagttaaactgcttgttaacagccagcctgcgatttctgagttatcagtttcagccgtatcggatgagatgtcaattgcctgtttcggccgcgtctgccacccttcagaaaagaggggggcggatgcgccgactagggctagatatcgggacgaacagcatcggctggtgcttgaccgaagacgacagccgtatcgtcgacatcggcgcccgcatcttttccgatgggcgcgatccacagtcaggtacatcgctagcagtggaccgccgcgaagcacgtgccgcccggcggcggcgtgatcgctatcttggaaggcgctcctcctttctggaagccttggtcgctcatggattgatgccagatgatgccgatgaagcgcagatggttgcacagcgcgatccctatcccctgcgcgcccgcgcgctggacgaaaagctggcgcccatcgaaattggtcgggtgctatttcacctgaaccaacgacggggtttcaagtccaatcgcaaggccgagcgcaagagtggggacaacgaggaaggtaagatcgcgagtgccgctcgcgggcttgatgaagcgatggccgaagcgggtaccgacacactcggccagtttctagctggtctggaaaccaagcgcgtcagaatgaacggcgaaaatcaaacttatgatttttaccctcagcgccgccatatcgaatacgagtttgggcgcatttgggaagagcaggcgaagcatcatccgactctgctgacggatgcggcgcgagccgagctacaccgcatcctgttctttcagcgtccgttgaaggagcaagcgatcggcatttgcacgttcgttcacaacgaatttcggttggccagggctcatccgctgtttcaggagcgccggttatatgaggaggtaaatcagcttgagataacgacacccggagcaccgaaccgcaagctgaagatggacgaacgcgatcggctgattctcaagctgcgcggggtgagggccgccaatttcgaaagcctcggcagattgctcaagctggaacccggacagagcttcaacaaggccagcgaaacccgcacccagttagcaggtaatgaggtccatgcgaccctgtcggacaagaagcgcttcggaaactcctgggagcattttgatcgcgcgcggcagtggaagattatcgagcgcctgatggaggaggaaaaccccgacacactccatgaattccttactggggagtgcggactggatgacgagcgcgctgacacgactgccaaggcctccttgccagaaggttatggccgcctcggtataaacgccacgtcccgaattttggatgagctgaagaaggaagtcatcacctatgccgaggcggtgggccgagctggctggcatcatacagataaccgcacgggcgagatcctaagtcagctgccctactacggcgaattactgacccgacatattccgcctgggactcaggacccgaacgaccccccagaaaagcgctggggtaagatcaccaaccccacggtccatatcgggctccgccagctcgaaaaactcatgaacgctatcatcaccttacatggtcggcccaacgagatagttgtcgagttggcgcgcgaactcaaactcaacgaaaaggacaaggaagaacataaccggcgcatccgccgagatacggctgcggctcaggcgcgctccaagaagctggaaaccgagggcttcgtagacaatggagcaaaccgagcgctgctgcggatttgggaagaactcaatcccgccaatccgctggatcgacgatgcccctattgcggcgaaccgatcgggatgcggatgcttttttccggcgaagccgacattgaccatattctcccttattctcgaacattggacgacagcattggcaacaagagcgaaggcaatgtctacgttattccgggtcgaatgacagcgatgctccgccgactgtggggactgaacagcctgttgcccgatcataatatcgtcgaaaacaagcatagtgacgcgcccaagaaccggctcgatcatcgacaccacgcgattgatgccgctgttgtcgctgtgacgacgcgaggattgatgcagcggatcgcacgtaccgcaggattggctgaggacaggaatctggatcgtttgttcgaaggtctggatcaaccttgggccggctttcgcgaggagcttggtgaacgattgtcggcggtcgtggtcagccacaagccagaccacggccgcaaggggcgtcccttacccggcaaagatatgacggcgggccgactgcacaatgacacggcttacgggcttacgggtgaggtgaacgccaagggcgttcctgtcgttgtgcaccgggtccccctcatgagcctgaaatccaccgatctaaccgaccccgatcgcattgccgataaagcgttgcgtgacgcgctctaccgcgcaaccgagggttcgactggcaaggactatgaggcggcactagtgcgctttgcgaagcaagaccgggtcttcggtggcattcgtcgtatacgcgttcgcgagccgctcaatgtcattaccatcaaggatcaaagcggacgggtctacaaagcctataagggtgacgcaaacgcgcgtttcgacgtctggcagctacccggtggcaaatgggtgtctgatgttgtgccaatgttcgacgcgcatcaggtgggtcaagcggaccggcggccacaccccgctgcccggaaaatcctaagcttgcaccagaatgacatgctcgcgatcgagcgcaatggcggaccgcgcgagattgtccgcgtcgtcaaattctcgaccaacggcagtttgcatttagctccatccacggaagccgggccgttgaaggcgcgcgatgcgacaccttcggatgtcgatcctttcaaatatatcaactcatcggccggcggtcttaaaagggtccaagcacgccaggtgcgggtagacccgctgggacggatttttgatcccggacctcgctgacgggagtttggtcgccgtcattttctgaaacgggagaaggatatatggaccgcatagtcgatattgcgactgacgggctccatatatcttcctatcgcggctttctgatcgtgacgcaggagcgtgaagagattgggcgggtcccgctcgatgatatccatgccgtcatggtccacgctcatggttgcacttggaccagcaatctggtcgtagccctcgccgaacgcggagcaccgatcatattctgcggatcaaaccactcccccgtggcggtaacgcttccgatcgatggccaccatgctcagaatgggaagatgagggcgcagtgggaggccgggcggccactggccaaacagctctggcggcgcatcgtggttgccaagatcaagatgcaaggatcgctgcttgccgctcgtgccgtttcggaatccagttccttcgacctactcgcccgcagggtccgatccggcgatccggataatatggaggcacaggcggcgcgccgatactggcctgcactgatgggacctgattttcgccgagatcgaaaggggggcggcacgaatgctctgctcaactatggctatgcggtaatgcgcgcaacggtagctcgcgcggttgtggctgcaggattgcatccgaccgtcggtatccaccatgagcatcgcgggaacgcctttgcgctggccgacgatctgatcgaaccgttccggccgttggtcgatgctttggtaatgtccatgattggtcagggtgcggaagcgttggacccgccgctgaagcgccgctttgccaaactgatcgcgttcgatgtgcgcatggctggcgtaacttctcccgtatctgtggcggcgcagcggcttgcccagtcgttggcgcacagcttcgagacaggggttgccaccctgatgctctttgacccgccgacatcagcggactggacgacactttctagaacgctcgccgatattgaataggaatgccccatgggtcacacctgagtggttaccggctgatgtggatattcgtcatgtttgatctaccggtaggctcagcgaaacaatctcgggaggcaaccaaattccgcgaattcctgctcgatcagggttttgagatgagccaattttcggtctatacacgtttttgtaacggggttgatagttacgagacccatttgaagcggatcgagcgccacctcccggaaaagggggacgtgcacgtcctaaccttcaccgacaaacaatatgaaaacatcgtcagattttcgggccagcgccgcaagcggcagacaaaaaacccgcatcaactagccctattttgatctttaacgcagttcccgctagccctgacgtggcattttaccgttctaaaataataacttgtacccacatcaggtctagcagttcagaaatcgcaggccaaccgcaactgctgtgtcggctgtgtcggggtggggcaaggtctagcagttcagaaatcgcaggccaaccgcaactccgaagcgcatcgccaagcacggcggtcaggtctagcagttcagaaatcgcaggcaaaccgcaacgtggcaatgggcggggtggcgagggatgcggggtctagcagttcagaaatcgcaggccaaccgcaactcccgcctgatcagcgaggaaagggtttgagtctagcagttcagaaatcgcaggccaaccgtcgagatacggacagggatgcctgttgaatttctcgtgccaccttggctcatgcgacaatgttcaaggattcggcgatcggcctccgtcgctgcaaaccggctccgtaatcgggaagcaaagcagatcccgacatactctggcagcagatcttagccgaacgtgtagcgctgcgactgcctccccaaataacggctatatagtggacgagacccaaaacccgacagtcccctctcggcccagattctgacctagcaatcc

SEQ ID NO: 3504 - DNA, 14777 bp, synthetic construct
  source 1..14777: mol_type = other DNA
  misc_feature 1..14777: note = Synthetic
gatgaccggaccatcgccaactcacagggcaactttccgataggatcataatcccgtaacaatatttcacgattcgcggtacatatgcgaagttaagcccgcgcaatcctatttccgtcccggcgccattgcggacttggttttggccttgtccgctactaagtttgtgcaaatgacgaaaaaagagattgaagaacgcaagttccgcccggcccgcgaagaggccgatgatgccgcaaaacagaccggcaccccccagacccgcagtgaagcctataagctggcctttcaggacgccgaattcctgctgcgcgaggatttgcgccccgtccgcttccagctggaactgctcaagccccaattgctgatggatgaagcgaagatcgaatcgaccttcgtcttctacggctccgcccgcatcccccagcccgaacaggtgcaggcgcggatcgacgccgccaccaccccgcaacagaagcgcatcgccgaaaatctgggcaagaaggcggtctattatgaagaagcccgcaaactcgcccgcatcgccgcgcaatatccggtgaacgaagcgggttgccgccacttcgtcgtctgctcgggcggcggcccctcgatcatggaagccgccaatcgcggcgcgcaggatgtcggccagaccaccattggcatgaacatcgtcctgccgcacgagcaggcgcccaaccgcttcgtcaccccggagctgagtttccagttccactatttcgcgctgcgcaagatgcacttcctgctgcgcgcccgcgctctggccgtcttccccggcggcttcggcacgttcgatgaaatgttcgaactgctgaccctgatccagaccggcaagatgaagccgatcccgatcctgctgttcggcaaggatttctggaaccgggtggtcgatttcgaggcgctggccgacgaaggcgtgatcgcgccgagcgacctcaatctgctgacatgggtcgaaagcgccgaagacgcctgggctgcggtgcagaccttctatcaggacagcgaagcaccggcctgcggctgacccccctctcccctcgggggagagggcagcgagacttggcggctttgccgcctggtcgcagccggagagggggcgggccacgcgccttccctgcctcctcttccgccttgccctaccggccatcccggattagggcgcggccatgcgcgcggatatggcccatatcgatagctggatcttcgatctggacaatacgctctatccggcgaaggcggatctgttcgcgctgatcgacgtcaagatgggcgaatatattcagggcctgctgggctgcgatccggtgatcgcccgccagacccagaagcgctatttcatggagcatggcacgaccctgtcggggctgatgcaccatcatgggatcgagccgcgcgaatttctcgactatgtccatgacatttcgatggagcggctgacggtcgacgccgatctcaacgcccgcatcgccgcgctgccgggccgccgcctgatcttcaccaacggcgacgccgcctatgccggccgcgtgctcgacaagctcggcctgatcggcgcgttcgagctgatccacgacatccacgcctgccaatatgtgcccaagcccgacccgtcgggctatgaccaactgtgccgcgtccatgccatcgatccgacccgcgccgcctttttcgaggatatggcccgcaatctgcgcccggccaaggcgatcggcatgacgaccatatgggtcaacaacggctccgaagcgggcgaccatgaccatcatcccgatttcatcgatttcgaaaccgaccatctgacgccatttctggccgacatcattggggactgaaccatgagcaccgacctgatcaccaccatcgacgccgcgtgggaagaccgcgccaacgtcaatctccagacccagggcgacgtgcgttcggccgtcaatcaggcgctcgccctgctcgacaagggcgagttgcgcgtcgcgcagccgaccgaaaacggctggcaggtcaatcagtgggcgaagaaggccgtgctgctctccttccgcctcaacgacaacgccatgatcgacaatgggccgggcgcaggccattggtgggacaaggtgcccagcaagttcgccggctgggacgaggccgccttccgcgccgccggtttccgcgccgtgccgggcagcttcgcccgcgcgggcagccatatcgcgaagaatgtcatcctgatgcccagcttcgtcaacatcggcgcgttcgtcgatgaaggcacgatggtcgatacctgggtcacggtcggcagttgcgcccagatcggcaagaatgtccatctgtcgggcggcgtcggcattggcggcgtgctggagccgcttcaggccgacccggtcatcatcgaggatgactgcttcatcggcgcccgctccgaagtggtcgaaggcgtgcgcatcggcaaaggctctgtgctgtcgatgggcgtgttcatcggcatgtcgaccaagatcgtggaccgcgcgacgggcgaagtcttcatcggcgaagtgccgccttattcggtcgtcgtccccggctcgctgcccggcaagccgctgcccgacggcacgcccggccccagcctctattgcgccgtgatcgtcaagcgcgtcgacgcccagacccggtccaagaccggcatcaacgaactgctgcgcgactgataatctacaaagccccaccccgccgcgacttggccgcgctacgcgccgccaagtcgcggctccccttccctgaacgagggggccttcgacccggtcttgatatcctcgaccgccgtccgcttacgccacttcatcaccgtcttggggttgatcccggttctcggctcagcgtcgcgagcgacgcttgctatctctgtcttgctgctctgacggcgtgcgtggtcgcgcccctcccgtgacgtacctgtccttccactgctgcaaaagggtcacaccatcaaaccgtggaatcaaacaacctacacagcaagcggccaagtctgcgcaatctcagccagaagcacatgactctgccgaccctcaagggacaggagtagcatcccctcccccttggtgcagtcctgatccagatcatggacaagtcgccattccgaacatatcaggaacatatggcgcaactttccacccggcagaaactcgaaatcttggcagatgcggctaaatatgatgcttcctgcgcgtcgtcgggcacggcgaagcgggacagtcgcggggggaaggggatcgggtcgacggaagggatgggcatttgccacgcctatgcgcccgatggccgctgcatatcgctgctgaagatattgctgaccaacagctgcatcttcgactgccattattgcatcaaccgtcggtcgagcgatgtgcgccgcgcgcgcttcaccgcgcaggaggtggtcgacctcaccctcaatttctaccgccgcaactatatcgaggggctgttcctctcctccggcatcatccgctcgtccgactatacgatggaacagatggtcgaggtcgcccggtcgctgcggcaggaccatgattttcgcggctatatccacctcaagaccatccccgatgccgacccggaactgctgcggctggccggactgcatgccgaccggctgtcgatcaatgtcgaactgccgaccgaaagcggcctcaagcggctggcgccggagaaggatggcgggcggatcgagggcgcgatgcggcatctgcgcgccgagatggaggacgggcaggacgcaaggcgcaaatataggagcgcgccgcgcttcgccccggccggccagtcgacgcagatgatcgtgggcgcggacgcggccgacgaccgggcgatcatcgcgcgggccagcagcctctatgaccggcaccggctgcggcgcgtctattacagcgccttttcccccatcccctcgcccagcgcggtgctgccgttgaagcgcccgccgctgatgcgggagcatcgcctctaccagtcggactggatgatgcgcttctatggctatgaggctggggagattgcggcggcgaccgatcaggcgacgggatgcctgccgctggatatcgatcccaagctggcctgggcgctcaaccatcgggcgatctttccggtggacgtcaaccgcgccccgcgcgaggcgctgttgcgggtgccgggactgggggtgaaggcggtcgaccgcatcctgatgagccgccgtcagggccggttacggctggaggatgtcgcacggctgaccacctctatccgcaaattgcggcccttcctgatcgcggccgactggcgcccgctggcgatgaccgaccgggcggacttgcgcgcgcgactggccccgccggcaaaacagctcgatctcttcgcataagcgccatttttgggttgatccgtgggagcgatcgtgaaatcgtggcttcccggtcacatagggagtttcgggttttggcgacggcactgggcagcaggacgcaaccgcgcaagagctttgccaagcggatcagcagccatcttgccgccgcgctcgtcgtcttctgcctgctccagatcggcatcgtcgccaagatgggcggatcgctggtcttgcatctgggcatcatcatcgcgatcggcggctatgccgtggccgcgcgcgggctggaacgccgctggcacatgctggaacagggtggcctgtcggacggcggcatggcgctgcgcttccgccgcgacgtggtgcagctctggggcgccagcctggtcggcgcgctgctgtgggtgccggtggcgatcatctaccgcttcctgttcggctaaaccctcttcggcgcgcgcgccggacccaattccattttgccacgttgtccttcctcgaacgaggaggttcccccatggccaatgcaacgattttcgaccgtctgaagcaggatcacgacgcccaccgccaattgttcgccaagatggcggaagccgaccgggaaaaggacgaggcccggctggaaaagctgttcgagcagttcaaggtggaggtgagcgcccatgccgccgccgaggaagagacgctctatgccaccatgctgtcccgcccggacctgcgcgaggatgcgcagcacagtgtgtcagagcacaaggaaatcgacgattatctggaagagttgagcgaattgaagttcaacggcgaagcctggcgccgcgagttcgacaagatgaagaagcgctacctccaccatatcgaggaggaagaggaagagatgttccccgacgcggccaaggatctgagcgcggcggaagaggaaaagctgggcaagctgttcgccaagcgcaagccggcggaactggagcgagcgaaggcggaaagctgaacgcagtcgccgttcgtttcgagcatagtcgagacacgctggcgctgctccaaccgcttctcgacttcgctcgaagcgaacggggcctgagataatgcatcgcgtttcgttaagcgcgccggacgatttcgacggctggcgcgcggcggcgcggcggctggctgtcgcgggcgtcgatccggcggatgtggtctggcaggtgggcgatgcgccgggcgacctgttcggccatgatcctttgccgcctgaaccggagcgggctgcgttctccgtgccgcgcgccttcgtcgatctggcccagacggcgatcctgcatcgagatccggagcgcttcgccttgctctatgcgctgctccaccggctgcgcgatcgccccggactgatggaggaccgggccgatccgctgctgcgccggatcgatgcgctgggcaaggcggtgcggcgcgatatccacaagatgcgcgccttcgtgcgcttccgcgaggtggcggagggagatgacacccgcttcgtcgcctggttcgagccggagcatcatatcgtgcgggacaatgccggtttctttgtccgccgcttcgcgtcgatgcgctggtcgatcctgacgccggacctcagcatccattgggacggcgcaacgctgaacgaagggccaggcgcgcagcgatccgacgcgcccgatggcgatccggtcgaggcgctgtggaagggctattatgccgccatcttcaaccccgcccggctgaagaccggggcgatgctgtccgaaatgccgaagaaatattggcgcaacctgcccgaagcggcgctgatccccgacctgatcgccggggcgcaggcgcgcgaggcggcgatgatcgctacgacctcggtcgcgccccggcggccggatgatattgccaccgcatgggcggccctgcgcgaaggcgccatgggctgcacccgctgcccgctgcatgggccagcaacgcagaccatattcggcgaagggccgttggacgcgccgatcctcttcatcggcgagcagccgggcgatcaggaggatctggccgggcgcccctttgtcggtccggccgggcaattgttcgacacggcactggtgcaggccggggtcgaccggtcgcgcgcctatgtcaccaatgcggtcaaacatttcaaattcgaacggcagggcaagcgccggctgcaccagtcccccgatgcgggcgagatagaggcctgccgctggtggctgagtcaggagatcgcccttgtccgcccgcgtctgatcgtcgcgctgggcgccagtgcggcgcgggcgatgctgggcaaggcggtgacgatcggagcgacgcgcggcatgccgatcccgctggccgacggcgcggaaggctgggtcacggtgcatcccagctatttgctgcgcctgcccgatgcggcccggcgggcggaagagcatgcgcgcttcgtggcggagttgcggatggtgggcgagcgactgacggcgctggcctgaccgctatttccgcagcaaaaacaccgcatgttcggcgaacagattggcgttcgcatgggtggtttccttgtcgcccttcaggaaccactggccgtcgatcgtccagccccgttccttcaccagcgcgcggaaatcgtccacagtcacatgatggatgttgagcgtgtcataccaggtgtcgggcaacagccgcgtcaccggcatccggccgccccacatcagcgacagccgcccgcgccaatgggcgaaattggggaaggagacgaaggcctgccgcccgatccgcagcaattcctccaccaccttgtcggggcgacgggtggtctgaagcgtctggctcaatatcgcatagtcgaaactggcgtcgggatagtaggtcaggtcggtgtcggcatcgccctgcaccaccgacaggccacgccccaccgccgccgcgacgttcgacccgtcaagctccagaccgcgcgcatcgacctgactgctgtcgcgcatggccgccatcagcgcgccgtcgccgcagccgacatccagcacgcgcgcgccctgccgcacggtgcgcgcgatcaaagcgaggtcggggcgcaacgtctcgctcatgcccggccaccgcgcaggaagccgtcaaccacccggttcaattccgggcattccagcaggaaggcgtcatggccgaaggggctggacagttcgacgaagctggcctgcgcgcccgatgcgttgagcgcatggacgatgatccgcgattccgccgtgggatagagccagtcagtatcgaagctgaccagacagaagcgcgcgctggtggcggtgaacgccttggccagcgatccgccatgatcctccgcaatgtcataatagtccatcgcgcgggtgatgtagagataggagttggcgtcgaaccgctcgacgaagctcagcccctgatggcgcagatagctctccacctggaaatccgcgtcgaagccgaaggtcttggcgtcgcgcccctgcaagcgtcgcccgaacttttcggtcagacccgcttcggaaaggtaagtgatgtgcgccgccatccgcgcgacggccagccccgccatcggcgcctgcccatcggcataatagtccccgccgcgccagtggggatcggccatgatcgcctgccgccccacttcgtggaaggcgatattctgcgcgctgtggcgggcggtcgatgcaatgacgacgcagctttcgacgcgatcggggaacaaagtgggccaagtcagcgcctgcatcccgcccatcgatcccccgatgacggccgacaggcgatcgacgcccagatgatcaagcagcagcgcctgcgcccgcaccatatcggcaatggtcagcaccgggaagcgcatcgcatgcggatcgccggtgacgggatcgaggctggcgggaccggacgaccccatgcaactgccgatgacattggaacagacgataaaatggcgcgccggatcgaccggcttgccttcgcccaccagccgccaccaccaacccggcttgccggtaacgggatggtccgacgccacatattggtcgccggtcagcgcatgacagatcaggatgacgttggatttgtccgcattcatccgcccataggtttcataggcgatgtcgaccgggccaagctgcgcgccgctcgacaggcgcaggggaccggccaggcgggcctgccgacgcaggccgaagcggttgtcttcgctgatggggacgctggccatagtcgagcggggctaggaccgggacggggcgctgtcaatctggcacagtggcggcgcaatccccagatgggccggatgaccgaaaacccactccccccgatcgtcgcctatggcccgcttaacccctatctgacgcaggaactggaacgccgcttcaccgtgcatgccgtggcggccgacgccgacctgtccgccctgcccgccgatgtgcgggcggcccgcgcgctcgtcagcttcgggtcggtcggcgcgtctgccgcgatcatggacgcgctgccgaagctggagatgatcggcctgttttcggtcggctatgacaaggtcgatgtcgaccatgcccgcgcaaagggcataagcgtcaccaacacgcccgatgtgctgaccgacgatgtcgccgaccttgccgtcggcctgctctatgctacggtgcgcaatatcgccgccaacgaccggatggtgcgcgcgggcgagtgggcgcggggcgtgaagcccgctctgtccggtcgggtgacgggatcgcgcatcggcatattggggctgggtcgcatcggccgcgccatcgcgaagcggctggagccggtggcgggcgaaatcctctatcacaaccggcgcgaggcggcggatgcgccgtaccgctatgtcgccgacccgatcaccttcgcccggcagagcgatgccatcatcgtcgcgacatcgggcgggccggaagcggcgaagcttgtcgatgcggcgatgctcgacgcgctggggccggatggcgtgatcgtcaatatcagccggggccgggtgatcgacgaggaggcgctggtcgcggcgctggcggacagacgcatcgccggcgcgggcctcgacgtattcgtcaacgaaccgcatgtgccggaggctctgttcgcgatggagcatgtcgtgctgcaaccccatcagggcagcgccaccatccacagccgcaaggcgatggccgatctggtcctcgccaatctggatgcgcatttcgccggcgagccgctgctgacgccggtggtgtgaaacagaaaaggcgaggccgtagcctcgcccttatttggtgcagtcaaactgcttgttaacagttggccctgcggtctctgaaaacaaaagatcatccagatcgattgcaatgtcaattgcaattctcttcttttcggccagcttgatagaaagacaatcacagagacaggccaaacacaacacctagcgcatgtcatgcagtaatggcgacgtagagcagcatcggagggatgacaagattacaatggttgttatgcgctaggtagcgattgacaaagatacgataccgcaacaacctgacgccaacgcgctcgtttgcgcgaccgatggaccagaggcgatgcggcttcgcagcgacatcgcctccttatgtttgggggaagtcagtggcgcgcagactgggactggatattggcaccaccagcattggatggtgcctgatcgaagacaatatcaggatcatcgccaccggcgttcggatattcagcgatggacgcgatcccaagaccggtgcatcgctggcggtggatcgccgcaacgcgcgcgccatgcggcggcgtcgcgaccgctatctggggcggcgctcggcatttctggacaaactgatccaatatggactgatgcccgccaacgcggatgaagccaggctggtggccgaacgcgacccctatgccctgcgcgccgcggcactgacccagatgctgaccccttatgagatcggccgcgccctgtttcacctcaaccagcgacgcggcttcctgtccaaccgcaaggcggaacggcggcagaaggacagcgaggacggcaagatcgcgagcggcgccaaggcgctgcgtcaggcgatgacagacgcgggtagcgatacgctgggccagtttctggccgggcgatcggaaaagcgggtacggctgaacggagaatcgcaaggctatgatttctatccgcaacgtcgacatatcgatcatgaattcggccgcatctgggaagagcaggcgcggcatcatccgcacctgctgacgtcggaggcgcgcgccgcgctgcaccgcatcctgttcttccagcggccgttgaaggcgccggtcgtaggcctgtgcctgttcgccgggcgcggcggcgtgccgcgcgacgaaccgcggctgcacaaggcgcatcccctgtttcaggagcgacgcctctatgaagaggtcaaccagcttgagatcacgacgccgggcgaggccccgcgcaagctgacgatcgaacagcgcgactggctgatcctggaattgcggagcaagcgcaaggtcagctttacgtccctcgcgaagcgactgaagctgcaacccggcgagagcttcaacaaggcgagcgagacgcggaccgatctggcagggaacgaagtctatgccgtcctctccgacaagaagcggttcggcgatgactgggcgcatctgtcggccgagcgtcaatgggagattatcgaccatctgatcgaggaggaaaatcccgatacgctccacaccttcttgaccggggaatgcggactggacgaagaacgggcgctggccaccgccaaaacaccgctgcccgaaggctatggccgccttggcgaaactgcgacgcggcgcatcctggacgaattgcgcaaggatgtcgtcacctatgcgaaggcggtggagaatgccggctggcatcatagcgacgaccggacgggcgaggtgctggcgcaactaccctattatggcgaaatattatcgcgcgacattccgccgggcagcttcgacccggcggatgaggatcagcccgaactttattggggcaagatcaccaacccgaccgtccatatcggcctgcgccagctgcaaaagctgatcaatgcgatcatcgccatccatggtcgccccgacgagatcgtcgtcgaactggcgcgcgaactgaagctgaacgaaaaagacaaggaagagcataatcgccgcatccgcaaggataccgctgccgccatcgcgcgcggccagaagctggagcaggaaggctttatcgataatggcgctaatcgcgcgctgctgaaattatgggaggagctcaatcccggcaatcccctggatcgtcgttgcccctattgcgcggaaccgatcgggatgcgggcgctcttctccggcgaggctgacatcgaccatatcatcccctattcccgatcgctggacgacagcgcaggcaacaagatcgtcgcgcaccgccattgcaatcggaccaagggcaaccgcaccccctatgaaaaatggggacatgatgaagaaagctgggacaagattgccgaacaggtcgcgcgcctgcatcgatccaaacaatggcggttcgggcccgatgcgatgcagagggtcgagaaggatggcggctttctggcccggcaactgaccgacacccaatatctgtcacggctggcgggcaaatatctgcgcactctatattcgacggaggaaggtagccgcgtctatgtcatccccggccgaatgaccgcgatgctgcggcggaaatggggtctgaacagcctgttgcccgaccataattatgtcgaaaatgcccagtctaacgcgcccaagaaccggctggatcaccggcatcacaccatcgatgccgccgtggttgccgtgaccacccgatccctgttgcaggaaatcgcccatgcggccggccgggccaaggacagggatctggaccggctgttcgaggatattccgcagccatgggtaaattttcgcgaggagctgggcgaagcgctgcgcactgtcaccaccagccacaaggcggatcatgggcgcaagtccgcaccatcgcggcatcatgatgtcacgtcggggcggctgcataatgataccgcctatggcttgaccggcgatatcgcgcccgacggcaagacgccgatcgtcgtccatcgcatcccgatcaccagcctgaagccgggcgatttcaccagtcccgatcgcatcccagacgtcaccctgcgcgatgcactgtaccgggcgacgcgcgacctgtccggcaagccattcgaagcggcgctggcacaattcagcaagacggatggtcccttcaaggggctacgccgcatccgcatacgcgaaccgctgaacgtcattccgatccgcgacgcaagcggccgcgcctacaaggcgtataaaggcgacgcgaatgcgcgatgggaattgtggcggctgcccaatggcgacatcaagacccgcgtggtgacgatgttcgaagcgcaccggccgggacaggatccccgtccccacccggccgccaaacgcatcctgaacctgcgccagaatgatctgatcgcggtggagcgcaatggcggaccgcgggagatattgcgggttgcaggcttcaatgtcgcgggtcgactgacactggcagcagtcaacgaggcagggaatctgaaagaacgggacgggctgtcgcaggatcgggacccgttcaaatatgtttatcttcaggggcgcagcgtggtgaaggcaaaggcccggcaggtccgtatcgatccgctcggccgactgctcgaccccggtccgcgcattcgcgactgacgcgcgatggagcggatcgtcgatatcgcgaccgacgggcgccatctttcgctctatcgcggcttcctgatcgtggaggcggaccgtgaagaggtgggccggatcgcgctcgatgatatccatgccgtgatcgtgcacgcccatggcacgacatggagcgccaatctggtcgccgcgctggccgagcgcggggcgccggtcgtcttttgcggcacgaaccatgccccggtcgcggtgacgctgcctatcgaggggcatcatgcgcaaaatgcccggatgcgcgcgcaatggaatgcctccaagcctctggcgaagcaattatggcgacggatcatatcagcaaagatcgccatgcagggtgctcttctggcagcgcgtggcgtaaacggcgccgatgcattcgcgctgatcgcgcgacgcgtgaaatcgggcgatacggacaatctggaggcgcaggcagcgcgccgatactggcccttgctgatggggccggactttcgccgggatcgcgacaatccgggtgccaatgccctgctcaactatggctatgcaatcatgcgatcgaccgttgcgcgcgccgtggtcgccgcagggctgcaccccacgatcggcatcaaccatgccaatcgtggcaatgcctttgccctggcagacgatcttatcgaaccgttccgccctttggtcgacgcgctcgtcattgccatggtggatcaggggatggataggctcgatccatcactcaagcgccgttttgcccggctgattgcattcgacctgcgcgtcggcgatgagatgtcgccggtttcgatcgtcgccgtgcgactggcgcagtccctcgcccgagccttcgagaacggacgcccatccctcaccctgttcgatccgccgacgccgatggaatggtccatcgtcgcgcgggtcgatgatcgggaatcaccggacatatgagggaacagctttttctgagcgggtatcgattgatgtggatcttcgtgatgttcgatttgccggtagggacgaagaaacagatgcgcgacgccactaagtttcgcgaattcctgctcgacgaagggttcgaaatgagtcagttttccgtgtacgcccgcttttgtaacgggaaggaaagcttcgatgcccatctggcgcgaatcgagcgcaatctgccggagaaaggcgatgtgcacatcctcaccttcaccgatcggcagtatgaaaatatcgtgcgcttctccagccaacgccgaaagcgcccccgcaaaaaccccgatcagcttgcgatgttctgattcgatgaacgattttagcgaaaccagatgtgtcgattatcccttttatatcaggaaattaacaacacatctggtttagcatttcagagaccgaggaccaaccgcaacgaaggcgttggcgcggcgcaaaaagattctggtttagcatttcagagaccgaggaccaaccgcaacgtggtcgataatcaggcccgaaggcagtttggtttagcatttcagaccgatcagggcagccagtttaccagcaacgccttcactggtgtgctgcgcgcggccgagatcaagatcagtatggatggccgggggcgctggat

SEQ ID NO: 3505 - DNA, 14291 bp, synthetic construct
  misc_feature 1..14291: note = Synthetic
  source 1..14291: mol_type = other DNA
ccatcaacggtctctacaaggccgagatcatccatcgccgcggcccttggcgcagcttcgaggccgtcgaatacgcgacgctcgaatggggcgaccggttcaacaatcgccgcctcctcgagcctatcgggaatatcccgcccgcagaggcagaggccaacttctacgcagatccggaaactgaggacatggccgcgtaactaacgaaaatcagcctccggaaaaaccggcgcggttcaaacaatgggtcctgagcctaggtcaggacgcccagagcgaagtccttcgtcgtcaattcaccatcgggagagccacgggttgatgatggcgggaaccggaaacgcgcgcaaccgtgagccgcccgaaaacgcgggccaataagcactgtattgtttttctggtgcggtgctgatgtggcgttgatgctgggcgagcaagcgccgtcaatggacccactcatgtacgcgattgggtcggctattccccaactgaccgcaacatcaaacgcctttccaatcgcgcagaaaccaggccaccgccccccaaaacaagaaggcagggccgtagccctgcccttatttggtgcagtcaagctgcttgttaacagccagcccgcggtttctgaaacttgataatgcaatctgcaaagccaagagtcaattgccataaaggcggcgcggtgcaaagatcaggcagaggtattgcagatgatttcgagagccagtgcagaggcgtattcacgacaaccccatctgacgcgctgcgtcaggcagagtcgctctgcccgacgcaacggttcagaaactgcggaccgggcgcaactgaacatcactgttttcccgcttcatcacaaagcgtccgaaaacgccggttcgacgcacaatcgggtttggacgccgactgctcccacgaaacatggctgtcacgggaaagcccccgtcatgccgttcgcatcaggggtggacctgaggcttgcggcaaccgctcgtggggaaatcacctcgccaccacgacccggcaatttgaataatgatcttcagacgacgcatttcggaggcttgctttcatgaccagaactctcggcattgatcttggaaccagcagccttggctgggcgctcatcgacgacacgcagatcatcgacctcggcgttgtcatcttcagcgctgcggcgagcgcggggcgtgatccgcaatcgggcgcccctctggcggaagggcgccgcgaggcacgggcggcacggcgcaggcgtgatcgtttcatcgggcgacgcgcggcccttctgggcaagttgatcgcgcttggccttctgcctggcgatccaccccaaggcaccacggaacggcgcagcaagacggcggtgcccaacgagcagacccgcgggcttgaggggctcgatccctacgacttgcggcggcgcgccctgaacgaggcgctgacaccgcacgaaatcggccgggtgctgtttcacctgaacacgcggcgggggttcaagtcgaaccgcaaggcagagcgcacacgcaaggatgcccaagacggcaagatcgcaagtggcggcaaggcgcttgatgcggcgcttgacgggcgcacgctggggcagtttctggccgaacgtctggacgccgggctgccggcccgtgtgcggatggatggcgaaaaccaagcgtatgacttctacccacagcgcagccaccttgagcaggagtttgatgcgatctgggcagcacaggccccccatcatcccgccttgctgaccgatgccgcacgagaggcgctgcatcgcatcctgttcttccagcgtccattgaaagaacaggaggtcggattctgcacctttgccggggtgaaggacattcctgcggacgaacgtcgcctgcccaaggcgcacccgttgtttcaggaacggcggctctacgaggaggtgaaccaactacgcatcgtgtcggcgggggccgcgggacgggagctgacccgcgacgagcgcgaccggctgatcctgaagctgcgcgacaagaagaaggtcagctttgccagtttggcaaagacgctgaaactggccgagggcgagcgcttcaacaaggaaagcgaaaaccgcaaggatctgacgggcgatgaggtgcgcgccgaaatgtccgacaagaagaggttcggcaatcgctgggcgcatttcccgctcgaggtgcaattgcgtattctcgaccggcttcaaaacgaggaagacgccgaaacgctgctgtcctggttgagggcggaattcgggctggacgaggccgccgccgttgccgtggccagggccaacctgcccgagggccacggccgctttggcgaaaccgcgacccgcgcgctgatcgcggcgctcaaggccgaggtcatcacctatgacaaggcggcactggccgcaggctttcaccacagcgaccaccgcacgggcgaggtgttcgacaccctgccctattacggccagatcctggcccgcgagattgcgcccggcaaggcggaatatggcgatccgcttgagcggcaatatggcaagatcaccaacccgacggtccatatcgggcttcggcagttgcagaagctggtgaatgcggtgatcgcgcgccatggccgccctgaccgtatcgtcatcgaactcgcgcgcgatctgaagctcaatgacaaacagaaggcagaacacctgcgccgcatccgccgcgacaccgaggccgcgcaacaggccagcaaggatctgatcgaagctggccgcccggataccggcgcgaaccgcgccctgctcaagcagtggaaggaactgaacccgggcaacgcgctcgatcgccgctgcccctattgcggcgaaaagatcggcatggaacagatcttcaacggtctggccgatgtcgatcacatcatcccctattcacgctcgcttgatgacagcgcggcgaacaaggtgctgtcgcatcgccattgcaaccggcaaaagggcaacaagacgccctatgaacgttggggccatgaccccgatcgttggccgatcatttcagagcaggtcgcgcggatgcaccgctcgaagcagtggcgcttcggccccgaggcgatggcgcggatcgagagcgacggcggcttcgcggcccggcaactgaccgatacgcaatatcttgcgcggatcgcgggcaagtatctgcgcgccctctaccccagctccgaagagggccgcgtggatgtcattcccggccggatgaccgccatgctgcgccgggtctgggggctcaacagcctgttgccggaccataattttgtcgagaacgcgcattcgaacgcgcccaagaaccgtctcgaccatcgccaccacacgatcgacgccgccgtggccgccgtcacctcgctgtccctgatgcagaagatcgccactgcggcggcgcgtgccgaggcgcaggagcttgaacgcatgtttgacgatctcgaacagccctggcccggtttccgggaagagctgcgagagcgggtcttgcgcatcactgcgatgcacaaacccgatcacggccggaagaaagcgccctcgcggcaccgggacgtgacggcgggcaagctgcacaacgacacggcctatgggctgacgggggccgtcgccgcagacggcaagaccccgatcgtggtgcaccgcatcgcgctctccgccctgaagcccgcgcagatcgagaaccccgattgcatcgccgacccggccttgcgcaaggcgctgcgcgtggcgaccagcggaaagaccggcgcggcctacatgcaggccctcgtccggttttccaaagagcatcctgttttcaagggcatccgccacctgcgcatccgcgagccgctcaatgtcatcccgatccgggatcggtccggcaagacctacaaggcctacaagggcgatgcgaatgcccgctacgatatctggcgtttgccggacggcaaatggaaggccgacgtcgtgccgatgttcgaggcacatgcccacgacacgggggatcgccgcccacatccggcagcgaaaaaggtgctttccttgcggcaaggcgatgtgatcgcggcggagcggaccgagggcgcagtcgaatttctgctgatcaaagggttcaaccagaatgctcgcctcacattggtcccgccgaatgaggctggcaaacttcaggagcgagatcgcacggaaacagacgaattcaagtacatttacctttcaccgggctccctgaaaaaggcccgcgcccgacaggtgcgcgttgacccgctggggcgcatctttgaccccggcccgcgcgacgcaggataagccgatggagcggatcgtcgatatcgccaccgacgggctgcatctttcgctgtatcgaggctttctgatcgtcgaaaaggaccatgccgaagtcggccgtgtcgcgctggatgacatccacgcactgatcgtccatgcgcacggggtgacctggaccggcaacatcgtcgcggctctggccgagcgaggggcgccgatcgtgttttgcaattcgtcccatgcgcctgtggcggtgacgctgccgttgcaggggcatcatgcgcaaaacgcccggatgcaggcccagatcagcgcctccgcgcccctgacgaagcagatctggcgacggatcgtggccgccaagatccgcatgcaaggcgcgcttcttgccgctcgcggcatcgagggtgcggaagccttcaccttcatggcacgtcgggtcacctcgggcgacaaggagaacctcgaagctcaggccgcgcgtcgctactggccgatgctcatggggccagagttccgccgcaaccgcgatgcaggcgatgtcaacgcgctgctgaattacggctatgcggtcatgcgggccacatgcgcccgtgccgtcgttgctgccggcctgcatccaacgctcggggtgcagcattcaaatcgcggcaacgccttcgcgctggccgacgacctgatcgagccgtttcgcccgctcgtcgatgcgctggccgagcggatgatgtgcgcgggcatcaccgatctggagccggcgcagaagcgccgcttcgctcgcctcatcgcgttcgatctgcgcatcgctggggaaacctcgccggtgtcgatggcggcggcgcggctcgcgcaatctgtggccaaggctttcgaaaccggccgaccggatctgcttcttttcgatcctccgacggcgatcgaatggggggcgctggggcaccttgatgacgaaacgccatgacaaaagcgatgaaagacggggcctatctgaacgggtatcggctgatgtggattttcgtgatgttcgacctgccggtgggcagcaaggcagaaatgcgagacgcgacgcggtttcgcgaattcctgctcgatgaaggcttcgagatgagccagttctcgatctacgcccgcttctgcaacggcaaggacagctatgagtcgtatctgcgacggatcgagggtaatctgcccgagaaaggggaggttcatgtcctcacgttcaccgacaagcagtatgagggaatcgtacgattctccagccagcgcaggcgcaagcgccgggaaaacccggaccaacttgcgttgttctagctttgtccgcaggctttggccaaccggatgcgctgcttcttctttgtatttcagaagcttggcagcgcatccagcttagccattcagaaaccgcaggccaaccgcaaccatgctcgacatgcaagagcgcatgatcgaagcttagccattcagaaaccgcaggccaaccgcaacatcactgacggtgcgccagtcggtgaggggagcttagccattcagaaaccgcaggccaaccgcaacccgggattgcgcagccggaatggcgatttgagcttagccattcagaaaccgcaggccaaccgcaacgccatccacatgcgtgatgaggaacccgccagcttagccattcagaaaccgcaggccaaccgcaacaagagcctgccacgcgtcggcgatcatgcgagcttagccattcagaaaccgcaggccaaccgcaaccaagcgtccgataatccatcagtcgtcctcagcttagccattcagaaaccgcaggccaaccgcaaccgataatttcctttctgcttattgcgatgcagcttagccattcagaaaccgcaggccaaccgcaaccttgtcctttttcgcaaacggttccttctcagcttagccattcagaaaccgcaggccaaccgcaacatgcggatcggtaaaccatcccgtgtgatcagcttagccattcagaaaccgcaggccaaccgcaacgggccgtccatgctctaccacccaccagccagcttagccattcagaaaccgcaggccaaccgcaactgaaaccatgcgtgaggggcactgcgaaaaagcttagccattcagaaaccgcaggccaaccgcaacttgcgcaaccgcgttggcgacagtctcgttagcttagccattcagaaaccgcaggccaaccgcaacgggttgctgccgcgccatagggttacgtccagcttagccattcagaaaccgcaggccaaccgcaacgaacgcttgcagcttccacacttcgcccgcagcttagccattcagaaaccgcaggccaaccgcaaccacgggggtctcctttcagtttggccttatagcttagccattcagaaaccgcaggccaaccgcaacaagaatggcaagatcgtctccatcctcaccagcttagccattcagaaaccgcaggccaaccgcaacaccagcggggcgctgccatcgtgcgcatgtagcttagccattcagaaaccgcaggccaaccgcaacagcccagcggccaacagctcgtctcgttggagcttagccattcagaaaccgcaggccaaccgcaaccggcttggccatgtcaaaaaccccccttttagcttagccattcagaaaccgcaggccaaccgcaacgggtgcggcataacttccgcgtaggccgctagcttagccattcagaaaccgcaggccaaccgcaacgctcgcagtcaagctgcgggctgcggatgcagcttagccattcagaaaccgcaggccaaccgcaaccagcgtgttgttgatctggtcgtcgtcgagagcttagccattcagaaaccgcaggccaaccgcaacatggtctggaaatggtagtccacatcctcgagcttagccattcagaaaccgcaggccaaccgcaacggcccggcgatgcgcgaatgcctcgaatggagcttagccattcagaaaccgcaggccaaccgcaacaggcgatcatcggcgacattcccggcccgcagcttagccattcagaaaccgcaggccaaccgcaactggaacgaccgccgggtgtacatcaacttcagcttagccattcagaaaccgcaggccaaccgcaacgaatgaaaacaggatccacctccagactttagcttagccattcagaaaccgcaggccaaccgcaaccatatcgcggtcggtgtcgttgaccgtgagagcttagccattcagaaaccgcaggccaaccgcaacgaagatggacggcgcgcgtgccttcgccgtagcttagccattcagaaaccgcaggccaaccgcaaccatatcgcggtcggtgtcgttgaccgtgagagcttagccattcagaaaccgcaggccaaccgcaaccatatcgcggtcggtgtcgttgaccgtgagagcttagccattcagaaaccgcaggccaaccgcaacgaagatggacggcgcgcgtgccttcgccgtagcttagccattcagaaaccgcaggccaaccgcaacgtggacagcaaccacgacaacgcactcgagagcttagccattcagaaaccgcaggccaaccgcaacatggaccccgagaggctgcaccgggcagccagcttagccattcagaaaccgcaggccaaccgcaacctgggcgttgacttcgtcggtccacacataagcttagccattcagaaaccgcaggccaaccgcaaccgagaagctctgcgtccagtcgcgggtgtaagcttagccattcagaaaccgcaggccaaccgcaaccatcttccgaacgtcaactactggacctatagcttagccattcagaaaccgcaggccaaccgcaaccaggtgataggtcgagcccgagctgtccgtagcttagccattcagaaaccgcaggccaaccgcaacgatctgggccgggaagcaccgttgcaacccagcttagccattcagaaaccgcaggccaaccgcaactctcgtctggccacggaccatctgcaattgcagcttagccattcagaaaccgcaggccaaccgcaaccggcgatcaagcagcccgcaagcagtcatcagcttagccattcagaaaccgcaggccaaccgcaactagcgacgcgatatccctctcagaacagcgagcttagccattcagaaaccgcaggccaaccgcaacgattgacgcggttgcgtcatggaaagccgcagcttagccattcagaaaccgcaggccaaccgcaaccggcgatcaagcagcccgcaagcagtcatcagcttagccattcagaaaccgcaggccaaccgcaactagcgacgcgatatccctctcagaacagcgagcttagccattcagaaaccgcaggccaaccgcaacgattgacgcggttgcgtcatggaaagccgcagcttagccattcagaaaccgcaggccaaccgcaaccggcgatcaagcagcccgcaagcagtcatcagcttagccattcagaaaccgcaggccaaccgcaacttgtcatgggttaatggcgcgtggtctgatagcttagccattcagaaaccgcaggccaaccgcaactcctctccgcgctcaatcagcgcgttggcgagcttagccattcagaaaccgcaggccaaccgcaaccgcgcgcaccgcgtcccattcgcgcgcgccagcttagccattcagaaaccgcaggccaaccgcaacgtcacgatgcgcgtcaaggctgcgcagaagagcttagccattcagaaaccgcaggccaaccgcaacgggatcagcgcattgaccaaaagctggccgagcttagccattcagaaaccgcaggccaaccgcaactgtcatcggcccctcgtggccgcatctgccagcttagccattcagaaaccgcaggccaaccgcaacgcggcggctcttggcctttgccttcgccggagcctaggctctgcgcgctagattgcgcattttgcgggcaatacggccatgcagaatgcgggcatctgacttccatttgtgcaaagggcggaaatggacgtgtcatgtcgttttgggcgcgcccgcggctcctgccttcggatcatccgggcggacaggaggcggggatctgcccccctcgtgccccccccgcgcggtttgggggcgcgccaagatgtcggtgcggggctgctcgcatcgcagaggagggccaggaatgcgcatgccgacgcgtgtcgccgatacggttcgcatccgcacccgcggcgccgtcagggggcgttatcgcggcagggatactggccgtcctcttcttctctggccgcagaggcgtgtcaccggctgacctgcctccatccgttttcgcagcgcaaggaacgcaaacacgatgaagaaacttcttctcaccacggtgatcgcctccagcttcgggcttgccgcccaggccgaagtcgtggtcatgagctggggcggcgcctatggcgcggcccagaccgaagcccatgtcaaacccttcatcaaggaaaccggcatcgacgcgcggatgatcgacgccgacaaccccgcggcgccggtgaaggcgcagacggaatcgggcaatgtgtcgattgacgttgccctggtggaatatgccgacgccgtgcgtctgtgcgacgagggcctgttggaggagatcgaccccgcgatcctgccgccgggttcggatggcaccccggcgatggacgatttcctgcccggcgcggtgatggattgcggcgtgtcgaccgacctctgggacaatatcgtggcctatgacagcacccacttccccgacgaaaagcccagctcgatcgccgatttcttcgatctcgagaaattccccggcaagcgcggcatcaagaagaaccccaagaccgtgctcgaaatggcgctgatggccgatggcgtgcccgctgccgaggtctatgacgtgctgagcacgcccgagggcgtcgaccgcgcctttgccaagctcgacacgatcaaggatgaggcgatctggtgggaagccggtgcgcagccgccccagcttctggccgatggcgaggtggtgatgaccaccgcctataatggccggatcttcaacgccgccgtggaagagggcaagccgctggtcgtgatgtgggacggccaggtctacgaacacgagatgtatgtgatcccgaaaggcgcgccgcatctggaagacgcgctgaaatacatccagttcgccacctcgaccgaaggtctgcgcgcgcaggcgcaatatatctcctacggtccgacgcgccggtcgtcgaacgcgggcgagatcctgttcaaggacggcaagacggtgatgggcccgcacctgcccacctatccggcgaacatggaaaacgcgctcgagaccaatttcgagttctgggtcgacaatgacaccgagctgaacgagcgcttcaacgcctggctggtgaactgatcccgccattcgcggatcatgcgcgcggggaaggcgtctcttccccgcgcgtttttcatgccagcggcccgcccggaagggtcgcaacggaaaacggcgcgcccgcgggcgcgccgttcgcatgcggggatcagatgggcctcagagaatgaaatccgaggccgccagaccggtgaccccggccagatagacggtcatgtccgtggtgccgtccccgtcgatatcggccaccacataggcggctgccgcgccctggacatagccgatctcggtgctgccgctggcgctgaagctgccggtgccgatgaagctgctgccgaggaagatcgagaaatccagatgatcggtgccgcgggtgaaatcggtgacgatatcgcgcgcagcccccaggccgctgtcggcggcggtgtaatagacgaaggtatccgccccgtcgccgccggtgagcgtgtcggcgcccgcgccgccctcaagcgtgtcattgccgcccacgccgtagattacgtcgtcgccctcgtcgccgtagaccacgtcatcgcccacgcccgcatgcagcacgtcgttgccggcgccgcccgagatctcgtcgttgccgtagctgccgaagatcgtgtcgttgccggtatcgcccgagatcgtgtcgtgccagctgccgccgtcgatgtaatcgtcgcccgtgccgccgattagcatgtcatagccggcgccgccgtagatccggtcgtcgtcggctccgccgtcgatgacatcatttccggtgccgccgtcgatcgtgtcgttgccgttgtcgccgttgatcgtgtcggcgccgtcttcgccgtcgattgtgtcggcgccgtcggccccgcgcaggctgtcattgccagtgccgcccaacatggtgtcgtcgccgacctcgccgtccaggtaatcgtcgccgccgtcacccatcagcgtgtcgttgccggtgccgccaaagagcgtgtcgctgtcgtcgccgccgcgcaggctgtcgttgccggtgccgccatagagcgtgtcgagcccggcactgccgtagaggcggtcgttgccgtcgccgccgcccatgaagtcgttgccgtcgccgccgaccagcatgtcgttgccggcaaagccatagagcgtgtcgtcgccgacctcgccgtccaggtaatctgcgccgccgtcacccatcagcgtgtcgttgccggtgccgccaaagagcgtgtcgctgtcgtcgccgccgcgcaggctgtcgttgccggtgccgccatagagcgtgtcgagcccggcactgccgtagaggcggtcgttgccgtcgccgccgcccatgaagtcgttgccgtcgccgccgatcacgaagtcagcgcccgcatcgccaagaaccgtgtccgcgccgtcgccgccctccagcgtatcgttgccggccgcgccgtcgagaaggtcgtcgccggtgctgccgctgaggctgtcgttaccgtcatagccgtaaagcgtgttgttggcggcattgccgaggatggtatcggccaattcggtgccgcgcacgatctcgaagcccgagatgtaatcggtgtcgccaaatccgtcggtggcccggccggtggccaggttcaccaccacgcccgaggtggcgccgtaatgcacgtcgcggtcatagcgcaggatgtcgatcccggcgagacccgacaggaaatccgagccggccagacccgcgatgccgttcgcgccgccgtccccggccagcgtgtcgttatacatcgacccgcgaacccattcgagcgagaccagcgtgtcggtgttgcccgcgccatcggtcgcggtgccggcggccagatcgaccgaaacaccgccgccgtcgcgcacataggacacctggtccacaccggcgccgccgttgagcgtgtcgttgccggtgccgccgatcagataatcgtcgtcatccccgcccagcagcaggtcgttgccggccccgccgtccatgtcgtcttccccggcgccaccgtccagcgtgtcattgcccgacccgccttccagggagtcgtccccggtgccggcatccacgttgaccccgccgggatcggtgatgatcacccaatcgttctcggctgcggtgatgccggggaccgcggtcaggtcgatcgtctcgccggcggcaaagccgctgcccgaggccggcgcgtcatggctggtgatcgaggcgaaccacgcctggaattccgacaggttggtcagcgtgggcaggggatcgccgcccagctgggtcacgaacacgtcgccggtgtcctcgtcctcgatcaggagggcataggcgacattgccgctgccccaggtgaaggccgagatctgcacgctgatgtcgtggttctcgaaatcgaccggggttccgccgatgaagaccgaataggcgtcgggcgagatgatgacatcggtccaggccaggctgtcctcataggtggacatgtcgtagctgtagctgatgctggtggtgccatcgggcatcgccacagccatcgctccggtgctgaagctgttgaacgtctcggcatcggtgaccggatcgtaggaaacgttgatgtaatagccctggaagctgaaggtcgtcatggctttccctgtcgtattggggcggtccggccgcagtccgggcgcactggggaaagtgtaaaggccaagccgccgtcacgcatcccctaactggacgggggtgcggcataatgaacgaatattaacctgtgttaatctctcgccgggccggttgacctcgggggagcccgtctccggggggggcggggcccgaaatgcagcggctggcgaatcaccgcaggggacgcaagggcgccgccgcggcgctcagagcgcggcgcgcagggccgccaccacctgatcctgatcggcctcggtcagcccggaatagagcgggatgctgatcgcctgggcgtaatagctttcggcattcggaaagttgccgggggcaaagccgcgggcacgccagaagggctgggtgtggacggggatgtaatgcacattcaccccgatcccggcggcgcgcaattcggcaaagacccggccgcgatcggccacccggatcggatagaggtgataggccgacaggttgtcgggccgctggagcgggcgcaccagcgccatgccgtccagcacctggtcatagcgcgccgccagcgcgttgcgccgcgccacgaattcgtccagccggctcatctgcgacagccccagcgcggcctgcatctcggtcatgcggtaattgtagcccagcgtgaccatttgataataccagccgccgtcgctgggcccgtccatcaacgcgggatcgcgcgtcaccccgtgcgagcgcgccagctccatcgcctgcgccagtgcggggtcgttggtggtggcgagcccgccttcggccgtggtgatgatcttcaccgggtgaaaggaaaagacgcagatgtcggaatgcgcgcaatcgcccacgggccgcccggcatggcgcgccccgatcgcatgcgaggcatcctcgatcacgcggaagccatagcgccgcgccagcgcgccgatggcggccatgtcgcagctttggccggcgaaatgga

SEQ ID NO: 3506 - DNA, 14250 bp, synthetic construct
  misc_feature 1..14250: note = Synthetic
  source 1..14250: mol_type = other DNA
cagagattcgacctgcgcatcgcgctccaggcccttcgccatgtccgtcatgcggcccgtgagcctctgcgcgcccttgctgtcgccatcgcgctgcatgacctggcgcgcctgcccaagccgctgccagtcgctgacaaagcggtctgcgcgctgcgcaggatcgacgcggattttggcctcaagctgcatggcccggatcgcgccctggctgcggtcaccggcggcctctcgggcgagcgagggttggcgctgcaaggcgctggcaaggtcggctgtgccatggggccggatcgcgtcgagtgctttcccggccttctccagcgcgtcgcgctggtggggcaggacgggcaatccctgttcacgcatctgcccgatgtcagcggcggcgcgggcatagcgttcgaccgcccggcgctggtcggacagacccgcctgatcggtcggcagggcttcgagtttctgggcctgtgggcggaatccggcgaagatggacttcgcccgttccggcaactgccgcgcaatctccactattcgctcgcggaaagtgatgccgcgccgttcggcaaactgctgctcgggcttgtagtcgctcgccatatccttgccgcgctcgcggctgagcgtgcggaccagtttcgactgatctgcgaagtcgtcgcgcccatagtgcagggcaaggccgtcacggtggcgggacatcgccacataggcaccgtggctgtccatgcccggcgtcgccagcacatgggcgcggtcgaccgtcatgccctgcgccttgtggatcgtggcagcatagccgtgatcgatgtgcgcataatccttggtgttgaaagcgacgctgcgcccatcgtcggtgcgcacggccatgcgttgcggcatcacctgttcgacggtgccaagggtgccattcttgacgcccagaccccgctcattgcgcaggaacatgatgcggtcgccgctggcgaactgacgctcgccccgttcggcgcggactgccacgtcgttgcccaattcgccactggtgcgcagctttccgcgcgctgcctcattgagttcgcgcacctcgtcattggtgtgggtgaggatgatccgcgtatcaccgggactggcctgccggttgcgctcccaacgctcgatcagtgcgccgcgcgctgcctcccgcgtctcggcaacatgcaccatgccgcgttcgtcatagacctgaatggcaagaccagttcgcccggtggcaaggtgccgcgttgcggcctgctgccagtcttcgtgttggcgacgcacttcgctgatttcgaccccgccgtgccgttcatggatcgcgcggaaagccgctcccgcttcgatggcctggagctgctgcgggtcgccgaccagcaccactttcgcgcctgcatcggcggcatgggagaggacgcgctccatctggcgcgtgccgaccatgcccgcttcgtcgataaccagcacatcgcgcgaggtgagcaattcgcggccctgaccccattgatgttcaaggctggcgatggtgcgcgatgcgatgcctgaaccgtgctccagcccctcggcggcaatcccggacagcgccgcaccgcgaaccgtatagcccgcgctctcccaagtttcgcgcgctacgcccagcatcgcgctcttgccggtcccggcatagccgacaacgaggctcaggccccgcccatcggtcacatgctcgaatgctgcgcgctgctcaccggatagcaccagcccgcgctccgccgcgcgcgccagcgcgccttcccggccacgatcttcgacttgatgccgctcgcgctccgccagcaattccgaagcgcggccaagccgctgctcggtctcgatcatctgacgcgatgtgaaccgctcttcgcctcgtccatccttgcccagcgcaatcaggtcggatgatccacgaaccgcgttcaaggctgcatcgaactgctctttcccgtcgctgtgccggtgcacgaacatggcaaggtcgcggttggtgaacgtggcctggctgtgggtgatcgcgtcgagcgcgacagcgggattggcgatgatccgctcgccattacgctgcgcgacagcgcggtgctcttcgatccgttcggcctcaagcccgcgctcacccatgcgcgacgcggcggggccgatcttgtcttgcggctccagcgcaatgccctgcgcctccaggctgcggtgatcgatccgcgcatcgatatcgagttctgccaggcgctgattgacatgatcggcccagcgctcgcgccactgctccaccaactcagccttgttccagtcgcgcaccttcgcgccgaacccgtctttgccgacttcgcgcatggtgagcatgacatgcgcgtggggcttgggctggccgtccgcgccaatatcccaatggacattgaggtcggcgatcatgcctttttcgacgaactcggcctcggcaaactcccgcgccagctcgatgccctgttccttggtcagctcgcgcggaatggcgaactcgacctcgcgggcaagctgcgcgtccttgcgcttctcggcggcttcgaccgcgttccagagcttttcttgggtaccaaattcctccggcgcgccttccggcagcagcacttcggaatggatgacgccgtccttgttggtgaaatcatggtcgcggtcgaggcgttcgtcgtgcagccgctcggccccgcgataggccgctgccgccacggcgctgcgcccgctcgaccggctgatgactttgacggagaggtggaagatcgccatgacggcaatccatttacgccatgagcgccacgtcggcacgacgtataagcgcgccctcccatgataaaatcctgctcgggactatccagtatcaggccgtctcgacgactctacagcattgggagagcctcgatattatcatcagcgcatcacctctcaatggagaacttcgatgcgaaaaccccgcgactttgattcggaactgaaggcgctcgccgacaaggcgaagcaactcaaggaacgccgcgtgcagcaactcggcgaactggtgatcgccacaggggctgatgcgaccgatgcggaaacgctggccggtgcgctgctggttattgcggaaaccagcgaagcccagaggaaggaggcatggcgcaaacgcggcgttgcattctttcaaagcaaggcgcgcaagcgtggcgatggacctcaaagccagccggatggcgctctcccgcttgacggcggcgcggcatcggcttgaggcacgaaaggcgcgaaccgacatgcgcgaatggcaggtcaagcgccgcgaacgcacgcggcaactgatcgaactgggcggcctggttgtgaaggcaggactggtcgaactcgcggacgatgatcgcgccacgctttatggcgcgttcctcaccgttgccgccaagttgcgcggtgaggaacgcgagcaggcgctggtgctgtggaagcggaagggtaagcgggcgtttgaaatggaaacggaaatcgatccggtgggaccatcagagcggcgcgcgaaggcacagtgaatggacatgcgtgcgtcacgctgcaggtagaccgtgcgccatggtttaccggatcgccaaaacgccaaaccacgcttagcatttgcgtcggaatgcaaactggagcttgaacgaaacaagtacatttctgcacactgcggtcattgagcacttgctatctgggtcacatcacgacaccatgtcagaaatattcccagaggtatcatgactcccaacgaattttcagctctccgtgctcaagccggtgtcagcatcgaggacctgtcggcccggttgggatacagcacacgacagctctaccgctgggaggctggtcagggattaccgcgtgaagctgcgctcacgttcctgcgctcggtcgttgggaatccatctggcgaagcggcgcatacccggttcaatttcatcgatctgtttgcaggcatcggcggtttgcggaaaggcttcgacgcaatcggggggcactgcgtcttcacctccgaatacaacaagttttcgcaacagacttacacggccaatttccgcgacaatcatcccattttcggtgacatcacggagttgaaagacgcgcacgaagtgcccgatcatgatgtgctgctggcaggatttccatgccagccattttccatcgcgggcgtttctaagaaaaattcacttggtcgcagtcatggttttgcctgtgaagcacaaggcactctgtttttcgatgttgcgcgtatccttgatgcaaagcgccctgcagcgttcatgctcgaaaacgtcaaaaacctcacaagtcatgatcgtggacgcacgttcgaggtaatcttgaaaacgcttcgggacgaactcggctatcacgtctggtataaggtgatcgacgctgggcattttgtgcctcagcatcgggagcgcatcgtcatcgtcggttttcgggatgacgtgccgttctcatgggattgcctgcggctccctgaaaaggggacgcgccgtttgcgtgatattcttcatccggcggacggatcggaaattgcggagcatccgtacacgctcggtccagatgccattgtgaatgagaaatacacgctgaccccgaaactgtgggaatatctgcaagactatgcggccaagcacaaagccaagggcaacggatttggtttcgggcttgtaactcccgatgatgtcgcccggacgctgtcggcgcgttactataaagacggctctgaaattttagtcagtcgcggcaagggaaaaaacccgagacgtttgacgccccgagaatgtgcgcggctcatgggataccccgacgatttccgcatccccgtctcggatacgcaggcttacaagcaattcggaaattcagtggctgttcctgtctttcatgaggtcgcgagaatcatgcagccacacattcaggcgctacttgaaggttcgcagcgcagcaaagcggcctgactttggccgacgttcatgatgctccaacacgaagccgaaatatggctgcgatcaggagcggcaataccaaacccgaactgatcgtccgccaagccctgcacgccatgggccttcgctatcgcctccatgttacaaacctgccgggcaagcctgatgtggtgcttgcccggcaccgcgccgtcgtcttcgtgaatggttgcttctggcaccatcataattgcgatttgttcaagtggcccgcgacgcgatcggatttttggcacgcaaagattagccggaatgtggccaatgacgcgcgggccatctcagaattgcggcagagcgggtggcgcgtagccgtaatatgggaatgtgccttgaaaggccgaaccaagcttgatgtagggcaggctatgcaggaactcgcagactggataaaatccccagaagaaacattttcgatcaggggcaaatgatttgtctgcatcgttgtcacaactgttgaatctgatgcgtgatcatggcgcggacagggtttacgccaaaaagctgtcgccaaatgacaattcaaaaaatcaggtctatttgggcggtggattcggtgctctcaacgtcattccgcatggcgagattgttgccgacacacggccaatggcaggcagcaaacaggaccgtcccaaagccaaggtgaatttcttctgggtcgatgcgaacggacggcatccggccccagatgctcagctaattctgtatcctgattatcccgaggtccggatgtcggggtttttgaagggctgcaaggcggcgccttcgaatcttatgaccgtgcgagatcttggccgcgtcctgttttttggcatcacgcccgctggcgatgtgctcggctatgccactgggccgggtgatcccataaccactgagctgaacgccacaccttgggagacaatcggcgttttccatgaattgcccttggacctcgcgcagaaaactagcaccaaggaaattttgctcgcggaactgcgccggatttatggcctccattggatcgcatcgcaaaagctggcgcgggatgggcgtaagttgccatactcggcgaggaatggtggtggttacacgctggaagctgagcttggcatcacacccaatggctattccgaaccagacttcatggggtgggaagtgaagcaatacggcgttggcgacttcaggaaattcctgcccaaaactccggtcacgctgatgacacccgaaccaacgggaggggtttacaaaacagaaggcccggctgaattcctccgtcgttacggctaccccgacaagagcggaaagccagacagatataatttcggcggcgtctacacctgcgacaaggaccaccatgcggacacgggcttgcggataaccgtagacggctatgatccggccagcggaacgatcaccgacctgaacggcggcatttcactgcgcaaccgggaagatgaagtggcggctgcttggtccttcaccggcatgatgcagcactggaaccgaaagcacgcgcaggcggcatatgtgccttcgcttttccggacgccgccaccggaatacgcctacgggccgcgtgttttgctttgcgagcaaactgacttcctgttgtttttgaaggccttcactgcgggcatggtttactatgatcccggaataaagatcgaaaaggcctcaacgccgaagccagaaatcaagcgacgcagccagtttcgcgtaaaacacaaccagatcacgcagatgtatcatcacagcgaaatcgttgagctttagcttgggggctgctgactgacaggatcatgcacggcaatgctataatcgggtgctgactgggccgcctaaaaatgaaggcgggggccgcagcccccgcctcgatttggtgcaatcaagttgcttgttaacaaccagacctgcgatttctgaatggccaacatgcaaaaacatcggcctgctgtcaacggtccagctgcaactagggatggacatcatctcactggctcatattgcggatgatacatgcctgttgaagcgcatctggttgtggaggccaaacactagtgctactcacattcttcgctgaattgggcaatttggctagcccgcttcgatccgaggatgaattctcgacgaagcgggcaaatgtttcgcagtgacctgagcataatcgacatgcattgcaatgtccatccctagggcgtagaattccatctcgcgcaggaatttgcgactcgaaaggatgcgacacatggtcactcggttgggcttggacatcgggaccaacagcatcggctggtgccttttcaatcttgatctcgaaggaaagccagtcggtatccgcgacatgggtgttcgcatcttctccgatgggcgcgatcccaagtcaggcgcttcgctggcggttgaccggcgcgatgcgcgagcgatgcggcggcggcgtgatcgctacgttcggcgtcggtcggctttgctggaagccctcatcgataccggcttgatgcccgccgactctcaggatgccaaggcgctggtcgggtgcgatccttatgcactgcgcgcggcagcacttgatgaagcattgaatccgtaccggctgggccgggcgctgttccatctcaaccaaaggcgaggtttcaaatcgaaccgtaaggccgagcgcaaagcgagggatgataaggagggcggcaagatcgcgggcggtgcgaaggcgctcgatatggtgatgcatgaagtaggcgcgcgcacttatggtgagtttctagctggcagggacgagaaacgcgtgcggatgcgcgcagatgcggatggctatgacttctaccccgaacgccgccatctggaagctgaattcgatgcaatctgggccgcacaggccccatattatcccgcgctactgactgatgctgtacgtgaccggttgcggcgcatcatctttttccagcgcccattgaaggcaccgaaggtcggcggctgcacattctttaacgaagaggaacgcctgcccaaggcccatccgctttttcaggaaaggcggttgtatgaagaggtcaatcaactcgaaataaccaaagctggcgcgccttcgcgcaagctgtcgctcgatcagcgcgacaagatcatcctcaaactcaagtcggcgaagacggcgagtttctccggcttgtttaaactgttgaagctagctgatggcgaaaacttcaacaaggctagcgaaaatcgcaccggccttatcggcgatgaaatctctgcttcattcagtgacaagaagtgctttggtgatcgctgggcgcatttcgaagccggcgtgcaatggtcgatcatcgaagctgtggcagaagaagaagacccagttcgcctgcacgactggctaatggcgagccatggcgtctctgccgaacaggccgaagccatcggacgggtgcgcttgcccgaggggcatggtcgcctaggggaaaccgccagtcgcaagattctcgcggaactcaagaaagatgtggtgacatacgataaggcggtggaggccgcgctcggcaaatcacacagtgatttccggacgggcgaggttgtggaccaactgccctactacggtgaaatcctctcaagggaaattccgcccggttcgctcgatccaaatgacgacgacgaaatgcgctggggcaagattactaatcccacggtccatatcggcctgaaccagcttcgccgcctgctgaatgccatcattaaggcgcatggccgcccggatgagatcgttgtcgaactggcacgcgaactgaagctcggtgaaaaggacaaggccgagcacaataggcgtatcggcgcgaacacacgcgctgcggaagcaaggtcaaaaaagctacttgaaagcggacagcgtgatagcgggtccaaccgggcgctcttgaaactttgggaagacctcaatccgaacaatccgctcgaccggtgctgcccgttttgcggacgtcacatcgggcaactcgcgctgttcacggacgaaaccgaaatcgaacatattatcccctattcccgctcctttgacgatagctccgccaacaaagttatcgcgcatcgcagctgtaaccgagaaaagggcaacaaaacaccttgggaagcttggggacatactgaacgctggacgatcatcgccgaacaagtgtcacgactccacaaatcgaagcaatggcgctttgctcctgacgcgatggaacgcttcgatcaagagggcgactttatcgcgcgccaactgaccgacacccaatatttgtcgcggatggcgcggacctatctgtccagtctttatcccgacactggcggtgtttatgtaattcccggtcggatgacggcgatgctgcgacggctatggggtttgaacgaacttctgcccgaccataactacgtcgaaaacccccatagcggtgcgccaaaaaatcgcctcgatcatcgccatcatgcgattgatgccgccgttgtcggggttacgacgcgcagcctgctaaacgaaatttcgaaggcggcaggccgcgcagaggatcaaaatctcgacaaactttttatcgatctgccaagaccttgggaaaaattccgcgaagacctgcgtgaatctttggcgcgcatagttgtcagccacaaggccgatcatggccgtaagggcgttcccgcgaagggcaaggatgccactgccgcgcggctgcacaacgacaccgcctatgggctgacaggcctgaccagcgacagcggcttgccgattgtcgtccaccgcgtgcctctgctcagcctcaaaccggcagacatcacggatcccatccgcattccagacgctgccttgcagcgggcactgtgggaggcgacggaaggtaagtcgggcaaggattttgaggcggcgctggtcagattttcaagatcagaccctgtattcaagggtatccggcatgtgagagtgcgggaagccttgaaggtcatcccgatccgtgacgcttcgggtaatgctttcaaagcttacaagggcgatgccaacgcgcgatttgacgtgtggcggatgccggacgggaaatgggtatccagctggaaggacagggacggaaaatctcattcgggtatcatatccatgtttgaagcgcaccagactggccagcctgaacagcgcccacacccggcggcgaagagagttttaagtttgcgccagaacgacttggttgcggtcgagccacaagggcagccgcgcaagattatgcgggtagtgaaattttccggaggggggcagattacgtttgcggaacatcacgaagcaggaccattgaaggcgcgagacgcgacttcgccagatattgatcctttcaagtatttctattcttctgctggcggtttgcagaaggctagagctcggcagatccgtatcgacgaacttggtcgtatctttgatccgggaccgcgttaaccagtcattatgcatgatgtgtcagccttcaactccgaaaggctggccatggaccgcattgttgatatagctacggatgatcttcacctgtccgcgtatcgcggatttctggttgtcagtcttgatcgtcaggaacaggggcgggtggcgctcgacgatattcaagcggttattgttcatgcgcacggcgtaacctggacgaccagccttgtcgtggcgctcgccgaacgcggcgcggtcatggtgctgtgcgctgccaaccatgcgccggtcgccctcatgtcgccgattgatggccaccatgcccaggcagcgaggatgcgggcgcaatgggatgcgcctcgcccgctattcaaacagctgtggcagaaaatcatagtcgccaagattaccatgcaggcgtcgttgctggcggcgcaaggcagggcagaagccaatgcactcatgctgatggcgcggcgtgtccgctccggcgacccggacaatctggaggcgcaagccgcgcgaaaatactggcccgctctgatgggcgctgatttccgccgcgatcagaatgccgacggtgccaatgccctgttgaattatggctacaccgtcatgcgatcctgcgtgtcccggtcgatcatcggggccgggctgcaccctgcaattggcctgcaccatcacaatcgacttaacggtttcgcgctggctgacgatcttgtggaaccgtttcgtcctctggtcgacgggctggtccggcggatgattgacgagggtatcgaagccgtcactcccgaagcgaaacaacgactagcccggctgatcgcgcatgatttacgtctgggcggggctatttcccccgtttctgtggcaactcagcggctctctcaatcgctcgccaagagcttcgaagaacgcaaatcggctctggccctgttcgatccgcctgatgcccttgactgggcgtcgcttgggcaacccgtggggattgaagcatgaacctgagtggataccggctgatgtggatattcgtcatgtttgacctgcccgtggacacaaaggaacatgcgcgggaagcgaccaaattccgtgagtttttgctcgatgaaggctttgaaatgagccagttttcgatctacgctcgattttgtaatggcaaagagcactacgagacttaccttcggcgaatcgagtcgcatcttcccgaacgcggggagattcatgtgctcaattttaccgacaagcagtatgaaaacatcatccggttttcgagtcagagccgccaacggcaacgaaaaaatccggatcagctcgccatgttctgacgattcatcgcttttttgctatgacagatgggggtttttccagtctcaattcaaatggttaggcacccatcggtcatagcatttcagaaatcgcggtccagctgcaactattcgataatgacggtgaatcgttgcacggtcatagcatttcagaaatcgcggtccagctgcaactctccggcttggctacaggcggcgacagtggtcatagcatttcagaaatcgcggtccagctgcaaccggatggtgccatcatcgtagaactggaaggtcatagcatttcagaaatcgcggtccagctgcaacgcacgggagccttcttggggaggtcggagagtcatagcatttcagaaatcgcggtccagctgcaacagcgtgcaaagtaattgacgcgccataggcgtcatagcatttcagaaatcgcggtccagctgcaacttcattggtctttcctccttcgtggttaatgtcatagcatttcagaaatcgcggtccagctgcaactaaccctgatcgttccagttgcagagcgccgtcatagcatttcagaaatcgcggtccagctgcaacccccgcaggctccatcgcgctcaaaatggggtcatagcatttcagaaatcgcggtccagctgcaaccttgggcgaagaaggcagatgacaccaaggtcatagcatttcagaaatcgcggtccagctgcaaccgaagcggtggcccagtgccgcaagatgattgtcatagcatttcagaaatcgcggtccagctgcaactatctgccctgcgaaacgatcctgcgaggcgtcatagcatttcagaaatcgcggtccagctgcaacaacctaataactgtgatacgtattgaagcagtcatagcatttcagaaatcgcggtccagctgcaactatgccacggtcaatctggagccgggcgcggtcatagcatttcagaaatcgcggtccagctgcaactgttgcaggtgcctggacgtgaaaccgacgtcatagcatttcagaaatcgcggtccagctgcaacacgacaactccgtgatcgaagaccacgaagtcatagcatttcagaaatcgcggtccagctgcaactggcgtccgatgaatgacgccccggcagcggtcatagcatttcagaaatcgcggtccagctgcaactcggcccgaatcgggtccatcggcgtctatgtcatagcatttcagaaatcgcggtccagctgcaacggcgctgcggtgatatcgctgcccacctgcgtcatagcatttcagaaatcgcggtccagctgcaacacaaggagcgcaagggcgcgatctccgcgcgtcatagcatttcagaaatcgcggtccagctgcaactgcgctcgaattgctccgtgcggaacgaggtcatagcatttcagaaatcgcggtccagctgcaaccgaaatcatcgcagcgcaggaggcgcagggtcatagcatttcagaaatcgcggtccagctgcaacacgcctgcccctgttgtgcgtagcgcagctgtcatagcatttcagaaatcgcggtccagctgcaacttggcagggccggttatcccctagtgatcgtcatagcatttcagaaatcgcggtccagctgcaaccggctggccttcacctccttgaagggcacggtcatagcatttcagaaatcgcggtccagctgcaactttcgatcatggcggcttgtgaggctgaaagtcatagcatttcagaaatcgcggtccagctgcaactctaccttgatcgcagccagcggcggaaggtcatagcatttcagaaatcgcggtccagctgcaacaaaaggacaagcggagcggtgatggcaccggtcatagcatttcagaaatcgcggtccagctgcaacggcggcacgatcttggtgggcggcgcgatgtcatagcatttcagaaatcgcggtccagctgcaaccgcgacggcctccaccgctttcttggcatggtcatagcatttcagaaatcgcggtccagctgcaacacctctttcttgccctcgtaggagctccaggtcatagcatttcagaaatcgcggtccagctgcaacatacgccggttacggatgatatcggcgcatgtcatagcatttcagaaatcgcggtccagctgcaacagtcggggttgttggttgatggcgaggtaagtcatagcatttcagaaatcgcggtccagctgcaacggcgtattcgcagcagtgaactttgcttcagtcatagcatttcagaaatcgcggtccagctgcaacaagcgcaagggcatggtggctcactccgccgtcatagcatttcagaaatcgcggtccagctgcaacgaacgatcccgtcgatatctggccgttcctgtcatagcatttcagaaatcgcggtccagctgcaactcccagccctcttcgacataccagtcgtagtcatagcatttcagaaatcgcggtccagctgcaacagcgcagctttgcgccaaggcgctggtgcggtcatagcatttcagaaatcgcggtccagc

SEQ ID NO: 3507 - DNA, 13754 bp, synthetic construct
  source 1..13754: mol_type = other DNA
  misc_feature 1..13754: note = Synthetic
ccccgccgagccggcgcgctcgcccagcccctgcaggtccgcgcccgagcagaaggcgcggcccgcgccggtcagcagcaccgcgcgcgcgccatcgatccggtcgagcgcgtcggacagctcgtccgcgagttcgacgctggcggcgttgagccgatcgggccggtcgagggtgagcacgagcacgtcgtcgcggcgttcggcttggatcgtggcggtggtcacggttcctccctgttctggcgagggctgtagatttcgaggatgcggacgacatcctcatcgacgcggtagcggatgacatactggatgtcgggcaaagacaggtcgcatgtcgtccggacgacccgtctccccatgaacggcactgtgccgatcagcgcagccgccgacctcaatcttgcctcgacccgttcggcgtaaaacgtgctccgctcggccaggaagagccagtgccgcaggagatcatgctcagcccgttcgctccagacgacgttcaaagccgcgctgggcgtaccactcccgtttgcgctcatccatccacgcgcaatgttccgcatgagtccgtacccgcccggcggcgatatcggcttccgcctcggccagggcggtaacccgttcgggatcggcccaggcccgcgcgatcgccgcttcctcctccggcgaccagatctgctccccattctcgttgagcgggccgatgtggaagtcgggggtgaggaggtgagcgggcttgttcatgcggccggcttactccttttcgcacgtcggggcgactcagtgcgcgggcggttccatcatctcgacgagcacgccgcccatgtcgcgggggtggacgaagacgatcggcgtcccgtgcgcgccgatgcgcggctcgcccagcaacgtggcgcccttcgcgcgcagggcggcgacggcggcggcgaggtcgggcacctcgaagcagaggtgatgctgcccgccggcggggttcttgcgcaggaagccggcgatcggcgaggcgtcgtcgagcggctggatcagctcgacctgcgtgttgggcgcgtcgacgaagcaaacgcgcacgccctgcgcgggcagatcgaacgacgcgccgatcgcggtggcgccgagcagggtgcggtatgtctcgaccgaacgctcgatcgacggcgtcgcgatgccgatgtggttgaggcggcctagcgtcatccctcgatccggcgctgacggccggccatggctaccccgtcgatgacgccttccaaccgactgatccgatcacgcaggtcagcgtgcgcgttgctcagcgccgccacatcacgcgacaaggcggccatatcgtcgcggatggccttgattgtctcctggtagagaacaaaagacttgaacgcgccccaggttcgctcggcgaccgccatcaggccgcgaggtcccgccggtggtctggcccggccagagccttggcgatcgccgcccgggcttcggcgatgctcgcgcgaatggcgtccagatcttcctggatcagcggcatcgcccgctcgacttcgtcaaggacaagcgcgcgcgcttcctcttcgtcggcactctcctgcgcgatgtagctgctcgtcgcctcgcgcacgacatgtccgacggacataccgctgtcgcgggcaaacgcgtcgagcgccgccttgtggtccggcgtggtgaggaacgtcacccgttcggtctgcatcttcgccgctccttcacatcagcttataatgcgcaggccggcccttcacaacgggatattgtcatgcttcttccacgggttctccagcgtcttgccccgcagcttgcgtagcccgagggcgatgcggcggcgcgtcgagtggggctggatgacctcgtcgatgaagcccttgctcgccgccacgaacgggttggcgaagcgcgcctcatactccgccgtccgctcggcgatctcgtcgggcgtccggccacgaaagatgatctccaccgcccccttcgcgcccatcaccgcgatctcggcggtcggccaggcgtagttgagatcgccgcgcagatgcttggacgccatcacgtcataggcgccgccataggccttgcgcgtgatcacggtgatcttgggcacggtcgcctccgcataggcgaagagcagcttggcgccgtgcttgatgatgccgttatgctcctgcgccgtccccggcagaaagcccggcacgtcgacgaaggtgacgacgggaacgccgaaggcatcgcagaagcgcacgaagcgagcggcctttttggacgagttgatgtcgagcacgcccgccagcacggtcggctggttggcgacgatgccgattgtgcggccctcgatccggccgaagccggtgacgatgttggcggcgtgcgcgggctggacctcgaagaaatcgccctcgtccaccaccttggcgatcagctcgtgcatgtcgtagggctggttggcggacgccgggatcagcgtgtcgagcgactcgtcgacgcggtcccacggatcgctggtcggccgctcgggcacgccctgccggttcgacagcggcaggaaatcgatgaagtcgcgcgccgcgagcagcgcctcgacatcgttctcgaacgccacgtcggcgacgctggtcttggtggtgtgcgtcaccgcgccgcccagcgcctcctgcgtcaccacctcgttggtgacggtcttcaccacgtcgggcccggtgacgaacatgtaggacgagtccttcaccatgaagatgaagtccgtcatcgccggcgaatataccgcgccgcccgcacatgggcccatgatcaggctgagctgcggcaccacgcccgacgccagcacgttgcgctggaacacctcggcatagccaccgagcgacgcgacgccctcctggatgcgcgcgccgcccgaatcgttgaggccgatcacgggggcgccgaccttgagcgccatgtccatgatcttgcagatcttctgcgcgtgccgctccgacagcgaaccgccgaacacggtgaaatcctgcgagaagacgaacaccagccggccgttgatcgtgcccgagccggtgacgacgccgtcgcccggcaccgtctgctccgccatgccgaaatcgaccgcgttgtgctcgacgaacatgtcgagctcctcgaacgagtcgtggtcgagcagcacgtccagccgctcgcgcgcggtgagcttgcccttggcgtgttgcgcgtcgacgcgcttctgcccgcctccggctctggcggcggtgcggcggcgggcgagttcggcgatggtggaggacatccccgcctcattccgccaatcgccggccggcgcaagcctcgcgcgcgttgtccgctaccccagcgccgcgcgcagccgatcgcggtcgagcacgccttcccagcgcgcgaccacgatcgtcgccaccgcgttgccgacgaagttggtgaggctgcggcattcggacatgaaccgatcgacgccgaggatcagcgccatgcccgcgaccggcaccgtcggcacgatcgacagcgtcgccgccagcgtgatgaaccccgcgccggtcacgccggccgcgccctttgacgacagcatcgcgacgccgagcagcgcggcctcctgcccccagcccaatgtcgtccccgtcgcctgtgcgatgaacagcacggccagcgtcagatagatgttggtgccgtccaggttgaacgaatagcccaacggcacgaccagcccgaccaccgaccgggcgcagcccgccgcctccagcttctcgatcagccgcggcaacgccgcctccgacgacgacgtgccgagcaccagcagcagctcggtcgacagatagcgcagcagcttgaggatggaaaagccgcacagcccggcgatgccgcccagcacgatcagcacgaagagcgccgccgtgccatagaagcacgcgaccagcgcgccgagatgcgcgagcgcggccagcccgaacctgcccacggtgaacgcgatcgccccgaacgcgccgatcggggcgagccgcatcagcatcgcgacgatgcggaacacgaccagagagaggcgttcgagcaggtccagcaccggccgcgccggctcgccggtcaggctgagcgacacgccggtgagtatcgcgacaagcaggacgggcaggatcgagggaccggtgaacgcgccgacgagcgtgtcggggatgctcgcgagcaggaagtcgacgatgccggtctcgcccgcctgtttcgcataggtcgcgaccgcgccggcgtcgagcgtgcgcggatcgacgcccatgccggcgccgggccggacaaggtcgccgacgatcaggccgatcaccagcgccagcgtcgagaccgcgacgaaatagcccagcgccttggccgcgacccgccccagcgccttgagctcggcgacgccggcgatgccggtcgacagcgtcaggaagatcacgggcgcgatgatcatccgcaccagcttgacgaaggcatcccccagcggcttgagcgccgccccggtggcgggcgccagcgcgccgaccagcgcgcccagcgcgatggcgaggaggacctggaggtagagatgggaagcagggtgggggcgcggcgcggcctcgacggtcacctagcgctctcccatgaaaaaggcggggccgtagccccgcccttatttggtgcagtcaagctgcttgttaacagctggacgcgatctctgagaacgtcatcctaccccacgcgaacgtgatgtcaataagctgcaactaggtcacttgccgtcagtgaagccgaaagtacctgagccgctcggcggcttggactcacgccgagctaatgctacgtcatgccctgatgcgaggcagcatccgaagtcggaggcgaggtttggacaatcgcctccgacttcgagcatttctgcactgccttcgcccatgccgctttagccaatgcgttgcaagccaaattaatcagtgttatcccataggtcactgccgttagtgatggaatgcagaaaatggctcttcggcttggacttgatgttggaacgaacagcattggatgggcgctggtggaagtcaatgaaaggtcggcattcgatgaagccaccatcacgagaggcaaaattgttgacatcggcgcgcgcattttcagcaacggtcgcgatccgaaatccggtgcctccctcgcggtcgatcgtcgcgcggcgcgagcgacgcggcgtcgacgggaccgctatcttggccgacgctcagcctttctgcaggctttagtcgatcacgacctaatgcccgccgacgccgatgagcgcaagctgatcgccgaaggcagaattgcccggttccggaatggcggtggtaaataccaccccgcgctgccctacgaacttcgcgctcgcgcgcttacggaacggctcgatccgtatgagattggccgtgcgctgttccacctcaaccagcggcgcggcttcctgtccaatcgcaaggcggagcgccgaactaaggagaacgagcagggtaagatcaagcaaggtgaatatgcgctcgatcgcgccatggccgaagctgacgcagaaacactgggcgtctttctccacgggcgtcagacggcgactgacgaacatggtcgtccggacccaaagtccacccgcgttcggctggacagtgacagtcagacctatgatttctacccgcaacgtcgccatgtcgagcacgagttcaaccgcatctgggaagaacaggtcggatatcatccagcgctgctgaccgacacggcctgtgccgcgctgcaccgcatcctgttctttcaacgcccgctcaaggaagcggaggttggtgtttgcaccttcgtcaacagcgagcgtcgcctgccaaaggcacacccgctgttccaggagagacggctttacgaggagatcaaccagctggagatcacgacaccgggcgaggcctcgcgcaaactgacgctggagcaacgcgatgacctgatccgcgagttgcgcggagcaagagaacgaagctttaccgcgctgggcaagagattgaagctgcaacccggcgaaagcttcaacaaggcaacggatacccgcctcaaactggccggcaacgaaatatatgccgcgctggcgcacaagaccaggtttggcgagaccgcttgggcgaacaagtccgctgagcaacaatggcagatcgtcgagcgattgttggaggaggaagatccagaccgactacacgcgttcctgacgcaggactgcgagttgaatgaaagttctgcacgggagacggcgaaggtgcatccgccggaaggtcacggccgcctgggcgagaccgcgacccggctcatcctcgccgagttgaagaaggacgtcgtcacctacgacaaggcggtgctcgccgcgtttccgggtggccatcatagcgatttccgcacgggcgaggtgctggagaagcttccttactatggcgaattgctgagccaggacataccgccgggcactcagctcgcatccgaccctccggagaagcgctggggcaagatcaccaaccccaccgtccacatcgggctgcgccagctggagaagctcgtcaacgcgatcatggcggtgcacggtcggccggatcagatcgtcgtcgaactcgcccgcgacctgaagctcaacgacaaggacaaagaggatcacaataagcgcatccgcaaggacaccgccgacgcgcagcgccgctcgcgcctgctgcgaggcgttgacgcatccgaagagcgcacgggcgaaccggtggcgcccgataccggcgcgaatcgcgcgttgctcaagctttgggaggagctgaactccgccaacgtcgccgaccggcgctgcccctattgcgccgagccgatcggcatgcgccagctgttcaccggcgaggcggacatcgatcacgtcatcccctactcgcgttcgctcgatgacagcgcctccaacaaggtcgtcgctcatcgaagctgcaatcgggtcaagggcaacaggacgccgttcgaaaagtggggcagcgacgcggatcgctgggatcggatcaccacgcaggtcgcccgccttcacaagtcgaagcagtggcgcttcggccccgacgcgatggcgcgcgtggagaaggacggcggtttcctggcgcgccagttgaccgatacgcagtatttgtcccggctcgcgggcaagtatttgcgcagcctctaccccgaggcggatgggggcggcgtctacgtcatccctggccgcatgaccgcgatgctgcggcggctctgggggctgaacagccttctgccagatcataattatgttgagaacaagcacagcgacgcgcccaagaaccggctggatcaccgccatcacgcgatcgacgcagcggtcacggcggcgacgacgcgcggactgctacagcgcatcgcgcgcaccgccggactggcggaggaccgcgacctggaccgcctgttcgacgatctggagcagccctggcctggctttcgcgaggaactgcgggagcagctcctccgcacgacggtaagtttcaaggccgatcacgggcgccaacatgcgccgtcacgtcaccacgactccaccgccgggcgcctccacaacgatacggcctacggcctgacgggaaagaccgcgtcggacggtcgaacccctatcgtcgtgcatcgtgtaccgcttcttggcctcaagccgggagatatctccgatccggagcggatcgttgacgccgccctccgcgaagaactggagaaggcgacccatggtcgcggcggcaaggacttcgaggtcgggttgaaacagttgcaccgcgacggtggcattaggaaggacaagaccggcaagccccttttcaagggactgcggcacgtccggattgaggagccgctcaatatcatcccaatccgcgacgacgcaggacgcgcctacaaggcctacaagggcgatgcgaacgcccgatttgagctgtggcgtctgccctcgggcaagctcgtgaccaaggtggtgaccatgtttgacgcgcatcgaccaggtaacgaggaccagcgacctcatcctgccgcgaagctaatgctaaacctacgccagaacgatctgctcgcggtggaacgggacggcgccgctcgtgaaatcctgcgggtggcgggctttaacgtgcagggtcgcttgacgctcgcggcgccgaacgaagccggcaatctcaaggagcgtgatgcaacgaagcgcgaaagtgatccgttcaaatacgtctacttgtccggcggcagcatcttgaaggcgaaggcccgtcaggtacgaatggacccgttagggaggatattcgaccccggcccgcgctgactactcatccaaagtcccctaacctcctggcacaggagggccgccgtggaacgcatcgtcgacatcgccaccgatggccggcacctgtccgcgcatcgcgggcacctgatcgtgagcgaggggcatgaggaggttgggcgcgtgccgctcgacgatgtcggcgcggtgatcgtccatgcgcacggcgtcacttggacgaccaacctggtcgtggcgctggccgagcgcggcgcgatcctgctgttgtgcggcgcacaccattcgcccgtcgcgatctgcctgccgatcgcggggcaccacgcgcagaacggccgcatgcgcgcgcaatgggaggcgcggcggccgctcgccaagcagctgtggcgcgcgctggtgatcgccaagatcggctggcagggcgcggtgatcgccgccgccggcggatcggcggcgccctacgcctttatggcgcgccgggtcggctcgggcgatccggagaacgtcgaggcgcaggcggcgcggcgttactggggcgagctgatgggcgcgggctttcgccgcgatcgcgacgcgggcggggccaacggcctgctcaactacggctatgcggtgatgcgcgcgacctgcgcgcgcgcggtggtcgcggcggggctgcacccgtccgtcggcgtccaccatgccaatcgcggcaacccgctggcgctcgccgacgacctgatcgagccgttccggccgctggtcgactggctgacgatgcggttgctgggcgcgggggtggtcgaggtgacgccggcggccaagcgcgcctatgccggcctgatcgcactcgatctgcccggcgaggacggtaccacgacggtgtggcaggcggcgacccgcgcggcggcgacgctcgcgcgcgcctttcagtcgggccaggcaagcgacctgatgctgccccgcccgccggcggcgctcgatctcgccgcgctccccgtgcccgtgcccgcgtgagcgcgacccagctcagcggctatcgactgatgtggatcttcgtcatgttcgacctgcccgtcggcaccaaggcggagatgcgcgcggcgaccaagttccgcgagtacctgctcgacgagggcttcgagaaatcgcaattctcgatctatgcccgattttgtaacggcaaggagcagttcgaggcctatctgcggcggatcgaggcgcacctgccggacaagggcgacatccacatcctcagcttcacggacaagcaatatgagaacatcgtccgattcgcgggccaacgtcgccgccgtccccgccgaaatccggaccagctggcgctgttctgaatgattcgcgaccgtttcgaggggcggtttgggcctgctaactcgttcgaaaagaacgagttagcaggccctccgtcataaccgctcagagatcgcggcccaacagcaaccaagctggtgcggcctgccggggccggagcgtcataaccgctcagagatcgcggcccaacagcaacgtcggccgacggcgcgcaggcatgaagcaggtcataaccgctcagagatcgcggcccaacagcaacgcggcacgcctgcaacagccgttcctctttgtcataaccgctcagagatcgcggcccaacagcaaccagcgccgcgcgcgactggcgcaggctgtcgtcataaccgctcagagatcgcggcccaacagcaacccagctcggcagcgccgccagctcgtgcgggtcataaccgctcagagatcgcggcccaacagcaacctggagccgtggtgggcgcgcaacggcgccgtcataaccgctcagagatcgcggcccaacagcaacgcgacgacatgccgggcgtcaggcgatagtgtcataaccgctcagagatcgcggcccaacagcaacacagactttcagcgcgcgctcatggagccggtcataaccgctcagagatcgcggcccaacagcaacacctgctccagcccatcgatgtcaagatcggtcataaccgctcagagatcgcggcccaacagcaaccggggtgagctggacctgatctgggaggagtcataaccgctcagagatcgcggcccaacagcaaccgtgtgaagcgatggtggtcggccgatctagtcataaccgctcagagatcgcggcccaacagcaacgagcacttaatggtccccgccttcgcctcgtcataaccgctcagagatcgcggcccaacagcaacttttcgggtcgcgcacgtgtaccaacacgtgtcataaccgctcagagatcgcggcccaacagcaacaggccgctcacgcgaggtctcgcagcgacagtcataaccgctcagagatcgcggcccaacagcaacccggccgccggcgcctcgtggcgcgcgcgcgtcataaccgctcagagatcgcggcccaacagcaacagaccgagacgctgcgcgaggagacgcgcggtcataaccgctcagagatcgcggcccaacagcaactccaccataatcgcggtgtcagtacggattgtcataaccgctcagagatcgcggcccaacagcaactgggcggctgatcggcttgcctattatcgcgtcataaccgctcagagatcgcggcccaacagcaaccatgcgacgttgcgcggctggtcggcgtcggtcataaccgctcagagatcgcggcccaacagcaaccaacgggagggctgaacggtggcgctgtatgtcataaccgctcagagatcgcggcccaacagcaactcgccggtcagcccagccgcgttgccgctggtcataaccgctcagagatcgcggtccaacagcaactcattggatggcgcggaagaacggtcgatttgtcataaccgctcagagatcgcggcccaacagcaactcgccggtcagcccagccgcgttgccgctggtcataaccgctcagagatcgcggtccaacagcaactggccgtcctggtgcggctgggcgcgcggttgtcataaccgctcagagatcgcggtccaacagcaactcgattgagcgggacggttcgatccgtaatgtcataaccgctcagagatcgcggtccaacagcaactccccggacccggttgcgccctcggcctcggtcataaccgctcagagatcgcggtccaacagcaacatggtcaatgcagtaaacgtcagcggcggcgtcataaccgctcagagatcgcggtccaacagcaactggtggacgatcctccggcaatcggacgcggtcataaccgctcagagatcgcggtccaacagcaacatggcaccgacccggtcgcgatgattggccagtcataaatgcttagagatcacagtttgttgcaactacaccttctggtagacgaagtactacaggatcaggcaatcaaccagaacaataacgagcggcatctgtcgtgccatgccccctatccatcttggttttgtcgccgcgcgtcaggtcaagccggctgcggtactcgcgctgcctgtcccgtagcggtttaactggcgatagtaccccgcgcagtatattgcccgctttctataggaggcgataccgcgcgcatgcgcccgccgcggctcgcgcctcggcacgacgatccgttcggcggctgggcggatggtgtcgagcaccacgcgcgggctggtggtttcgcccgcgccgttgccgcccggtaatccggataccccgccctgccggacggcaaagccgaactcgtccagcgccgtgacctggccgaaacgcttgccttcaatgcgagcgggacatccccgatgccatgctccttatgtttgggcgcgtgctgctgcgggcgggagcgggggcaacgccttcatccttccggaacgggaagctgtgcccgcgcaacagtgacggaagggagccccggtctagacaccgcgccgccggctccctccaccatcgcctgcggcggcggtccccgccccgccccagggaggattgaagccactctcccctccgcgtaagcgcgatgccgggcggaggatcgcatgaatcgaatgacttggtggctgggcgcttcggcttcgctgttcgcggccgccgccatggcgcaggtgccgcagaagcggccgggcgtgtgggcgcagagctatagcggccgcaaggcggacccggcgatccgcttcggcacgctgcccaacgggatgcgctatgccgtcatgcataacgcgacgccgccgggacagatgtcgctgcggctctatatcggctcgggctcgatcgcggaggaggacgaccagcagggcctggcgcatttcctggaacatatggcgtttcgcggcagcacccacgtgcccgacggcgagatgatgcgtgtgctccagcgccacggcctcgcctttggcgcggacaccaatgcctcgaccgggcagaccgcgacgacctatcagttcgatttcccgcgctccgatgcggacagcatcgacacgggccttggcttcttccgcgagatcgcgagcgagctgacgctgtcgcagacgagcatggactccgagcggggcgtgatcctgtcggaggagcggttgcgcgacagcccgggctatcacgcggtcaaggcgcagctcggcttcgacctggagggccagcgcgcgccgacgcgctggccgatcgggctggtggacgtgatcaagaccgcccaggcgccgcgcctgcgtgcctattacgaggcgcattaccgcccggacaacgcggtggtggtcgcgatcggcgatttcgacgcggatcagatggaggcgcggatcaggacgcgcttcgccgactggcggcccaagacccccgccggcccgccgatcgactatggcgcggtcaaggcccgcaccgagcaggtccgtgcctttgccgaggccggcgcgcctgagcgcacgctggtgacgtgggcgcgagcctatgacgcgcgcgccgacaccgacacgcgagagcgcgaggacttcgtccggctggtggcgatcaccatgctcaaccagcgctataccgatctgtcgcgccggcccgacccgccctttctgggcgcatcgttcgggcagggcaacgtgctgaaatccgccaacctcaccaatctgggcctcaatgccgcaccggaaaagcggctggcggcgctcaaggtcgtggtggacgagcagcgccgggcgatgcggttcggcttcacccgcgccgagctggatcgcgcgctgaccacgctgctcgccgagttcgcgagcgcggcggcgggcaacgacacgcgcaagaccaccgacatcgtcgacaacctgctcgacaatatcgacgaggacgaggtcgccaccagcccggtgcaggacgaggcgcaggtgcgcgcctgggccaggacggtgacgcccgacgaggcgcaggccgcgctcgggcgcgcgtttgcgggctcgggcccgctcgtgttcgtggcggcgcaacaggcgccggcgggtggcgaggcggcggtga

SEQ ID NO: 3508 - DNA, 13751 bp, synthetic construct
  source 1..13751: mol_type = other DNA
  misc_feature 1..13751: note = Synthetic
gtcacgtcgaaactgtacaggtcggtctgcttgccgggattgttggcggcaatgcgctctcccagcgtcagcggtgtcgcatcggccagatcgagcagtcggaacgcatagttgccggtggcgtcagctgacccatcaatgctcagcgtgtactcgccgatggcaaggtccagcaccggcgcacccgtaaaatcgcgcgcatcagatgcgccaaacgcgcggttggcgatgacctgcccggacggatcggccagattccagctgatcgccgacgaatcagtcaacgaatcaaatacatactgcgaaggcgtgctgatcttgacgatgaactggtcggtctcacccgccacatcgatccgcccttcgatgggtggtgtgtcggcggaaaggagcagccgaggttcaagcgtttccagcgagagccggttggcaagcgtgctcgccagcgtcgtggatgtgcggagccgtgcccgctgccagtccttgaaacgcccggtgatcggttcgattgtggcaaggcgggccaatcgcccgcgaagatcgccaagcctgcgctggttcacaggcgacctccgctacaaaaggttaaccgccagaccgcagcccggttgcttgccaaagcttcgcgaagacccatccagccccccattttcggggctaccgcacatgcaatctgcccccataatggaaggcgtcaaaacgggttgtacgggatcacgaatttgtcgctgaggccgtgaaaatcccggggcgccaatcgccgcttccgctcagcgcagcgatccgtcgctcgattcgtcggaaagcagcattgccagcgccagcgcacgcacttgatcgtcggcttcggaacaattttccagccagtccctgcgttcgtccaacggctgatccatcgcctcttccagaagcgccatggcgcggcgctctgcatgatggatgccgtcgcctcccgtcatgctgcgccccttacggatgtcgcaatcggtgacgcagccaagcgcgcgtggcggcccagcggcgcttcacggtcgcctctgaaagacccagtacttcggcaatatcttcggacgacatgccgccaaagaaccgcatttcaacgatttgcgagcgttcgggatcaatcaggtgcagatccttcagcagcatgtcgatcgtcatcagatctacaggcatctcccattcggcgacattggtgttgagcgttaccgattcatggttgtgccgcgctgcattgcgcttgcgagcctcgtccaccaatatttgccgcatcagccgtgatgtcagcgcaagaatgtgcgcacggctgcgaaattcgatgagattgagacggaatagcttgaccatcgcctcattgacgaggtctccaatcgagagcgagcaattgcgttcttgccgcagccgagcggcggcaattgcgcgcaattcggacgaaagcgccgaaaagagcacattgcccgcctcgcgatcaccctcgcgccagtcgctcgccaatctcgcgtagtccactcgccactcccggccatgctggtcaggatgccaaacagacaagcttctagcaatattagttaacggattgccgctttctttatcataccctgtccgaaaacagggcgctttctgcggttcctctaaggtaaatgcgccagaatagctggctaaattcatcattgcccttgattgatctgtggaaccggcgagacagagggtggtgccacgattgcatcctgcggcggcgtctctgccgtcgatgtgctttgcgtcggccgtacagggtcggggttccagttcagcagcagccccttcacgtcctcgtaattgaccaccggatcatagagcacaccactgtcgaagttcaggttgcgggcctcggccagccccattgatgccaagagcgcaaagcccgccacataggcatcgcgccgcgctgtcaccaaagtcacctgcgcgttcagcaattcttgctcggcgttcagcctgtccagcagcggtcggaaccctgccgccgtctctgcacgcaagccagtgagcacccgcagattggcatccacgccacgccgcgcggtctcggtcaccttgctcgccgcttgccaagtggcataggcagaacgcgcctgcgccaccactgcacgctcggcagcaatcacctgctctccggtctgttcctgccttgcccgggcttgccttacttgcgacgcttgtcgcccaccatcgaacagcggcacgtccagccgcatccccacaaaggctgtggtaccctggtccatgttcctcggcccagtcccctgcgccagcgagccgagatagtcgtactggtttacgctgcccacgccgctgatccgtggcagacgcgcagactgcgctgcatcagcatcaaagcctgctgccgtcacctctgcccgcgcagcctgcagttcctgattgttggccagcgcggtggaaactgcgcctgcaaccgttgcgggcagattgggcagcacttccggctcatccagctgtcccggcggatggcccaccaatcggatataggtctcgcggctcgacaccagttgcgcacgggccgtttccaattggctttgcgccagcgccagccgcgcctcagcctgcgccacgtcggtcggcccacggttaccagcagaattgcgttcgcgcgtttccccaagcgtgaagagcatcacttcggtgttgcgctcgttcagttgcaccaccgcctcgtcgcgcagcacgtccatgtaggcaccaacgacgttggtgaacaactcgctctcggtcccacgcagacccatgcggctcgcctcgacccggctctgggcggcacgcacgctgttgcgcaccgcgccaaaggtgatgatcggcacagtaaggttcacttgccccaccacctgccgctgagggttggagaagaagccgccgccagcaggtacgccgcgcagcaggttctcctgataggttgcgctgccttccaatgtcggtcgccccgctgccaacgcttgaggcaccccttcatccgctgcgcgcaccgcagcgcggtgcgcaccaagcgtggggttgttttcataggcggcctgcaacgccgcctgcaacgtttcagcttggactgggaattccgtcagcaaaagcgttgcggaacaggcgagaagcgcgaacttgcgggtcatcggcgacaggctcctgctagtagcgtggatcgattgatggctcagctggctgtggaaggtcggcgaaccggtggccgcgacggtcgtggaagtggcagcgctccgccgatgcggatcgtgcagcgcaaacccgcaggcagcgcattgccgggattgggcagctcaagacgcataccgaaggtgccgctggcagcatcgaatacacggtccacaaccttcaccacggcattgtattcaccacccaccggatcttcgggaatgatcgtcaccgtatcgcccagtttgattgcatcgagttgggcaatcggcgcaaatacctccacgtgcagtggatcgacttgtgccaccgtgacgatatgcgtcgcatccggcccgcgatattcaccagcagacatcaccctttcggtcacgatgcccgaaacagggctgcgcacggtcttttcggcaagcacgcgctggctctgcgcatattcaagtgcggccacacgctggttctgcgccgccgcacgccgctcttcgcccgcagcacgggcattggcctgcgcctcttccaccgcatcgcgggccaggaactgcgctatttgctcgctgcgcttacgcacggaatcgagataggcagcacggctggccgccgcccgttcggcaaagacattgcccgcccgcgcctgcgccgctgctgccccagcgcgatccacatcggcacgcaattgggccaccacctgcccgcgcgtgacggtgtcgccacgatcaacgaacaccgcctgcaccacgccttccaccccactgttcacccgcaccacggcagatggttcgatcaggcaatcggtgggccgcgaagcatcaaggcctgccgcggtcatcgcagcaggttgcggcacgatctttgcgccctccgccaccgcagaagccgggcgcgccatcgctgctggcttgcgcttctcgtccggttcgccgccgccaaaggcataggctcccgcgccgatggcggcgaagcctgcaacaccaagccagagtgccttcttccgatccatgtccctgccccccacgggcggctgatgcagccggtcgcgttgcgggaacaggaccgcaggtcctatcccctcaccttgcatggcgagaaatcggcacaggccggatcatattttcaggccggatcagattttgatgtaggctatgtataaaatggcgcacacttggatcacgcaccaacatgcgttcgatagacagctattgtttgcgttcaggcagtcggtgaatgcggtcggcaagaacgctcatgcggaacggcactcctccgcgcgcggcgggctcatggcggcctctgcttcggcgcggtaacggcctgccagccatgcgcagacgaccagttgcagctggtgaaagatcatcaaaggcaggatcaccatgcctacttgcgccggagcgaaaagcgcgcctgccatcggcacgcccgaaacgaggcttttcttcgagccacagaatagaagcacaatggcatcttcacgcggcaggccagcaaagcgcgcggccacaccgttgaccgcgatgacgatggcaaggatgacgcttgatgccagcagcagcacgccaaggtcgaacagacccacgcgctgccatacgccattcgccacggcagcgctgaaggccgagtagaccacgagcagcaccgaggagcgatctaccggctggagcagcttcttgtgcttgtcgatccacttgccgatgaccggccgcagaagatgcccggcaacgaacggcagcagcaattgtgttgcgatcttctgcacagagccaagcccgtccatttcgcccgccccgcccgagtggatgaacagcgcgaccagcaacggcgtaagcacgatgccaacgaggttggagagcgatgcactacacaccgccgctgccacgttcccacccgccatcgcggtgaaggcgatcgagctttgcacggtggacggaaggagcgcgaggaacagtatcccttgcgccagcgcagggtcgatcacaaggcccgaagtacgggcggcggcaagaccgaggacgggaaaaagcgcatacgtgaaagccagcgtcatcaggtgcaggcgccagttgccgatgcccgaaagcactgcctcacgcgaaagctttgcgccgtggaggaagaacagcaggacgatggcggagtctgcagcaatgtcgaacgcggcgagcgcgaccccgcgcgcgggaaggatgctggcaagcacgatggtgccgacaagccagatcaggaaggggtcaaccgatggaagtctgtaacgcctggccatgctgtagcggctttgccttccccgatcctgccaatcaaacacaatgatcggcacagtttgctgcaagattgagagcaaggtcatgcagcgctattctgcgggtgacaaggttggcttggcgcaaaaaggcttgatagcgggccgttccctacgtcgcattggcgtaaaacaccgccgctaaactcagccggaacgctgtcgcggcccgttcgttagccattttgtgccaaccttctatcttggtgccgcaccggcagtgcgacgggaaaacaggacatgatatcgtgactgacttcccgatcgcaggcaaacatctcagctcaggcatgaattaattgtgccaccggcccacctcaagccaacaggaaaaccgtatgcattttagcgagagcacggcgatggagcgcgacgacgtccagactgaacgcgccaccgaagactctacccccggcaccggtgagttcctgcgcgaggtactggacggactgtcgcactcgcaccgcgcgatcccctgccgtttcctttatgacgctgccggatctgcgattttcgaccgcatctgcgatctaccggaatactatccgacgcggacggaacgccgtatccttgaaaccaatgctcacgccattgccgcagcaaccagtgaggagttccgcttcgtcgaactgggagcgggatcgggcggcaaggcagaaatcctgctcgacgcaatgcaacaggcccgcgcctatgtatgcatagacatttcccctgtgccgctggcttccgccgccgccgcagtgcgcgctcgttatcccggccttgcagtaagcgccgtttgcgggaactatctgggtgaactggatctgcctccacgcaagggactacgcgatctctgcttctttcccggatcgaccatcggcaatttcgagcgggacgatgcgctggtattcctccgtgaatggcgcaatcgactggggccggacggcatgatgctgattggcgtcgacctcaaaaaggatgtggctgttctggaagcggcgtacgacgatagacagggtgtcaccgccgcgttcagtctgaacctgttgcaccgcgccaaccgggaactgggtgccgatttcgacactgacgctttccgccatcgtgcgcgctatgtcagcgatccgggccatgtcgaaatatcgctggtcagccagaccgaacaggtcgtcgcgattgccggccagacattccgcttcgcaaagggcgaggcaattcacgtcgagaattcgcacaagtatgccatcgacgagtttgctgcactggcgggcaaggctggatttgacagcgtggacgtttggactgacgatgacgcgctgttcagcgtccacctgctgcgcgtggcaggctaatgcagcagacaatggcgcgctatttcgctgtccgcaaattgaccgaggatctggcaaggcccctgtcggatgcagacgcaacgatccagtcaatgcccgatgcttcacccgccaaatggcatctggcccataccacgtggttcttcgagacctttattctgcgcgaccacgtggccgggtaccagcactaccgtgaagaatggccgttcctgttcaacagctactacgaagcagaaggtgcccgcatggcacgggctgcgcgtgggatgctctcgcgcccaacgcttgcagacattcttgattatcgcgcggcggtggatgcagcgatggagcgcgccatcgggcaattgtcgcctgatgtgctggccatggtggaactcggctgccagcatgaacagcagcatcaggaattgctgctgaccgacatcctccacgccttttcgatgaacccgctggagtgcgcggtgtgggcgcagaaggacgcccagcatcacgccaccgctgtcccccacaactggctggatggcaggcaagggctggtcgacatcggcgcggataccacaggcagcgcagattttgccttcgactgcgaagggccacgccataccaccttcctacatccccaccaactcgccgaccgcaaggtcacaaatggcgaatggctcgccttcatggcagatggcggctacgatgatccccgcctgtggctgtcggacggctgggcatggcggcaagcgcagggcatcgaggcgccgctctactgggcggattccgccgatggctggaccagcttcacgctttcgggacgccaaacgatcaatccagcagcgccggtctgccatgtcagcttcttcgaagccgatgcttttgccacatgggctggcgcgcgcctgccaaccgaggcggagtgggaagcggctgcggcgctgcacgattcgacccaaggcaacctgctggacggtcccggcaatatccgccctgatccaacgaacactggcccggccttttttggcgacgcatgggaatggaccggcagcgcctatcgcccctaccccggcttccgcgcagcagagggtgcaattggcgaatacaatggcaagttcatgagcgggcagttcgtgcttcgcggcggcagttgcgccacaccgcgcggccacacgcgcgccacctaccgcaacttcttctaccctcaccaccgctggcagttcatggggctgaggctggcacgggacactgcgtgaacgacgcttccgatcccaaatcccgtcgggcaatgatcgcggtcggcctctcgaccgtggtcgaatggtacgatttcacgctctgcctctatttcgcccccacgctctcacgcgtgttcttcggcgaggatggcgagagcctgggcaagacccttgccgggttcgccatcgcctatctgatgcgcccgatcggtgccatcgcctttggccagttcggtgaccgcaggggccgcaagccgacgctgctcctgtcgatgacactgatgaccatcgcaatgctggcgctggccgtgctgccaacatacgcacagatcggtgcaagtgcgggctggctgctgatcgcgatgcgctgcctgatgggcttcagcgtcggcggcgaatatccggcggtcgtcacctatctgttcgagacggcaccagcgcaccggcgcggcctgattacgtcgagcgcggcggcggccagcgagattggcggactgttggccgtcggcctctgcgcttggttgaccgcaacactgccgcagcaaagcctcgatagctggggctggcgcatcccgttcctgttcggtgcggcgcttgctgccgccatctggctgctgcgccagatcatcccggaaccgcccgcattcgtggcagaagcccaagcgcgcgccttgcctctctcgccacttggcgatgccgtacgcaaccagcggcgaggcatcgggatcggatttgtgatatcggcgctcggctcgataacctactacgtgggtatcacttacgtgccatccttcatcagcctcgtgggatcggcagacgaagcgaccgcgctacaactgtcgactttcgctgcgctggtcgtgatcgtggtgacttccttcaccggctggctatccgacatgatcggccgcaaatccgtacttctggtgctgtgcacattgtgcgcggcgctgcccgtggcgatgttcctgatgatcgccagcggagacatcatgatggcgctgcccgccgtgatggtccttgcagcgctggctggcggggtaagcgcggtgggcgctgtcgccaccgcagaacagttccccgccagaacccggctcagcggccttgcgctgggcgtgaccacggccactgccctgttcggcggcgctgcgccctatgctgcctatctcctgcaaggctggtcgaatgccccagcgacccccggactgatgatcagcgtcgtagcggtaatctcaggtctggtccttacgcggacaatggcgcgtcatgcctgaaagctgaaacctgccgcagttcattggcttcgccctgtacggcagcagggcaaggccgagaaaagaccaatcaggtaatggatctttggcaaagcgggtggaagtcaaaaatagttcatttataataattatggtatttttcaatttttataattagcatggctgaaccaaggcgaactctcatgattttcggcgatcagcatcagtgcaaaaatgggggccgtagcccccaccttatttggtgcaatcaagttgcttgttaacaaccagacctgcgatttctgaaatttgattttttcaggaatcgcggttggtgtcaagggtttcagaaatcggtggtccggccgcaactagggactcaaatcgattcactgagaccagtggaatcaaaagctcacctaggcggtcgcgctcggttgtggacgccaagcactcatgctatcgtcacttttcactgaattggccgatttagctagcctgttccgtttgggtttggaccccagcggagcaggcttgtgccgtcatgtgggggcaccatgtgctatcgactgcccactgtcaaacttttattgtaaattgagtccctagggcatacattgtgctcgtggtgtcgagcaagcgcgcagtagcgggcggcaaaatcgtcccataacgtgcaatctgagattggagtagtggggcatggcaaccagacttggactggacatcggaacaaacagcatcggctggtgccttttcaatcttgatgggcaaggaatgccagttggcatccgcgacatcggcgttcgcatattctcggacgggcgtgatcccaagtcaggggcttcgctggcggttgaccggcgtgacgcgcgggcgatgcggcggcggcgtgatcgctatgttcggcgtcggtcggctctgctggaagctttgatcgataccggtcttatgcccgccgatgctcaggacgccaaagcactggccgggtttgatccctatgctctgcgcgcaactgcactggacggagcgttgaatccccatctgctgggccgggcgttgttccatctgaaccagcgtcgcgggttcaaatcgaaccgcaaggccgagcgcaaggccggggatgacaaggaaggcggcaagatcgcgggcggtgcaaaggcgctcgatctggcaatgcatgaagcaggagcacgcacttacggtgagtttttggctggcagggatacaaaacgtgtgcggatgcgcgcggaaggggacggctatgacttttaccccgaacgccgtcatctggaagctgagttcgatgcaatctgggccgcgcaggctccgcatcatcccgcgctgctgaccgatgccgtccacgaccggctgcggcgcatcatctttttccagcgcccgctgaaagcaccaaaggtcggcggctgcacctttttcaacgaagaagagcgtctgcccaaggcgcacccgctgtttcaggaacggcggttgtatgaagaggtcaatcagcttgaaatcaccaaagcgggcgcgccatcgcgcaagctgacgctcgatcagcgcgacaagatcataagggcgttaaaagtccagaaaacgctttcgttctccaagatggctggcgggcagatgttgaagctggccgatggcgaaagcttcaataaggcgagcgaaaaccgcactggtcttgtcggcgatgaaatctttgcctctttcagtcataaaaactgcttcggcggtcgctgggcgcatttcgatccgggcgtgcaatggtcgatcatcgaagcggtggccgaagaggaagacccggttcgcctgcacgagtggttgatggccacccacggcgttactgcggaacaggccgaagccatcgggcgcgtgggcttgccagaaggtcatgggcggctgggagaaactgccagccgactgatcctttccgaactcaagaaagatgtggtgacttacgataaggcggtagaggctgcgctcggcaagtcgcacagcgattttcggacgggtgaagtactggaccaactgccgtattacggtgaaatcctctcgcgtgagattccgcccggctcgctcgatccgcaggacagtgatgaagcgcgctggggcaagatcacaaaccccaccgtgcatattggccttggccagcttcgccgtctgctcaatgccatcatcaaggtgcatggccgcccggatgaaattgtcgtcgaactggcgcgcgaactgaaattgaacgagaaacaaaaggaggtgcacaacaagcggatcaataaagacacccgcgcggcaaaagcgagatctgacgaactggtgcgattggggcaaccggacacaggtgccaacaggatgctcctgcgtttgtgggaggagtccagtcccaaaaatccactggatcatgcctgcccctactgcggcaggaacatcggcgttgcgtcactgtttgatggcacttgcgacattgaccacattataccctattccatttcgcttgatgacagtgccgccaacaaaattgtggcgcatagggcgtgcaatcgtgaaaaaggcaatcaaacgccttgggataaatggggcgagacaggccgctggccgatcattgcggagcaagccagtcggcttgattcatcaaaacgctggcgctttgcgcccgacgcgatggagcgctttgatcaagagggtggcttcatcgcgcgccagttgaccgacacgcaatatctttcgcggatggcgcggacctatctgtccagcctctatcccgaacgcccttccgaccgcttgcccggggaaggcgtaaagggcgtttatgtgatccccggtcgcatgacggcgatgctgcggcggctgtgggggctgaacgatatccttcgcgaccataattacgtcgagaaccctcacaacggcgcaccaaaaaatcgtctcgatcatcgccatcatgcgattgatgccgccgttgtaggagttacgacgcgcagtctgttgaacgagatttcgaaagcggcaggccgcgcggaggatcagaatctcgacaagctgttcgtgggcttgcccaagccgtgggagacttttcgcgagaatttacgtgagtcgcttgatcgcgtagttgtcagtcacaaggcagatcatggtcgcaagggcgttcccgcgaagggtaaggacgccaccgccgcgcggctgcacaatgacactgcctatgggcttacaggcctgaccagcgacagcggcttgccgattgttgttcaccgtgtgcccctgctcagcctcaaaccggcagatatcaccgatcccatccgtatcccggatgccgccttgcaacgggcactctgggaggcaaccgagggccgatccggcaaggattttgaaaaggcgcttgttcagttctctaaaacgaatccagtattcaagggtatccgccatgtgagagtgcgtgagattctgagcgtaattcccatccgcgacactgatgggcgagcattcaaggcgtacaagggaagttccaatgcacgatttgacgtttggcgcttgcctgacggcaaatggaaatcagtgacggtctcgacttttgacgctcatcaaaaacagccaaaggatacacggccacaccctgcggcaaaaaaagtgcttagtctaaagcagaacgatctgattgctatagaacgtgatggtggtccgcgcgagattatgctggtcaagcaaatatggccaacgcaagttagtctcgtcggccacttagagtcgggaaagctcgacgagcgtaataagtctccgaatgacccgttcaagttcttttcccctgctgcgggtggcttgaaaaagcttaaggctcgacagattcgcatcgacgaacttggccgtatatttgatcccggaccgcgttaaccattaattatccatgctgtgccagccttcattggcgaaagactggcatagcatggatcgtattgtcgatattgccacggatgatttgcacctgtccgcatatcgtggatttctggttgtcagccttgatcgtcaggaacaagggcgggtggcgctcgacgatattcaagccatcatcgttcatgcccacggcgtaacctggacgacaagtctggttgtcgcgctcgccgaacgcggcgcgattatggtgatgtgcgcggccaatcattccccggttgccatcatgtctcccattgacggtcaccacgcacaagcagcccggatgcgagcgcaatgggaggccccgcgccccatgttcaagcagctctggcaaaaaatcatcgtggcaaagatcacgatgcaagcatcgctcttggcagtgcaaggcaaagcggaagccaatgcgctaatgcttatgtcacggcgtgtccgggtcgtgtcccatatggtggtgtaggttcgccggcgtagccttagcgatctccggccaagccgggttgatcatgctgccatagggggcaacgtgatg

SEQ ID NO: 3509 - DNA, 13239 bp, synthetic construct
  misc_feature 1..13239: note = Synthetic
  source 1..13239: mol_type = other DNA
tgcccgccccgacgatgccgttctgtcggaggaatccgccgacgacctgacgcggctcgacgcgcgacgggtatggatcatcgacccgctcgacggcacacgcgagttcggcgagggccgcgacgactgggcggtgcatgtcgcgctcgcgatcgacggcgcgcctgcgatcggtgcggtggcgctgcccgcgcgcgggatcgtgctggcgagcgatgcgcccccggccctgcccaccgccgccatgccgccgcggatgctggtcagccgttcgcggcccagccaactctgcgccagcgtccgcgacatgctcggcgctgagacgattgcgatgggatcggcgggcgcgaaggcgatggcggtggcgctcggtgaagccgaaatctatctccattcgggcggccagcatcaatgggacaattgcgctcccgccgcggtcgcgctggcgaccgggctccacgcatcgcggatcgacgggtcgccgctcgcctataacgcgcgcgcgaccagcgtgccggatctgctgatctgtcgcaaggaatccgcgcaggccgtgctggcggcaatcgacgcgtcgctgcgctgaaatcttaggcggtctgtcctaacccgtcgccgccagtcgccgcagcgaatcgatcgccatcgtcagccggtcgtcgccctgccctgcctttggcgggcctggtcggcgcgcaacgcttgcttccagtcgctcgagcaatgccgggaccgaaacgtcgcggccctggacgcgcggtcgtgcaaaattgtcgggattgacgggcgggtcgagcggaaaagtgtcgaagcgttcgcccgattcgaatatcgccggacgcggcaacggcgcgggggccgcaacgcggtaatcgggttcgtcgcccgacggcaacggctgcggcggatgcgactcgacgaacgcctggggatcgtaatcggccagcggcgtatcgagatcgcgcggcagttcgcgcgcctcttccccggtgcccaccgacatcatcggcacgcccagttcgcgggtcgcgatcaccggcggtcgcggcggcgcgtcggggtgcgaatcggcgcggcggacgacgggcacgcgctccatgtccgcatcaccgcgcccgatcgtcacgcagcgatcgccgaacagccgtgcggcgaccagaaacacgaatgtccccgcccccaccgatccgccgaagcacagcaacgcacgggcagtagcccctaggggaggttcggcagcaccgaccagggcgggcaatccgctcgccgccaccagcgattcgatcaacgacagcggagcgagcgcaaaggcaagcgcggcgatcagcgccgatgcggcaccagcggccccggcaatgggaaggttcaggcgtttgcgggtgtacgcgaccatgttacatccgttcgattggctgcgatcagcctttggtaaacggggtcgtagcctagaatgtttgacgaccagttacgctccgcctcgacataggctcgcgcgcgatcacgctgcgcggcccagcgcgcgcgatcggcgaacgatgcgccgagcgacgcggcgatcgccgccggatcgtccggcgcaaacagggtgccggtgtcgccgtcgcgaatcagctcgcggtgcccgccgacatccgatgcggcgacgatccgcccctgcgccatcgcctccagcggtttgagcggggtgacgagatcggtcagccgcatatgcttgcgcggagaggcgaggatatcgatcagcccgtaatagcgctcgaccgcttcgtgcggcacccggccggtgaagtggatacggtccgcgaccggcgatgccgcggcctggtcgcgcagcgccgcgtccatcggaccgccgccgaccagcagtaagtgcgcgcgcggacgcgctgcgaccaaagcgggcatcgccgcgatcagatcgtccagtccttcgtaatcgtagaagctgccgatgaagccgacgacatccgcgtccgccagtccgatttcgcgcgcgaatgcaaagtcatattcgggcggcgttccgaacaatttcatgtcgacgccattgggcgataccatgatctttgccgccggaatgccgcgcgcgaccagatcggatttcagcccgtcgcagatgacggcgagtgcatccacgcgccgcgccgcgaacgtctccgccgcgcgggtcagccgatacttcgccgatccctcgcgcccggtcccgttgccgaccgccgcatcctcccagaaggcgcggatttcatagagcaccggcacgtcgcgggtgcgacgcgcgagcaaggccgcaagggcacacaacaccggcgagtgcgcgtgcagcacatcggggcgaaattcgtcgatcgcggccacgatccgccgcgcaaatgccgcgacctcgcgcatctcgcccagcggcggcggcagacgggacggcgccccggtccgcaggaaatccagcccgtcgatcgtctcgcgggtcaggtcgccgcgatcgggatggcgcggcccggtgacccccgccaccgtccagccatgcgcgacctgcgccttcaggatcgcgcgggtgcgaaaggtatagcccgaatgcagcggcaggctgtggtcgaggacgtggagaatccgcatggccacaccaatgccacgcgactgtttaacggcgcgtcaactctgccgcgctagggcggatgccgacgtcatttcgaaggcagcaccgcgcgcgcatggtcgatacgatttcactgctgatctcgcacgggctgctgatcctggccgcgtggcggctgttgtcgcggcgcgacctcgacagcgaagaacctgccgatatcgacatgcgggggcgcaagcgcgatgcgtgacctgttcctgctggcgtttctgggcgcgctgttcctgctcgcggcgcgacggccgtttctgttcgtgctcacctatgtctatatcgacatcgtctcgccccagcacatcagctattatctgctgaacgcgatccccgtttcgatgatcgcgttcgccgccgccgggcttagctggctggtgttcgacgacaagcgcgacagccgctttgcgccgcgccaggcgctgatgctcgccttgctcggctggtgctggttcaccaccagtcgcgccgatttcccgatcgaggccgcgttcaaatgggattgggtgtggaaggcgatggtgttcgccatcttccttcccctgacgctgcgcaccaagcttcggatcgaagcgttgctgctgttcatcctgctgtcggtctcggcgatcgtcatcaccggcgggttgaagaccgtgctgtcgggcggcgggtatgggcagatgcacctgttggtgtcgaacaattcggggatattcgaaagttcgatcgcctccaccgtcgcgatcgcgatgatcccgatcatcctgtggttcatgaaattcggcacgatctttccgcccgactggcgcgtgaagctgttcggatcggcgctgatcttcgcctgcctgatcctgcccatcggcaccgccgcgcgcaccgggttgatctgcatcgccgtcctggcggtgctgatgctgagagatgccaagcgccggatgctctatgtcggcggcgcggtgatggcgctgctgctggtcatccccttcctgccctcggcctataccgagcgcatggggacgatccgcaattatcaggcggatgccagcgcctccacacgtatcatggtgtggaactggacgctcgattacgtccgccaaaagccgctgggtggcggcttcgacgcctatcgccagaacgagcttcgctatgagacgaccgccgttgtcggcaccggtcccaaccagaccgtgcagcgccaattggtggtcgatcaggcccgcgcctatcacagcgcctatttcgagatgctgggcgaacagggctggccggggctgatcctgtggctggtgatccacgggctgggcttcctgcgcatggaaatcctgcgccgccgctaccgaaacccacgcgaaggcgaggaatggatatcgccgctcgccaccgcgctccagcattgccacatcatctatatgatcggcgcgctgttcgtcgggatcgcgctcaaccccttcatctacctcatcatcggcgcgcagatcgggctcgatacctatctcgggcggctacggcgcgccgatgcgaaaatgccgcttcgccccaaacgcccgcaactcgcccgcgccgagggttgaggcgtggcggggctgttcctgacgcgtgggcatacgcccgaagcgcaagcgatcgccgcgcgggcggaggcgcaattcgccgcgtcggggttcggcccgcccaccgcgccgacgcttcccggctggcaagtgcgccactggggctatgccaagggcggtcccgacacgctgctgatcgacggcgaggatttcgccgcgattgcgggcacgatgacggtcgacggcttgatgggccgtgcggcactggcccggctgatcgccatgatggcgggcggcacgatcaactggcagcgcatcggcggccagttcaccgccttggtgcgcagcgcggatcggacctggctgttcaccgatttcttcgcggcctttcaactgttccgcagcgaaggcgacgcggtgctctccaccgcgctgctcgccacgctcgaagccttgccccgcatccgcttcgacgcgcagggcgtgtatgaattcgcgttcaacgtggtgccgatcggcgacgatacggtgttcgaggaactgaagctgctcggtcccggcacgctgctcgaactgaccgaaggcggcacaagggcgcacccgctcgccaagccgttgccggatcgcaccgacgaccatccgcttgccgatcggctggcgacccaccgcgacctactggcgcgaaccgtcgaagatcatgtccgcgctttcggcaacgccatccattgccccctgtcgggcgggctcgactcccgcctgttgctcggcgcgttccgggccagcggcgcgaccccccacgtctatgtctatggccccgccgccagcgacgacgtccagatcgcccgcgccatcgccgctgccgagggcttcgcgatcgaatggatcgacaaggaagccgcgcccctgccccccgacgccttcgccgatcaggtagccgccaatttcgccgggttcgacgcgctgccgaccttcggcaacatctttgacaatggcgggcatctcgcggcccgcgaccatcgccatccgccgggcgggctggcggcgtcgggcggttgcggcgaggtgtatcgcgatttcttctacatggccgatcgcccgtcgagcgcggacgcggtggcgcgcaccttctttgcgcggttcctgtcgagcgacacgaccgacggtttcgatgcacacgccttcatcgcgcgcatcgcgaagaaactgggcgaggctgtgggcagcgcggacggacgcctgtcgcgcacccaggtcgagcaactctatccgcgcatccgctgtcgttcgctgttcggacgcgagatcagcctggaatcgcggctcggtgcctatttcatgccgttcctcgaccatcgtatcgtcgcggaagcactgacgttgccgatgccgctcaaacgggcggggcggttcgagggggcgctgctcaacgccatcgaccccgtgctggcgagccacccctccacctatggccacagtttcgcacgaccacccagccgcgcccaccgcttcgccgaatggagcacccgcatccgcccggtctggctgcgccagcaaagctatgcgctccagcgccgccgcggcgcgatgggggacgagcatggcgggctgttggacgcggaatatatgagccgcgtgatcgacctggagttcccggcgatgcggcaattctttcatgtagacgcgatcaccgacagcgcggtctggcggcgggtcgcctgcctcgaatatctggcggggcggctgggcgggaaaatagcctcaccctgaaccttatggcggaagccgcaacccgtgacgacctatgtcgcgagccagccggggatcatcgcaaggctggcgaggacgaccgctacggacatataggcccagcgccccatgccgaaccccagccgcgcgaccgcaccgtggcggcgctgcgttcgttcggacggcgccagcgtcgtcgccagccgcatcgaatagatcatcgcgccggtgaccgcgagcgcggtcaggatcgcaccgaagacgaaccacaacagcttggtcgtcatcccgccaaaggttccgaaatgcagcggatcggacatttcggaaatacgctgatgcgcgttcatcgcctcgcccctgacgatgtcgaccacccgtccgtcagccgggtcgatccacacgccattggcacggtcgcggaccaggaccgcatcggcctgaccgaaaaagccgatcggggcgtcgggctcggtcggcagccgcaactcccggatggtgagcgagggataggcgcgacgcgccgtgtccgcatgggcgtcgatggccaccgcactcagcggcgcacgggccgtcgcctcgaccttgggcgcacggtcgaacggcgcgtccccgcccagcgattcgaccagataccaaaagcccgtcagcccgatcagcgccacgaaccacaaggaccacagcccgcccagccggtggagatcgcccgtcagccggcgcgcattgccgccgcgcggtcgcttcagaaagccgcgccagaatttcttgtaggacaccagtcctgtcaccagcgacatcaggatcagcaccgacagcgacgacaccagcggaatgccccatttggcaggcaacaacaggtggcggtgcatttcgcgaaagaagcgctggaagctcagccactgacccgtgccctgcaccgtgccgtcataggggttgagatagacgcggacgcgttggtcgcccgcatccttcgtcatcgcttccgccgcgaaccaggcgtgcggcggcgcgtagatgccgagcacctcgccacccggcatcgcacgctgcgcggcatcggcgagcgttccccagctggcgtgcggcgcatcctgcggcgcgacgcgcaacgccgggcgcgccagccagtccatctcgaccgaaaacaccgccagcgtccccgtcagcatgacccaggccatgaacaggcttagcttcaggccgacccaactgtgcgtcacccaccagatcgagcgcttcttgggtggacgcgcggtcaccgccgtccccggcgttgcgggacggaaaggtgcggtcgtcgccatcagaatcgcttgcgaagctcgacgaacgcggtgcgcggcgcgcccggaaacgatccgccgcgcaagccgaagcccgacgccgcatagcgtttgtcgaagatgttctggacccggcccatcacctcgacaaagccaagatcggtgatgaccgatgcgtcgaagatggcgtagggcttgacgcgttcgcggtcgaaaccgacgcgttcggacacatattcgccgccgaacgccaccgccgtatcgatcgccgccacctgatagcgggtccagaaaccgagcttgtgttcgggcgcgttgacgaaacggtcgccaacggcattcgtcaccgcctgccccgctacggtgtccgtgaccttggtatcgttatagccatagttgaacgtcagcacccagtcgccggtcaggtcggcggcaaggttgaactccgccccgcgcgacgtgatctcgccgatcgggcgaagctggtcgcgaccgttgacggggggcaggctgttgtcgacctgaaggatgttgcggcgcttgatctgatagatcgcggcatcggcctggagccgcccgccgaacagcgcggtcttcgcccctgcctccacctgatcgccggtgacgggcgcgaacgggccgcccacatcggcaatctgactgcccgccgattgcgggtcgaacgcgtcggaccagctgagatagagcgacacgtcctcgcgcggcttgacgatcgcgccgaaccgggtggtgatgtcgctgtccgaaaaatcgaccgcgttcagccggttgtcgtcgtcgaaccagtccttgcggatgcccgccgacaggatcagcatcgacccgatctcgaccgcatcctgcgcatagacgccgtagcgggtcgcccggttcaggctgcgcgtatagggcaccgccgacaggccatagagcgcgcccgaggtcgtgccatagaccggatcgaccagcgacagccccggcaccggcccgccattttcgcgcgagcgcgcggtgcgcgacagcgacaggccgttctcctcgctccagtcgccgccggcgagcaaggtgtggcgcaacgggccggtgtcgaacttgccgaccagattggcgccataggacaggccctcggtcccgcgcacctgatcgcggaactcgcgaccgatgcggtcgatcacgccgtcgccattggtgtcgaatcgcccctgcggctcgtgataattctgcgcctcgtcatattcgaaatagcggcccgatacgtcgagcgtgagccagtcggtgatcgccgcatcgaaccgcgcctgatagacctgggcatccaatcgcaggaaatcggtcggctcgttatgattccactcgaccggggacaggaaatcgccgtcgaggtcgacctgaacgccgcgcagccggttgccggacagttcctgatcgtaatgcgtgacctgcaccgtcagcgtcgcctcgggcgtgaagcggaaggcgagcccgccatcggcgatcagcgtgcggctttcggcaccgctgcggaaactgtcgaaatcctcgaagaacaggcccgcccgcgcgctcaccgatccgtcggtggtgaccggccccgtcacgtcggccgatccgccatagcgtccgtaattgccgacgatcccgcgcacgcgtgcggagaaattctcgctcggcttcctggtcacatagttgatcgtgccgccgggcgatccggggccgtaaagcattcccgccgggcctttcagaaactcgacccgttcgatgttgaacagttgcgggaccgaaaagccggtaaagggattgccgcgcagtccgtcgtagaatgcggtgtcctggcgaaacccgcgaaaggtgacgcccgaataggaaaagaagctgatccccgacacgttgcggtagagatcggtcacgtcgcgcgcgccctgatcctcgatcagctggctggtaatgacctggagcgcctggggcacgttcagcggatcggcgggcaccttgcccacggtcgcctcgggcgcgcgatacagttgctgcgcgcggccggtgacgatgatctcggcatcctgcggcgtttcgatcgcagcagcttgccccgggatctcggcggtctgcgcggcaacgccggacgccgtccccaatagcgcgaatgccgatagccctgccttcaacccgatacgcatcttcatcccctttcgatgatgaagcgccgctactgagagtcggtatcattagcaagtgggcttttcgtcttttgccatgatcgcgtgatccgctgcgatggttggtgggacacaggaccgaaaggagagcgtggaacgcgcgtggacagcttgacagcagcccgcgtccaatgcaccttgaccgggttcagaaatcgcaggctggctgttaacaagcagtttgactgcaccaaataagggcgtccccccgggggtgccttttttgtttggccggacgaacattcgctttgcagttcgcaaatcgtttggcgccaatatcgatcttaatctctctgttgagaagattgacaacctgcttcaacgacatagccttattcgacaggttgcagacttgaagccgtagaaaatgcaggccgacggcaggactgacggaattgggggagcgggaacgatgcgcaggctggggctggatatcgggaccaattcgatcggctggtgcctgatcgaggatgacgcgcgcatcgtcgacaccggcgtgcgtatcttttccgatgggcgcgatccgcaatcggggacgtcgctggcggtcgatcggcgcgaggcgcgcagcgcacggcggcggcgggatcgttatatcgggcggcgttcggcgttcatggaggcgctggtcgaacacggtctgatgcccgccgatgccgacgaggcgaagctggtcgcggcgctcgatccctatacattgcgcgcgcgggcgctcgacgaggcgctgaccccatatgagatcggacgcgcgctgttccacctcaaccagcggcgcgggttcaaatcgaaccgcaaggccgaacgcaagaccaaggatgccgaggacggcaaaatcgccagcggcgcccgcgcgctcgacatggcgatggcggaggaaggggccgacacgctgggtcagttcctcgcgcgccgcgacacaaagcgcgtgcggatgggcggcgagaaccaggactatgatttctatccgcagcgtcgccatgtcgaatatgaattcgaacgcatctgggcggagcaagccaagcatcatgccgcgctgctgaccgaaaccgcgcgtgccgcgctccaccgcatcctgttcttccagcgaccgttgaaggcgcaggaagtcggactatgcaccttcgtccatagcgagcggcgactggccaaggcgcatcctttgttccagcagcggcggctgtatgaagaggtcaaccagcttgaggtgacgacgccgggtgccgccaatcgcaagctgacgctcgatgagcgcgaccggctgatcctgaagctgcgcaacaagcgaatggtgtcgttcgacagtctggccaaggaactgaaactcgaccccggccagagctttaacaaggcgagcgagacgcgcacccagttggcgggcgacgaggtgcgcgcggtgatgggcgacaagaagcgtttcggcaccgactgggagcatttcgaccgcgaccgccaatggaccattgtcgagcgggtgatggaggaggaagaccccgacgcgctccatgatttcctgacgcaggaacaggggctggacgacgatcgtgccgccgcggtcgccaaggtgtcgctgcccgaaggacatgggcggctggggccaaccgcgaccgcgcgcatcctcgacgaactcagggccgaggtgattacctatgacgaagcggtgcggcgctgcggctggcatcattcggaccatcgcaccggcgaaatcctgccccagctcccctattatggcgaactgctgacgcgcgacattccgcccggcacccaggaccccgccgatccacccgaaaagcgctggggaaagatcaccaatcccaccgtgcatatcgggctgcgtcagctcgaaaagctggtgaacgcgatcatcgccgtccacggacgccccgacgagatcgtcgtcgaactcgcccgcgaactgaagctcaacgacaaggacaaggaagagcataaccggcgtatccgccgcgacaccgccgccgccatcaaacgctcccagaaactggaggcggaagggtttgccgataccggcgccaaccggatgctgctgcgcatgtgggaggagttgaaccccgccaatccgctcgaccgacgctgcccttattgtggcgagccgatcgggatgcgcgcgctgttttcgggcgaggccgatatcgaccatatcatcccctattcgcgctcgctggacgacagcacgggcaacaaggtcgtcgcgcaccggtcctgcaatcgcgccaagggcaatcgcacgccgtatgagaaatggggccatgacgaggctcgctgggacgcgatcgccactcaggtcgcacggctgcacaaatcgaaacaatggcgtttcggccccgacgcgatcgcgcgggtggagaaagacggcggctttctggcgcggcaattgaccgacacccaatatctgtcccggctggcggggaaatatctcggcagcctctatgcgaccaaggacgagggcagcgtctatgtcatccccgggcggatgactgcgatgctgcggcggctatgggggctgaacgagatcctcaacgatcacaatatcgtcgagaacaagcacagcaacgcgcccaagaaccggctcgaccaccgccaccacgcaatcgacgcggcggtggtggcggtcacgacgcgcgggctgatgcagcggatcgcgcgcaccgccgggttggccgaggacaagaaactcgaccggttgttccccgatctggagcagccatgggaggggttccgcgaagaactgcgcgacaagttgctggcgactgtggtcagtcacaagcccgatcatggccgcaagggcaaacccgcaccgggacgcgacacgaccgccggtcggctgcacaacgacaccgcctatggcctgaccggggacaccaatgccaagggcgtgccgatcgtcgtccaccgcgtgccgctcgccagcctgaagcccgccgacatcgccgaccccgatcgtattcccgatcccgtgctgcgcgccgcgctggcgcgcgcgaccgaaagcaagagcggcaaagactatgatgcggcgctggcccgtttcgccagggaggatcgccagttcgccggcatccgccgcgtccgcgtgcgcgagccgctgagcgttattcccgtccgggacaaggacggccgcatctacaaggcgtataagggcgattccaacgcccggttcgacgtgtggcggatgcccgacggcaaatgggtatcggacatcgtgtcgatgttcgacgcgcatcagcccgatcaggccgaccgccgtccgcatccggcggccaaaaaggtgctgagcctgcgccagaacgatatgctcgccatcgaacgcgacggcggcgcgcgcgaaatcgtccgggtcgtgaaattctcgacgaccggcagtatccagcttgccggatcgaccgaagccggcgcgttgaaagcacgcgacgcaaccccgcaagatctcgaccccttcaaatacatcaattcgtcggcaggcggcctcaagaagattaaggcgcgtcaagtgcggatcgatccgttagggcgcattttcgaccccggcccgcgctgatttatcgaccatgctcgtctaatccttgttgccagggggagggggatggagcgcatcgtcgatatcggcacggaggggttgcatctgtccgcttaccgcggcttcctgatcgtcgcgaaggagcgcgaggaactgggccggatcgcgctcgacgatgtccatgccgtcatcctccacgcgcatgggtgcagctggaccggtaatctcgtcgccgcactcgccgagcgcggcgcgccgatcgtcttctgcaacaaccaccacagcccggtcgcgg

SEQ ID NO: 3510 - DNA, 12556 bp, synthetic construct
  misc_feature 1..12556: note = Synthetic
  source 1..12556: mol_type = other DNA
ttggttgactgttgtgatgataagggggccgcagcggtgaggttctgtgcagaggaaatagttatagccatccaaaaatgagtttcaatatattttagtactggttagtgctaatatgaattagaactaatgagtcgcagtagattagggaggccagctggcgacgtcaatatccaaagttaatatccaaagttgcgggcattcactagctcatcgaactagcgatgccgcgccgcgtgctgaccgcagtttcttgcaaagacatcgttctgcgcgtaattggaacatagcaaaaacgactgaaaagcgatgagcttcctgcactaggtcgctatttcagttcagcttgagagaggcttacatattgaatatccatactcataatgaggccgacggtcggcgcaggcgcggccttgtgtcgcaagatattattatcgctgctgcattagaacttgtgagtgaagggaacgtcaatccaagcgcagaagatgtggcggagcgggcaaaactcagcaaaggcactgtgttccgccaatttggtaacatggagcagcttcaccgccgaatggtcgttgagatcacaaggcggctccgttcaactgcgcagccctttcagagcacagattggcaaagccagcttcaggaaatgatggcccggcgcctcacgatgtttgaggtctttttacctttcaagcgcgccgcggatgcctatcggcatacatcgcctaccttgcaggcgagtcacagctcacgtcttgcagaaatgcgctctggcctggaaggcgttttgccctccgccatattgaaacaacggtcatttttagaagcaatcgatctgctgcttggtcatgaaacctggcaacgcctgcgcatcgaacagaacctttccgaagctgatgcgcgtggagttattgaaacgctgatgtcactcctcttatccgctcacggcgaggcaaccggtgcatcaccaacaaaatcggtcacttaaatgtgcgcgctatctttcgccggtcggagcgaagcgcttttggcaataggacggcggcgtgaggcagggtctgatcgtattcgtgctgcacggcgacgcaaaggagccaacccggccgccagcgttttatgacgagacccacgcgtttttggtttcgtgcggcattcccgagatatggcggcgcggcgatatgtctaataacgccacgatccatctgatgcctatgtgatgcctagcgccaccatattgacaatggcaaaaccagtaaattaggttaagtcattgaaaaggtggtgagccctgctgggttcgaaccagcgacctactgattaaaagtcagttgctcataatatctcatccggtatcacggtctctcataaatcatatattgttacgctatatcatctagatatatatatttctaagagcaagttgtttcatctagcgtcaggcaatctcatgtagtatgaaacctaggtgaaacctttggagaaatgatgtggccaagagagtgccgccgctgaccgctgctgctattgccaagattaagcctgatcccgctaaaaccatagagaagatagacggggcagtaccaggccttcggcttcgagttacgccaaacaatactcgaacttggtcacttaatatccgtgcgaagggggttatgcgacgcttcgacgtcggcagtgagttgggtcttgctgaagcgagggaaaaagcgctcgcgatccgtcagcgggtaaaggacggagctgatccaacggctgaacggcgtgcaaaccgcaagcaggcggtaacagcaaaacaaggaattgggacctttggttcagcagtagatgcttattttttggggggaaatggggccggtcttaaaacgaaggcggagcagtctcggcgcataaagtctgtttttcgggggcaattaatgcgaccagcattggaaataaaatcggtggagcttcaacaagctgttgatgagcatggcgctagctcttccggggcccgagcggttggatatgtaacgcctatgataaaatgggcgacaaaacgtggcctgatgcaaggcagttttgacctagaaaagcctcggcaaaatgctcctaaacagcgggtgcttacaattgaagaacttgccgctctgttgccgacgttcactgacgcatacgggcgttgttgccgatttattctgctgactggtgcgcggcagggtgaagtcaaaaaagcgaaatgggggcaatttgattttacgacccatacatggacgatcccagccgaggtgagaaaagacaccagagcgcaaaaaaaacggaggatagctcctaaacaggcgatggtggtgcctctctcgcaacaggcaatcgaagtgctaatggatacacgggaggcggaactatcccgtcgtcagctggaaggatcatctcgcgaaatcactgatgatgatcttgtttttgttgggcaaaagggtgggagtcttggtaattgggatagatggttaaaagcaaacgcgcaaaagtcgggcgttacagactggtcgagccatgctttaaggcgaaccgcagcgactctcgctggcgaacagggtgccgccccgcatatcgtcgaggtcattcttggccactcaaatgtcggcggacagctagtcgcgggatacaacaagagccgctatcgcgccgaacacactgaagccctgcgcaaagtcggggaccttttggacgggttggacagcaagctcgataaggatgcaaaggaggaagttagtggaaactgaaaacgttcggaagctactctcacaatacccgccctcgttcgcaaaggatcaagcgcaccgattaatccggaacgcgctgcatcgaccagacccagaacgtccgttaaagttcattgtctatgacatcctttatgctttccagatgctggaggcccgccgcctagggctcggccgcgaccgtgatccagttcaatatgccaagtttaggcggaactatatcaatgcggttgcgatgtgggtcccggggaaggatccgtttattgatgggattcgtatggctgcaacatcggctgcacgtcacaacgatccagaacttgataagatcctcaaggatcttgctgaagccgaaacgaataggaccagcatggagcaaagccggaaggcattaagcccgcgcaagatgggtcctttcaatcggtatgtgtggaaactacttgaggccagccccgaattgagtgagggggcgctccaacgcacaatcgaatcggactaccaacgaggcaacagcattttcagccatatttctttagatgagatcgaaatagatataaaagaaacagaggaatgtgagacgatcctgcgatcaggaatacgaagccgcctatctcgtctaaaaaataaaaaagcgcaagattgaatctcgttagccggcttgcgagaatcctatgtggcagagccatgtgatcgcatcgaatcacaaggagttaaatgatgtcgcaccaactacgaacaaatttcgacgatctaccggactcagcatatgtccgcctaaagcagctaatttccgacaggattgccccatgctcagccgcaacaatatggcgcatggtgaaggggggagagtttcctgaacctgtcaaactttcgggcaatatcaccgcttggaatgtgggtttagttcgcgactggcaatccacattcattaatcgtcaggcagaggggggctgtcatgaatagtgcggccatcgaatttttgcgccaactcgatccgtcaccggacgcgacgtttaacatagagaccttcacagatctcccaaagggcgtcccgaagcctaagcccgaccggttgtgcagccggtatgccaacttgtcgttggagaaggtcacagcgatgatcccggatcttgaacgcttgaacaaggctggtgcggcaatctacttcgcggtcaatcagtgtaacgggcagcgaagcaaggctaacatagtccgcgtccgcggtgtccacgccgatatggatggggtgtctgaaagtgcactcaaactcgtgcgttagaggctaaaaccgaccagtgaagtgcaatctagtggaccggggaattgccacttctactggctgttggtggatggcgaggaaatggcggtcgaactagcggaagcgatcaaccgtggcctaactgaactgggtgctgatccggctgctactgacgtctcccgcctcctgcggctgcccggttttcgccacatgaagtatcgcgatggagaccggaatgatggagcaattgattgcccaatagtcactctccgctcgataggccctcgctataccgccgttaagattgcaaacgcgcttccaaagactatgaaccgctgtcgcgccaaggggcgtttgtcgttctctaaaggcgtggacgacaccccacgccagcgagcccgtgtggttgaagctttgggtcatgtgtccgcagattgcagctacgaaatctaccgcgacattgtgtgggcgattctaagccttggctggcatgactgtcagcagattgcggaggcatggtgcaagaccgcgacggatcgtttcgaagaagataatttctggaacgttgcgaacagctacgacgagacccgtaccccgactatgggcactatcatccatcacgcacgtgcaggaggctgggatgagtaatgttgcaaatatttcaccggcactttctccactgcaggaactgcagaaggcgttctatctcctcaagctctcgggcgatgtggttattgtagatcagaaacagatcgaggacgtccgcagcggcattgaccgtgagggggtgcagatgttccgcatgaccccaggcaagttgctgctgcgacgttttctcgaggctctgccgctctcatctgacccgggcaaagcgattaccgacttcatggtcagcccgaagacaacggtctatgacaggatcgccttcagcccgctctcgacaccgctaacgaccttgaacctttggagtggtcccactgccatcccgaggcagggggactggggtatcatcaagagcttcttgcttgaggtgatcgcggacggggatatcagcctttaccgctacctgacgctatttctcgcgcagatgcttcaggcccccgaggacaagccgggtgtggtcatcgccatgatcggaggtcaaggcaccggcaagggttcagcactgcggattgtggagcggatctggtctaactccaccttgcttgtttcggatgtcgatcatgtcatcggcaggttcaatgctgccctagagggcaacttcgcgatatgcatggacgaagccatgttcgcaggggaccggcgggcgatggaccggctcaagtcattggtgacggagcctacaatcaccattgaacagaagaaccagccacggcggagcatcgattcttaccaccgctttttctcagccacaaaccacgcccacttcgcccacgtagaggcagatgaccgtcggctcgcattctttcatgtctcagataagcggcagggcgatcaagtatactggaatcaggtgtatcaggccatcaatgatccgacggcgattgccgccatggtctacgatctcgaacggtacgacctgagcaactttgatgttcggcaacgccccaagaacgcggcgcatatgggccagaaactgaagtctctgactgggttcgatagatactggtatgaggtgcttatctcaggcgattttgacctgtcaaccttcggtgagccaatagacccttggtgcgatacaaccttcatcagcacaaaaaggctgctggagggctggaagcgtttcgaaaagggtcagcggcagttctatgctcggcaacagagcgaaatgcacgatgcaatccagaagctatgcagctcagccgaacaaggcagaaagacggtccataacaaacagcttaggggctatttcttgccaccgcttgccacggctcggcgggaattcgctgacgccatgggcggaactatcgagtgggaggactgatctgaccactcagacacatgcatgatggcaaatttgccaccgtttgccaccttagatggcaagaaaaagcataggatttctgggcttcttgagcgtgcttgccactcttgccactacttttcagttaatggagagaatagttaatacgggggtcactgcgcgcgcaactcaaaacaggtggcaagagtggcaagcaccctcatggactacacttccatgaggccaacgaacaattcagccagtgcccgtccggagcgcgcctcggtggatgtctagattttatgcaggattaatagttctgcttgatgggaataacgcctcgaacacctccgcgcggttcgtccacatccccttcacggcgaggtatcaaatgtatgtggcagtgaaacaccgtctgcccagccgcggtgcccgcgttcactcctatattgaaagctgtgacggagtggtcatcacgacagataagtgctcgttgttcctccatcaatgcgtgcagggcgtttctttcaggttgaaacaaatcaaagtaatcagccacatggcgctttggaatgatgagggtatgttgctttgtcacgggaaagccatctcgaaaagcaagcgccagttcattctctgcaacaacacggccctgaggtaattcacaaaatgggcagtccttgctgcgctccgtatagaccgccgccatattgcggaaatcagtatcatcccgatctctttttgtggcgttacaggaatagcacagcgcttgaaggttatgcagctcatcactgccaccatggtttttgggtaggatatgatcaacctcaatggctttttgctccgctgatataccgcaaagctcacatctatatttcgctcgcttcaggacctcatagcgcaatgttcccggaatatagccagaggagcttttacggtgtgcccatattttatctccacgttttgcaacgtattctgccactttttcttcacagagatcaacgagggcttcgacctcacttgccgttagctccccggagccctttaggtgatatttgtcgccgtctctttctgtcaagccgcggttctttgtaagaacgcgaccaaccatattcttagttatctgcccataatattccacctgtgattgatcttcagtcaacagagctttggcaattgactgaatggaagctgttccatttgagcgcagcagctcagcgagcatgacaggttggtatatgtgggacatccgcatttcattgcggatgaagtgatcaagcttatcaaacggttcactcatgtcccgatgctattcgttttttcaacaccgcgcaatctcatctgcccatacctagatggtgtgagccataaggtgcgaatgaggtggcgcatagctagcttactgaagaaaccgctttccaataagttcatgctatgttctcattcctaaatgggttccagcaacaataaaccgattcttccaaaggcatatagtactgtcgggcaaatgcgcttcaatagggtcaatatcaaagcccactgcgacaagtgccgcaatacgttccgtgtcgatctggtggcgctgataatggtcagggggccagattattcgctaatcggtcagcacccaccttgccggattattgattgcaagggtcggtgtagctttctggtttctgcaggagaaaatacgccgatggtaacattggatttggtgcgctagtgattagattagaacacaaccggaagcttaagtcgatttcatttttaaaaaaacaggggccgtagcccctgcctaatttggtgcagtcaagctgcttgttaacaactggaccgtgatttctaatttctctattgtaaaattataatttagattgtcaatagttggcatcacgatgataatagttttttaagctcggtaggggaatcgatcgtgaccacagcacttggacttgatcttggtacaaattcgattgggtggtgcctttataatggagatagcatcctcgatattggagtaagaattttttctgacgggcgtgatcctaaatcaggtgctagcttggcggtagaccgaagggatgctcgatcggcgaggcgaagaagagaccgatatattggtaggcgagcagcattgatgaaagtcatgcggcagcatggtctgatgccgcgcgataagatggcggcaaaagcattggaggggcttgatccttacgcattgagggtgaaggcgcttgatgaaaagctcacactgtacgaactgggcagggcgctatttcatcttaatcaacggcgcggatttaaatctaaccgcaaggccgaccgagtttcaaaggctggcgaggacggcaaaattgctagcggtacaaaggccttagacgaagctatgcgtattcttggtgcacggactttgggagagtttttgttcggccgtgaccagaagcgtgtgcggatgcggccggaggccgatggttatgatttctaccctgaccgcaaacattatgaggcagagtttgacgccatttggacggcgcaggcagcacatcatgctgtatcgctgaccgatgcagcacgaaaggctatacatcgcgttatcttctatcaacgacccttgaaggagcaagagattggctattgcacctttgcgggttggaatggtgtgcccgatgacgaaagacgcttgcccaaggctcatccattgttccagcaaaggcggctttatgaggaagtgaatcagctggaggttgttacaccgggagaggggagccgcaagcttacgctggccgaacgcgacgcactgatcatgaagatgcgtgacaagaagagaatctcttttacctctcttgccaaggcgattaaattacccgccggatcgcggttcaacaaagaaagtgagaaccgcaaggatttgcttggtgatgaggtgagggctgcgttgtcggatagaaagcggtttggcagccgctggcctgcatttgacttaatagaacagacgcaaatactggaccggttgcaggacgaggaggaccccgatgcactgctcgcttggctgatgcgtaactatggtgtgggcgaggatgtggcgattgcaattgccaattcaccattacctgaaggccatggccggtttggagagaccgcgacccagatgttgcttgaaaagttgcaagccgaagttgttacgtatgcagaggctgcagctcgcgctggatttcaccatagtgaccagcgcaccggagaaggttttgattcgttaccctattatggagaggtgctaacccgcgaaatcgcgccgggaaaagacgattatggagatgcgctggaacggcagtttggcaaaatcactaatcctaccgtgcatattggaatgaatcagcttcgcaagttggtaaacgctattgttgcagtccatggacggcctgaccaaatctatgtcgagttggcgcgcgaactcaagctcaatgaaaagcaaaaggctgagcaaagtcgacggatcaagcagaatactgacgcggcgagagcgcgcggcgaaaagctgatcgaaatggggcagcgagacagcggcggtaaccggatgatgatgcggttatgggaagatttaaacccacaaaatgcccttgatcgtcgctgtccctattgcgggggccagattagcgccgagatgctgatgaatgcatcagtggatatagatcatatcattccatattcgcgctgccttgatgatggcgcagccaataagacggtgtgtcatgcaaaatgtaaccggcaaaagggtcagatgacaccttatgaaaaatggggcaacacagacaactgggcgaccattcaggatcaagtcgcaacaatgcataggtcaaaacaatggcgcttcagtcctgatgccatggagcgcatagaacgcgatggaggtttcatcgctcgacagctaaccgatacccaatatctgtcccgaattgctgctaaatatttaagtgcgctctacacgcctgatgagggccgccgtgtttatgcggtgaccggccggatgactgcaatgcttcgtcgtttgtggggtctgaacgaattgttgcccgatcataactgggtagaaaatgaacatagcaacgcgcctaaaaaccggctcgaccatcgacatcatgcgatagatgccgctgttattggtgccactacaccatctatgattcaaaagatttccaaggccgcagcgcgtgctgcgcagcatgatctggataagctattcgatggcctgccaacaccctgggatggcttccgcgatgaactgcgtgacaagctgcttgccactacgattagccataaggcggatcatggccgcaaaggtacaccctctagacacaaggatgtaacctccggccagttgcataatgatactgcttatggcttgacagggcgcactactgcaaagggcgtgccgattgtggtatcgcgaaaaccgttattgtctctgaagcctggtgatttgactgaccccgaacggatgactgaccattcgcttcaggatgcgctctacgcagcgacgcaggattgcgacggcaaggattttgaaaaagcgctgcgtgattttgccaagagtgatggcccttatagcggtatccggcgggttcgcctttgtgaatcgctcaaagtaatccccattcatgataaagatggtgtggcctacaaagcctataagggtgatggtaatgcacgtttcgatgtttggcgcatgcccgatggcaaatggatcacgaaatggaaggatctcgatgggagagagcattccagcgtcatctcaatgtttgatgcccatcagcacagtcatatagaggaaaagcctcatccagcagcaaaacgtctacttagtttgaggcaaaatgatttaatcgctgttgagcgtgacggtgcagcgcgtgagatcgtgcgcgtagtgaaatttggttccaatggccaaatgtttcttgcccttgctaatgaagccgggccattgaaggcgcgcgctgctgatggaatcgatccgttcaaatatatcagtacgaccgcgaatggcctgaaaaagatgaaggcacgccaaatacgcattgatgaaataggcaggatatttgatccgggaccgcgtgaataagtcccattaacctattgttatccataaacttctattcgcaagagcgaagggatgcgggcttatggaccggattatcgacataaccactgataacttacatctcgcgtcgcatcgcgggtttctgatagtaagtctgaacaaggctgagcagggtcgtattgctctggacgatattgctgccattatcattcatgcgcatggggtgacttggacaacaaaccttgtggttaaactcgccaaacgcggcgccatgatggtactctgttcggctaatcatgctcctgttgccatgatgattccgatcgaaggccatcacgctcaaaatgctcggtttcgtgcccaatgggattgcccgcgcccaatgatgaagcgcgcttggaagcagattgttgtcgcgaaaatccgtatgcaggccagcctacttgctgcgtgtggtcgagaggaggcgtcagctttgacatttctagcaaatcgggtgcgttctggtgaccccgacaatgttgaggcgcaagcagcacgtcgctattggactgcgcttatgggtcaagattttcgccgagaccgtgcagccgatggagcgaatgccttactgaattacggctataccgtcattcggtcgatggttgcgcgctctactattgcctccggtctgcatccgaccattgggcttcatcatgcgaaccggctcaatgcctttgcgcttgttgatgatctcatggagcctttccgcccgctggtggacgcggtggtaagacaaatgctggatgagggggcatgcgatgtcgacagcccggccaagcagaggcttgcggctttgatttctgccgatcttgattgtcagggagaagcttcgccggtgtcggtcgctgctcagcgcctagctcgctctcttgcagccagttttgaacagggaaaattatcccttgccctattctcacctcctgacccgctcgcttggaacagcattgcccgctataaaccaaatggggtggccaggtgaatgtacctgaaaaagtcgagcagtgtcgtcactatagcgggtatcagttgatgtggattatggttatgtttgatctgccagtgggcacaagcgaagaagcgcggaatgctacaaagtttagagaacttttgctagacgaaggatatgaaatggctcaattctcgatctatgtcagattctgttcaggcaaggagcaataccaaaccttcgtccgccggatcagcgcaaacttgcccgaaaaaggcaacgttcaaatactgggttttacggacaggcaatatgaaaatatcatccgattctctggccaatctagaaaaggccctcgcaaaaatccgggtcagcttgctctattttgagagattccagtcattctcaaacgacggatgcactgctaatcatatacatttcaatgaattagcaatgcatcggtcatagcagattagaaatcacggtccagctgcaacaa

SEQ ID NO: 3511 - DNA, 11769 bp, synthetic construct
  source 1..11769: mol_type = other DNA
  misc_feature 1..11769: note = Synthetic
cggcgccggcgtggcggcggcgggcgcctgggcaggcggcggcgctggctgcgcctcctgcgcccatgccggcatggccaccagcatcacggccatcatcaacccgacccgaactgtcattcccatctctccctcgcgtggcgtgcctcgccgcgctgtcgtgaacgcttttgcctgaacatctttgcctgaacgggggctgagccgtcacgcgcttcttctatcgccgccacgctgcgccggccagccatgacatgcctgttgccaaccccctgccggcatggctatagcctgccgcctcgctcggagtcgtgggtgagtggctgaaaccagtagtttgctaaactgccgatctgggtaactggatccgagggttcgaatccctccgactccgccactaaatcaatgttatcagtatgttgtgatcaaagggtgggcattacccacccttttacccacctttggggggcggctcggctaggatcgtgggggcttagttaatttatcgcctccaccctcgtcgaaactgactaggcttgaccccacccatggggcacccccctacctcagatatgggacccgagcttcctccgtacatattgatctgcttattggacgagggacgctagaattcggttgggccacactttgaatttcaccatttgacctgatcggcccagttccacccgatatggaagaggaagccaatcaccatcacaagaatgcatgcccctacgaacatcccgatgatagccccacaacccggctcattcatgacttcacccgctttttttaaggcctgcgcttagcagggaccttggccgcgtcgatcttggaccacacgtcataaaacgaccacagccgacagattcggcgggacgtctcgctccgttgagccccttagggatcgcgtgcgtccagcttgtccgccatctcaaaagcaaggagaagcgcgttcaattcaagagcacaccatttaatatgttgactgagccctttgcgttcgcttggggacagatcgacctttgaccagtccgcccagtccaagcggatcgactcgcgcaacgtttcaatatctcttttaatcttatcggcgttcatacataaacctccacgttgtcagctaagcatacagtggcgggtggcggctggcgagtgctacagatttcaaagtgtgacactaccggggatacaacagcgcttatttggcagccgtagccgtgcatcttaagctgctcaccaactatcacggcatgggtgaaagacggtgcgcgagcattttgccaaggttctggctcttgagccaccacgccggtgatggaactgttacctagccttagagcgattggttgtgattatcagttgagaacaacgtgcattctcataaaaaatagacagaccggttttcgatgaaaaacgaacccaataaaacataacaatataaacttctcaaatattcaataatattttactcaatttcctccatgcaaaatatatgaacgtctcttgcgtgaagttgcggatctctcattggcacttcatacgcacctcgaacccatttaattgctactttaatctcaatgcttggaaacaattttagtcgtttcaacgtttcggcaacggcttcttgttcatcaacgcctcgcgttcgctgttgcataccgaaagcagccgcgtcggcaacaattttacacaatctagctttgtagtcttgggcctggaccggcgtcgaaaataagaaaatcatcaaaaagaaaactgaactgcgggatgcccaatttgttaccattctctttcccccatccgtccttccggaagcgatccactgatagttgaccgaaatggaatgtcactaacgaaatcatggggcacgcaaatttcttcccatccatcgcaccactcaagccaagcctaatgtaaaagagtatgcctcaagttttcgcaactcagcaaccctccatctaggttcagccttggccttcgaggtctcccccccatgtctatactgtggatgactgctatcccccgcatattcaataagttcaaattcttaagagaagggtgcaggcaatacccgcccttgtgcccaatcttcaagccggcctaggggcgcatgtgcagcggaaagaattcgcccccttcaaattcctgctcggccagaccagagcccggaggcaccccctctttccgaggtatgggatccacgcttcctttataaatacgattttgctcattggatggcggccagtcgaaaacgaggccccacttcacaccagacgaaccccttgtcgctggctcacggctgtgtccatgccgtgggatatctaaaaacaagaccagctagcacatacagaaaaggcggccccgtaggaccgcccttatttggtgcagctcagactgcttgctaacagccagcctgcgatttctgagacaggcaatctgacctgcgatcagaagcccgtcaagcctgatctacgcttgcccaacaattgccatgcgctctatcatgagccctttccatcgacaccagcaatcgcggctcatggtcgtgcgcgaactagctcagtgccaatgaggcctcttcatgcgtagactgggactggatatcggcaccaacagcattggatggtgcctgatcgaggatgactcaaagatcgttgcacttggaagccgtatcttttccgatggcagggatccgcaatcaggaacgtcattggcggtcgaccgtcgattggcacgatctgcacgccgccggagggatcgctatatcgggcggcgtggcgccttcttggaggcattgattgcgcacggtctgatgccatccgatgccgacgaagcccgattggttgcggcccgcgacccatacgagttgcggatgcgcgcgctatcagaacccctgcgtccttatgaaatcggccgcgcgctcttccatctcaaccagcgacggggcttcaaatccaatcgcaaggctgaacgcatggccaaggaccaggaggacggcaagatcgccgctgccgcgcaggatctggaccgggcgatggccgatgtcggcgccgacacactgggccaatttctgcatggcctcgacactaagcgcgtgcggatgaacagcgagagccaaggctatgatttctacccgcagcggcggcactatgagcatgaatttgcccgcatctgggaggcgcaagccgcataccacccggccctgctgaccaaagcggccaaagccgacctgtcgcgaatcctgttcttccagcgcccacttaaggcaccaactgtgggcgtttgcaccttcgttacgaacgaggagcgcctgccaaaggcacacccactttttcaggagcgccgcctgtacgaggaggtcaaccaactggaaatcaccacgccgggaggcgcaccgcgcaagctgacgatggatgagcgcaacacgctgattctgaagctgcgcaacaccggaaaggccagcttcgacggactcgcgcgtttgctgaaactgcaggacggccaaagcttcaataaggctagccagacccgaacgcacatggccggagacgaggtgttcgcggtcatgagtgacaagaagcgcttcggcaagcgctgggggcagttcgacgctgatcgccagtggcagatcatcgatcggctgatggaggaagaagaccctgaacgacttcaagcctttctgaccggcgaatgtggccttgaccatgagcaggctgcagctgtcgcacgcgcgccgctgcctgagggtcatggccgcctcggtgaatccgccagccggcgcatccttgcggcactcagggacgggcataacgaaggcgcccccctaacctacaatcaagcggtagaggcctgtggctggcatcacagcgattttcgtaccggggaatgcctggaccggctgccctactatggcgagttgctgacccgcgagattccgcctggtagccaacagcccaccgatccgccggaagtgcgctggggcaagatcaccaatcccacggtgcacatcggcctgcggcagctggagaaactggtcaacagcgtcatcgacgtgcacggccggcccgatcagatcgtggtggaactggcgcgcgagctcaagctcaatgaggcggaaaaggaggagcatgagcgccgcatacgccgcgataccgccgccgccatagcgcgcggacagcggttgactgctgagggtatcgccgacaccggggccaatcgtgccctcctgcgcatctgggaggaatcaaaccctgaaaacccgctcaataggcgctgcccctattgcggccaaccaatcagtccgcgggcgctgttcagtggggaagtcgatattgatcacatccttccctattcgcgcaccctggacgacgggatcgccaacaaggttgcagcgcaccgcagttgcaacagggcaaagggcaaccggacgccgttcgagcgctggggaagtgacccggcgcgctgggaagtgatccgtgccgaagtggcacgcatgcaccgctccaagcagtggcggttcggcccggacgcgatggaacggttcgaacgtgaaggcggcttcattgcccgccagctcaccgacacgcaatatctgtcccgactggcgggccgctatctttcggccctctatccctcaatggacgagggcagtgtctatgtgatccccggccgtatgacggccatgctgcgccggctttgggggctcaacagcctgctgccagatcacaatttcgttgaaaacgaaaattctgcggcgccaaaaaaccggctcgatcaccgccatcatgccatcgatgccgcagtggtggcagttacaacacgtggcttggtacaaagcatcgcccaggccgccggccgggcggaagataaggatctcgaccggctcttcgaaggcctgccccaaccgtgggagggattccgcgaagacttgggcgcaaatctggccaccataaccgtaagtcacaagccggatcatggccgcaaaggccgaccggcagcgaacagagacatgactgcggggcgcctgcacaatgatactgcctatggcttcaccggggccatgacggctgatggcaagacgtcaatcgttgtccaccgcatccccttcaacagcctgaaaccggccgatgtggccaatcccgaccgaattgcggatcaggccctgcatgaacgcctgctggccgcagtgggcggcctcaccggcaaggactttgaggctgcgctggcccgatttgcccgacatgacgcggtgtttgccggcataagacgggttcgggtgcgagagccgctgaacatcatcccaatccgcgatcgggacggaaggatttacaaaggtcacaagggcgattccaacgcccgctttgacgtgtggcggctgccggaaggcaaatgggtggccgatatcgtctcgatgttcgatgcccaccagcgcgaggaacggcagcgcccgcatcccgccgcaaaaaagatgctttcactgcgccaaaacgacattgtggccatcgaacgggaagcggcacctcgcgaattgatgcgcgtggtcaaattttcgtccaatggcagtctggtcttggcgccgcccaatgaaggcggcccgctgaaggcgcgtgacgctcagccaatcgatcaagacccgttcaaatataccaacacgtcggccagcaccctgaagaaatggaaggcacggcaggtgcgtgttgacccattaggccgggtctttgatccgggtccacgcgagtgaacgatggagcgtatcttcgatttcgccagcgccgtcagcgccagcgcaaaaacccagatcagctggcattattctgatcacgtgagccagaaaatgcctgaccgacacacccgtttttcaagccttagcaacaacttgacaatgtatcggtcatagcatctcagaaatcgcaggccaaccgcagccctctctgaacccccccgcgcttggtgggggtcatagcatctcagaaatcgtaggccaaccgcagcaccacgtcatcacgcatttcgagggcggcagtcatagcatctcagaaatcgcaggccaaccgcagcccgtgtcgcaagccgtgcgggtcactttgggtcatagcatctcagaaatcgcaggccaaccgcagcggccatcgcaatcctgcacgtcggatgcacttcatagcatctcagaaatcgcaggccaaccgcagctcgtgtgcgatctcgaccgcaagcccgtcagtcatagcatctcagaaaccgcaggccaaccgcagccccgaaaggactgagcgatgaacaatgtgagttatagcatctcagaaatcgcaggccaaccgcagcgctcggctcctgcttcgccgccctgccgcagtcatagcatctcagaaatcgcaggccaaccgcagcaaccaaagcagattcagttgctgccaataaacatccgaatctacctctggcggctcattgctctcataaataccctttcggcttgcgcccccgtgttcgagttgatcccggtgccatcaaatcaagagcagacataaggctttcgatcacatggtagaagactgccatgtcatgccactgctgccgttcaggcgcagtttggcctgcaccatgatagttccaatgtcggctgtctcgccggatcgtctccggccttctggcaccatgatagcggcaaacagccatgccaaacgctgccgggttgcggcactgggcgcccctcgccttgcactttgcagtgcagcgctgagtctttcctgaggtgatgttcgggaggggcaatggccgccttttcgacaggatatcagctgaagtgcatgctggacgggcacccaaatttttgcgcgctgacctcatggaagtatgagcaagtgggggagggggtccagaaattccaaaaccgtgatttctggatatttttggcaagcggtccatgtccagaatgtccaaaccccctatgggggttggactttggacgggaattttgaccgtcggtcactgccacagccaagcttcccccgccgcatcaatcgctgactgcacgtagccacccgaggtcagactagataccaggcggcgcgcttcgttgcttcgcttgttggacgctttggcggtcagggtagccgcgaccgccgcgatggcgtcctcgactttaaggcaatgtgtctgcggatcgcatccagcctggccggtttccggtgagatgctgagcgaacgcctgatggttgagagcgcagacttctggttcttccccgaaggctcgcgggggcgaaacaccgcaccagtgtcagggcccaccgcacagctgctgacctcatcgccatcgccgtcagtacccagcacgacacggtgcaactggaaggccacttgcttgccatcttcgccgtcttttaccttggcggcggaccagtggcggcctgctgcgctgcgctcaacctcaatcgctccatcaagtgccgcgtgcagagaactatggccacgcattcccttggatgcatccttgccggtatggtgaacgatcaaaaccagcccgcccgtcacctcttgtaaacgcttcattcctgcaagaatgcgccccatgtcctggctggaattttcgtccaagcccggcgccgcgcgattaagcgtgtcaacgatcacaacgcctcccaccgggagcagagcgcccagctcttcaacctgctcaggttcggccagctggaatggttgcgtcattgctttgaaggcgggaggaaggagccttccattgtgggcctcccaagcctctacacggttacgcagccctccctcggcttcgagcatgacataggtcacattgcatcgcgttgttcgatgcccgaaccagtcttggcccaacgcaatgcttgccccaaggtccttggccagaaacgacttacccgaaccgctcgggccaaatatcgcggcaataccggttgctggcagcaagcctttcacccgccactggatcggctggatagtcatgattgctgtgcggtcgagaagacggaagcggttagcggatgggtggggcgttggtgatgttgccgatgagctcttctgccacccaaacgccttagccagcatgaaaaccgagccaatggtgactggtttggcgtggcctggcttatactgtttccacgcatgctcgaacccggcgtcagtgtaacggctgctctgctgagaccattgccgcacgacctccttgcctgcttcaccatattcacggcgaacagccagcacgacgccaagccagtaatccggaaccggcgcgctgtctgggccaatgatagtccccgtaccacgcggaacgtcagacgaaatgtaagacagagcgcctgcaagcgcaggaatgccttgcgggttcggagccggcaacatctggtctagaggcgccttcgcggtgaagagagcgccagatgacccagatccgccccgttctgcaccgaatccatgcgcttcaaggtcatccagcatctgccggagttcgctggttgaaagcggcttcattcgacagccgacgccatgcgataatagcgctcgttgatacctgtatcgtccggcgcctcggtgcccttgtatgcaatcgtccccagcaccttcgtgatacgggacgcgttgaacacccccgtatccaccttcaccgtcgcagtgtcgtatttgttagccagtgcttgcagcacgttctggcaaagcaacttgctgccgtcgtcattaggaaggtcaatgggcaggtacacgtgcactccgttgccagagtttacggtgataggttcatggcctttgctgtagaacgcatacttctcaagctggtgcgccaccttgaggatttcgtcgatttcatcgtctgtagctggctgacttgtctgggaacggtcaaagtcgatcaggagatagcgacggcgaacgatatcagtatccttcacggacaggccgttatgctcgtcaccctgaaagccaggactgatggggttgaagcagatgtagatgttgtaaccctgcttgttgagcccgagagctttatccgtgaatgcgagctgacgctccgccacgttaggataagctgccggagtaaaggtgatgttcctcgtcggccgtttgcccggcacgcccttgccccaaatcgcgcgaaggtggatcgggtcgtcttgtgcgacggggaagatagcccacatcttagccatagcgctgcgctgcagctgttcggtaacgggccagatcatgccaagccctcctgcgcgtttgcatggcgaccaatgatccatgcatcgacgtcgctttccagccagcctaccgcccgcccgccgggtactatcacgaatggcttggggaattgcccccgggcgatcatgtcgaacagcttggcgctgctgacttgaagcctttcgctgacttccgcgtggcggacgatgcgaagccccgttcgcccgctagggtcaatctgtggcatatgggtcatggatcaccttcgtttgtgttgaaggctgaccatgtactgtgttggccacgggatgaggcgggccgttaaatggggccaatttcataccccctgggcgcgctacgcttcacagcgcggcggaccgctttcccacgcgcagacttccacgcccgctctaccgcgtcgtatgatttcttccgtttggcgacctgctcttcctttgcttcttcgacggttagcccccggccaccctgactggttggtcggatagcaatcgccatctcgtaaacaagttcgtcgagggaaagatcaacccgcctgcctggcctaacacccatcgcctggctcagtggtttgccacctgcgagctgccgcagaatatatgccacctgctcgcggtcttcgtcagtcagagccccagcttggacccacattgcgagcctcattaggggccatcggtatggcggcactgaccgccgatgctccgccacccaagcgcggtgggttgaactgaaattgccaggagctttagccatgccgtactccaattgcagtaaccgtcgctgcctgtggagccgtttgcacatacctcgcccaacggtccatcaacgcaacacgcttttctagctggtcttgccgcctgtatgcggcctcggccttgtcgcggatcgtatgcgccaaggcgagttcgagggtctcattggcgatcgaggtcgtctcagccgcccagtcacggaaagttgagcgaaacccgtgtggcacatactcggcatagccgggcatgcccttgataactgctagcagggcgccgttggacaaggccttcttgccgctcgggttggggaacacgaagtcgccctgcttgccagccaacatcgctcgtacaatcaccatcgccctgccgctcagtggcacgcgatgttcccggccagccttcatgcgttcggccggaatggtccaaactttggcattgaggtcgaactcatcccactttgcccccagcacctcgccagaccttgcggctgtgaggatgaggaactcgaaagccttagggctgatgcccctcttctgccgcagctcgcgcacaaacgcgtgtatctgttggtaaggaagggccggctgatgcctcacctttgcaatcttgctagccttgggcagcaattgccccagcccgcccttcagcgacgccgggttgtcgccggtgtaaagcttgcgcgccttggcccagtccatgaccgtctcaatccgctgcctgagccgggtcgcggtttccgtcttcgtggtccagatgggctccaacacagccagcacccgttccatcgtgatctggtctaccggcagcgcaccgagagttgggtaggcataggttttcaaggtggctgcccattggtgccggtgtttcgcattcttccactcatgctgcctggtcgcgatgcactgttcggctacctgctggaatgtgagcgcagttggccgcacctcggcacgctgtgccttctccgcgtcccgcaggtctttcggatccaagccgtcaatgacctgcttgcgaaacgccccggccttctcgcgcgcctcagcaagcccgcgtaacgacaccgaaccaaggccaatctcacggcgcttgcccgtgacagggctggtgtaacgaaacacccacgagcgcgcgtagccgcatgccccctctacaacttgcaagttcaacccaggttgtttggcatcggctgtgtagcctaccttcgtgcacgtctcgacatgcctgaccgtaagcgcggttcgtccagatctacccacctttgcaccctccaatgagggctagattgtagtggtggtcactggaccattcaagagcaagatagagaataagctattgatcttactggtattaaagtagccagaaggagctctctggagcccagtgagtaggactccgactccgccactacatgagcaaggttgcgaacgccggccggttggtctggcgtgtgccgcgccggggatggacccctgcggaggcaaaccatttgaaaaccccgtctccatctgtagcatcagggcgaatgcgactgatgaaggggggcagtttggcgcgacgggtgatcatcgcaggcgtgaggcgcgtttgggcggatgcgcctgcccatggctagccccgaaccgcttcggcccgtgctgacgccacggctggaccttgccgacgccgattgcttccttgatcttgagcggcagttgcgggccgccgaacgcctgcccgccgccgaactgcaggcgcggcaactggcgcagctggcccggctggcgcgccatttcgagcgccagtcgccggcgttccggcagcggctgcgggc

SEQ ID NO: 3512 - DNA, 10108 bp, synthetic construct
  misc_feature 1..10108: note = Synthetic
  source 1..10108: mol_type = other DNA
ccgggggctcagcctggtcaacggcttcgcccagcactccggcggcggcttccggctcgacagcaaggtcggcgaagggccccgcgccgagatctggctcccgcaggcgaccgcggcggcgatcacggacgacgccggtgccgacgacgcggaggcggaggccccgatggcgcgtctgcgcgtgctgctggtcgacgatcacgagggcgtccgcgcgaccaccgccgcgctgatcgaggaactcggccacgaggtcaccgccctgccgtccggtgccgacatgctcgcctcgcttgccgatggcggcggcgcctgcgacctgctggtcaccgattatgcgatgccgcaaatgtcgggcgcggagctgatccggcgcgcccgcgagcagcggccttcgctcgccgcgctcatcatcaccggctatgccgagggcgacgcgctcgccaaccgaccggccgacgtgggcgtgctcaccaagccgttcagcatcggccagctccgccgcgctctgggcgcggcgacgccggagacgccaccggctccgctgaagcggtcggcttagcgcccagccacggcgccgctcggcgcgtgcagcaggcgccagcccgccggcaggtaatcgaccgacatgtagaagtagaaggcgcagctgccgtcggcgcggtaggtgccgcccttgacgatgccgaaggcggtggagccggtgaagacgggggcgccgctgtcgccgccgcggcaggacgggcccgccaccgccacccaggtcggcaggcaggcgccgccgcacaaatctcccgccggcgcgaaatcgacgaactcaacggtggcgcagctatagccggtgcgctcgccgcgatggcagacgaaatcgccggcgcgggtgctgtcgcgcggccgccagctcgccaccgcccgcgtcgcggtcttgccgctgtcggcgaagaagtgcggcggcagcgcggtatcgctgaggtggagctgcacgtcctgatagccccagccccattggccggcgaacggcaggctcgtctccgcccgctgcgcgccgcgatggaccaggatgtcggggcaatgggcggcggtgaccaggccggtgcgcgcgccgtccgtcaccacgaagccggcggtgcaggcgtagcggcgcccgttcgccggatcgacgccctccagccgcgccccgccggcgacgagatcggtgacggcattgcccatcgtctcgacgcgcaccggcacgccggtcagcgcctgccactcggcctggtagtcgaggagcggcagcccggcgtcggcaccgttcaccagcaccaccagctcgcccgtgcgcggatcggcggcgagcgccggcgggcgcggcagcgccgcgcggatcgccgcctggtgcgtatggatcgccgccaccagctcggcccgcgtggcgcgcgcgccggtgcggtaggtgatcgggatgccgccgggcgcgacctcgtccggcaccgcagcgtcgccggtcagcagcacgacgatgcggagcgaaggcgcgtgctccacgctgatcccggcgagccgcccggcgtggcgcgccgccagcgcgtcggtggcggcgacgctcgcttccagcgccgccagccggccgagcgcatcgccgaaggaaatgtcgaaccgcgccgcatattcgcgcgcatcctgcgcgagcgccgccgccggcgtctgcacggcggtctcggcagcggcgggtgccgccgcaagaactcccgctagtagtgcccagcccgcccgcatcgacgacggtctagcgcgccgccgctgaaaacgggctgaacgatcagtccttgcccgatcccggctcggccatgctccggtgcatttcggccgacgcgccgccgccgagcaccttggcggccgccacctgcgccttgttcttgaggccgtaaacgacgctgcgctcgccatccatcatcgcctcatagccgagcttggcgacgtcggccggatcgtccttcttggcctggccgaccttggtgtcttccatgtcggcgcgctcgaagaattcggtctcggtggcgccgggcttcaggcaggtaaccgtcacctccgtgtccttgagctcgttgccgagggcgtcagagaagctgtcgatgaacgccttcgatccattgtagaccgcctggaaggcgccggcgatgtggccggcgatcgatccggtgatgaggatgcggccttcgttgcgcgccaccattccgcgcgccaccttctggatgaggtagatggtgccggtgatgttggtgtcgatgacgtggcgccattcggcgggatcctgctccaggaaggcgtggccaaggccgtggccggcattggcgaacaggaggtcgacgtcgcggccctccacctgcgcgagcaggcggtcgacgccctcgaaggttgacagatccgcctccacgttggtcacggacacgccgagcccgtccagctcccgcgaggcgtccaccagcggggtatcggcggcgaccaccaggttgtagccgtccctggccgccagcttggcgagctcgagcccgatgcccgaggacgcgccggtgacgattgcgagtttgccgcctgccatgatcgtgatctccgtctagatatggccgaatgaacccgggcgcggctccggtgttcccccgccggcggcgcaagcgaggagattgatcgatgaccgttccgaccctgaccccggcggacttccaccagccggccgtgttgctgtcgggcaccgttgattatgcgatgtaccagagcttccgcagccagctcggcacggcgccggccgaggggctggtggcgatcgaattgtcgacgctcggcggcgatccggaggtggcgcggatgatgggcgaggacgtccgcttccacaccgagctcgagccgcagcgccgcttcgcctttctcggcaaggcggcgatctactcggccggcaccaccttcatgagcttcttcgcgcgcgagaaccgctacctgacccgcggcacgcgcctgatggtgcacgagcgccacctcacccgcacggtcaacctcgacagcccgctgtcgctgtgcctgccgcagctggaagcggtccagaacgagatccgcgcctccatcgcgatccaggacgaaggcttccgcaatctcgtcgccggttcgtcgctgagcttcgaggacctggtcggcaaggccggcaccaactggtatatcgaagcctcggaggcgcagtcgctcggcctcgtcgaaggcatcatctgagcggcgggcggctccaatccttgtccgtcaccccgggcttgatccggggtccaccgtcttgagcatcgccgccttgtcgacgacgcaagaaaggtggatgccggatcaagtccggcatgacgatgggggacgagagaaacgcaagagcgaaggacggagccgccgctatgacgctggacctgtggttcgccttcgccgccgcatcgctcgtgatggcggcgatccccggccccggcgtcgccgcgatcgtcggcttcgcggttggcggcggccgccgcgcggcgctggccgcggtggccggcatggcggtcggcaacgcgctcgccatctccgtgtcgctggcaggcgccggcgcggtgctcgccgcctcggcgctcgccttcacgatcctgaagctgatcggcgccgcctacctggtcgtgctcggctgcctcgccctggcgcggagcaacacaagccccggtgcggccaagcctgccgtcccgccccgcaccgccttcttcgccaccgtcgcggtcggcacgttccaccccaagacgatcctgttcttcatggccttcgccgcccagttcgtcgatccgacgcgcggcttcctcggccaggccgctttgctggtcgcgacgttcacgatggtcgccgcgctcaccgacacgctctacgcgctcgccgccgcccgcgccgcccatcgcctggcgagcccgcgctggcggcgctggggtgcgcgcgccggcggcacgatgctgatcgcggcgggcctcgcgacagcggcgatgaagcgctagcgcagcggctcagggcgtagcgggcgcggcggccgcgctcatgcaggccgccaccgccgccttggcgtccgcgacgccggtcatgtcaatgcgcgcggtctcctcgaccaggccgtagcggatgtgcgggtagagatagcccgccgaccataattcgacctcgccccgctccagccgcttgggccaggccggcgtcacggtctcgaacaccttctcaccagctgcgcgcgcacgcacctgcgcgcggacgtagcgcgcctccacgccgatgccgagcgcgccgcgggcgccgtgccgccgcgagatctgcacgaacggggtcgcgccctggaagtgatcggatacgccgagcggccggtagcggctgccgggcggccccttcacggcggtgcaggtgccgttggcgaaccgccacaccgaccagccggcgacggagccgacctgctcggcggccggcgcggccggcgatgcagcggccatgaggaggagagcggcgatcatgcccgcataacgcccgaaacgacgaaggggccgcctcgcggcagcccctcccgtgcgatgatcggtcgcgcccagctcaggcggcctcgtcgtaggcctcgtcgcgctcgaccggacccgaatcctggcccttggcggagacgtcgcgatcgaccagctcgatgatcgcgatcggcgccgcgtccgaggcgcggatgccggccttgatgatgcgggtagagccgccgtcgcggccggcgtagcgcggcgccagcgtgtcgaacagcttgcgaagctgggtgtcgtcgagcagccgcgcatgggcgaggcgccggttggagaggccgccgcgcttggcaagcgtgatcagcttctcgacataaggccgcagctccttggccttggcggtggtggtggtgatctgctcgtgcttgatgagcgcggtcgccatgttgcggaacaaggccgcccggtggctcgaggtccgctgcagcttccgcccgccgacgcgatggcgcatgtcttttctccgttcgttcggagcccgtatgaggcagctccggccaggcggtgcttcgaggggaccgccagaaccccgaaatggaaggtggggccgtagccccacccttatttggtgcagttcagactgcttgttaacagctggccctgcgatttctgaggggagccgcttagctccgatcctgagcgaatgtcaattgccgaccgtccccgcgcctgcaaacatgagcgaggggagagaagcacatgagaaggctgggtctggacatcggcaccaacagcatcggctggtgcctcgtcgattatgacgacgcccgcgagagcggctacggggtggtggacaccggtgttcgcatcttcgccgacggtcgtgacccgaagtcgggggcgtcgctggcggtggaccggcgtgacgcgcgggcgatgcggcggcggcgggatcgctatctgggcaggcgctcggcgttcctcgacgcgctgatcgagcacaaactgatgccggccgacgcggatgaagcgaagctgatcgccgagcaggatccatatcccctccgcgcccgcgcgctccacgagcaactggagccatacgagatcggccgcgcgctcttccacctcaaccagcgccgcggcttcaagtcgaaccgcaaggccgagcgcaagcagaaggatgccgaggacggcaagatcgcatcgggcgccaaggcgctcgaccaggcgatggccgaggaaggcgccgagacgctcggccagttcctcgccggccgcgagatcaagcgggtgcggatgggcggtgagaaccaggattatgacttctacccgcaacgccgccacgtcgaacatgagttcgactgcatctgggccgcgcaggcacagcaccaccctgccctcctcaccgacaccgcgcgcgccgcgctccaccgcattctgttcttccagcggccgctgaaagagcagcaggtcggcgtctgcaccttcgtcaacagcgagcagcggctcgccaaggcgcaccccttgttccaggagcggcggctctacgaggaggtgaaccagctggaggtcaccacgccaggcgcgccggcgcgcaagctgacgctggacgagcgcgatgcgctgatcctcgagctgcgtgagaagcgtgaagtctcgttcgggcggctcggaaagcggctgaagctcgatcccgatcagagcttcaacaaggccagcgagacccgctcccacctcaagggcgacgaggtgcgcgcgatcatgagcgacaagaagcgcttcggcgacgcatggttgcatatggaccgtgatcgccagtggctgatcgtcgagaccttgatggaggaagaggacccggaccggttggcggagttcctgaaggcgcagggcttgccggaggagcggatcgccgacaccgaaaaggcggcgcgcatgctgcctgaaggccatggccggctgggcccgaccgcgacggcgttgatcctggaggagcatcgcaaggccgtcatcacctatgacgaggcggtgaagcgcgccttcccgcacctccaccacagcgatttccgcaccggtgaggtgctgcccacgctcccttattatggcgagctgctgacgcgcgagatcccgcccggcacgcagctggagagcgacccgcccgagaagcgctggggcaagatcaccaacccgaccgttcatatcggccttcgccagctcgaaaagctggtcaatgccgtcatcgccgtccacggccgccccgatcagatcgtcgtcgagatcgcccgcgagctgaagctcaacgagaaggacaaggaggagcacaacaagcgcatccgccgcgacacggcggcggcgcagcagcgctcggccaagctgcagcaggagggcatcgacgatagcggcgccaatcgcatgcttctgcggatgtgggaggaactgaacccgcgcgaggtgctcgatcgccgctgcccttattgcgcggagccgatcggcatgcgccagctgttcagcggcgaggccgacatcgaccacatcatcccctattcgcgttcgctggacgacagcgcgtccaacaaggtggtggcgcatcgcggctgcaaccgcgccaagggcaatcgcacgccgtgggagaaatggggcggcaccgagcgctgggacgtgatcgcccagcaggccggccggctgcaccggtccaagcagtggcggttcggcccggatgcgatgcagcgcgtggagaaggacggcggcttcctcgcccgccagctcgtcgatacgcaatatctgtcgcgaatggccaccacctatttgtcgagcctctacgccgacaagaaggagggcagcgtctacgtcatccccggccgaatgacggcgatgctgcgccggttgtggggcctcaacagcctgctgcccgaccacaattacgtcgagaacgagcattcgaacgcgcccaagaatcggctcgatcaccgccaccacgcgatcgacgcggcggtgacggcggtgaccacgcgcagcttgctgatgcagatcgcgcgagcggcaggacgggcggaggacaaggacctcgaccgcctgttcgaagacctgccgccgccatgggacggcttcagggaggaactcggcgacaagctcgccgccgtcaccgtcagccacaagcccgatcacggccgcaggggccgccccgcgcccggcaaggacgccaccgccgggcgcctccacaacgataccgcttacggcctcaccggcgaattcgccgccgacggcaagacgccgatcgtcgtgcaccgcgtgccgctgctcagcctcaagcccggcgacctcaccgatccctcacgcatccccgacgcgcagcttcgcgacgcgctctacgaggcgacgcgcgaccgcaccggcaaggagttcgagcaggcgctgctccgcatccgggaacgcggcatcggcaaggtcgacaagaacggccgcccgctgttcaagggcctgcgtcacgtccgcgtccgcgaaccgctcaacgtgatccaggtccgcgataagtcgggcaagtcgtacaaggcgtacaagggcgatgcgaacgcccgctacgacgtgtggcggctgccaaatgggaaatgggtgcacgacatcgtgtcgatgttcgacgcgcatcaggagcgcgcggctgatcggcggcctcatccagccgccaagaagatgctcagtcttcgtcagaacgacatgatcgcgatcgaacgtgatgattcggcagtcgaaatcgtacgcgtggtcaaattctcgacgatcggtgccatcgcactggcacctgccaacgaaggtggcgccttgaaggcgcgggatgctgctccggcagacactgatccgttcaagtatatctattcttccggaggcggcctgaagaaactcaaggcccgtcaagtgcggattgatccattagggaggattttcgatcccggcccacgctgacagcgcgcctctgctgtcttagcttctctgcgggaggggctgcatggatcgcatcgtcgacatcgcgaccgacggcctgcacctgtccacccatcgcggctttctgctggtggagcaggagcgcgaggaggtcggccgcgtcgcgctcgacgacgtgcacgctgttatcgtccacgcccacggcgtcacctggaccggcaatctcgtcgcacgcctggccgagcgcggcgctcccctcgtcttctgcaacgcccatcatcatccggtggcggtgacgctgccgctggaggggcatcatgcccagggcgcgcgcatgcaggcgcagtggagcgcgtcgcgtccgctcgccaagcggctgtggcggcgcatcgtgcaggccaagatcgtgatgcagggctcgctgctggacgcgcgcggcatcgccggcggcggcgcctttccgcacatggcgcggcgggtgaagtcgggcgatcccgacaatctcgaggcgcaggcggcgcgccgctattggccgctgctgatgggcgccgatttccgccgtgatcgcgacgccggcggcgccaacgcgctcctcaactatggctatgcggtgatgcgcgccaccatcgcccgcgccgtgatcgccgccggcctccacccgacgatcggcatccaacacgccaatcgcggcaatgcgttcgcgctcgccgacgacctggtcgagccgttccgcccgctcgtcgatgcactcgcctccagcatggtggcggaaggcgtgaccgcgcttgatcccgcgcaaaagcgccggttcgcacgcctgatcgcgttcgatctgcgggtgggcggcgagagctcgccggcgtccgtcgcggcccagcggctcacccactcgctcgcccgcgccttcgaaaccggcgggaccgagctcgccttgttcgcgccgcccagcccgatcgaatgggccaccgccggccggctcccggcgccggaatgagcgcgcgcgatgcggcccatctcagcggctatcgcctgatgtgggtgttcgtgatgttcgatctgcccgtcggcaccaagcagcagatgcgggaagcgaccaaattccgcgagttcctgctcgatcagggtttcgagatgagccaattctcggtctacgcgcgtttctgcaacggcaaggacagcctcgacgcgcatctccgccgaatcgagcgcaacctgccggagaaaggcgaggtccatgtcctcagcttcaccgatcgccaatatgagaacatcgtccgattctcgagccagcgccgcaaacgcccccgcaagaatcccgaccagctcgcgatgttctaattctgtccccgcgaaaaagcaggccggatgggcgggtttgcagttggagttcaaccacttaccagcccatccggcctaccagctcagaaatcgcaggccaaccgcaacccatttggaaaaggcttgtggtcgacgggtggcctaccagctcagaaatcgcaggccaaccgcaactgcgcaacgcagaaggcgttaaggtcggggggcctaccagctcagaaatcgcaggccaaccgcaactgcgcaacgcagaaggcgttaaggtcggggggcctaccagctcagaaatcgcaggccaaccgcaacggtaaatgcgttcgtacggctgg

SEQ ID NO: 3513 - DNA, 9762 bp, synthetic construct
  source 1..9762: mol_type = other DNA
  misc_feature 1..9762: note = Synthetic
acccccgtgggatatttgtgccaatgtgaaagagcagcgtcgccgcttcatctgttcataaatatcctctgggggtgcggggggcgaagcgcccccgctgccatcaggtgccgccttcaggtgccacggggctttgccctcattgtcggttcggcgacggtcggatcttcgggccaggggtgccgggggtactggccgcgcatgtctttcctgacatcggcataggaggtgcgccagaaattcgggatgtccatcgtcacctggataggcttttgtcccggcgacagcagggtgacgcgcaggggcaggcggtttcggcccacggtggggtgggtggtcacgccgaacagctcttgcaagcgcagctcgatgccaggattttcgccatcgtagtcgatgggaaccttgcggcccaagggcgtttcaaaatgggcgggcacaaggcggtcaagctcggcctgttgctcccatgtcagccgcgctttcagggcgttggtcaggtccagtccgcgcaactcgccttcggtccgcatgggtggcaaatgaggcagaagccagtcttccagtcccgccagcagggctgtatcgctgcaatcgggccagccgtcgccgccgccgcgcgccagttcgatgcgtgcccgcaggcggcgggcagaaggcacccaaggcaggccgatctggcgtagcccgtccagcgcagcgcgggcaagcgcctgtgggtctggcacggccagggggcggtcatccagtgcaatcgcgccaaacatctcttgccgccgcgccaccacgcggccctcgcgccgcgaccattccaccacctcgcgccagtggatatgggcgccatgcaccgcccgcagttcagcctcggaaatcgccaccgcttgtcggaccgtcgcatcgcgcgcatcgccgtcaagatcggtcgccacgatcagccgcgcgcccgccagcggcgtgcccggctccatcgtggcccccttgccgccagaaagcagccagcgcggcgcatcgcccttgcggcgcagccctaccctgtcgggataggccagcgccgccatctggccaagcgaatacccagcaccgtcacccgtcccgcgcgccagacgccgcgcctcttcccggatccgctcgaccaccgggcgcgacaggggccaagggtagtcacgctcataccccttggggtccgtcaccgcgttcaaacgcagcgcaaggtcgggcggcgcgccgcgaatggggtcacgctctgccatcagcgcggcaaggggcgcggcgtcagcccccgccacggcaagcatatggccaagacgcggatgcagcggcagcgccgccagttttcgcccgtggtcggtgatacggccctgatccagcgcgcccagcccttccagcaggccgcgcgcctcggccagtacgccggggttgggcggtgtcaggaagggcagccggtcatcgccccaaagcgccagttccagcgcaaggccggtcagatcggcgctttcgatctcggccgggggaaagggctgcaagccgccttcctcgcccttggtccacatccggtagcaagtgccgggcgccacccgccccgcgcgtccacgccgttgttcggcttcggccttggtcacccgttcggtcaccagccgcgacatgcccgacccggcatcgaaccgcgaccgccgtgcgcgaccggcatcgaccaccacccggatatcgggcagggtcagcgaggtttcggcgatagaggtcgccagcaccaccttgcgccccggcgcgggggccagcgccgcccgttgcgcggcaaaatccatcgcgccgaacaggggccgcaccgcaaagccattccccagccgcaatgctgcttcgacccgccggatctcgccctcacccggcaggaacaccagcaccccaccctcgaggcactcttccgccgcctgtcgcaccagccccgccacagccgcctcgaaccgcatcgaggcatcgacaggccggggcaaccagcgggtttcgaccggaaaggcccggccttcggatgtgagcagggctgcatcccccatcagcgccgccaccggcgcggcgtccagcgtggccgacatcacgaccagcatcaggtcgtcccgcagcgcaccgcgaatctccagggccagcgcaaggcccagatcggcattcaggctgcgttcgtgaaactcgtcgaaaatcaggcagcccacgccggtcagttcggggtccgactggatcatccgggtcaggatgccttcggtcacaacctcgatccgggtggctttcgacaccttcgcctcgccccggatgcggtaacccactgtctgaccgacgctttcgcccaaggtctcggccatccgttctgccgccgcccgtgcggccagacggcgcggctccagcatcacgatgcggcccgtgacaaggggcaggatgtccaagggcacccgcgtggttttccccgcgcctggcggcgcctgcaacaccgcctgccccgtcgcggcaagggcggcgcgcagggcgggcagggcatcgtctatgggcaggaacggcaggtcggtcatggcccgcttatcgccgtttcagcctcacctttccatagagcgtctgcacctcggcatcggccagcacatgacccgccccctcggccacatagcgcaggcgcaacacgaactcctgccgctctgccatgtcttgcgggcgataaccggcaatccgcctgtagtgcccggcacaacggatgccatcgtcgccggaggaacctgcttccagcactagggcgctaagacgctggccgtcaaacacctgaaagccttgcccgcatatctgtgggcccgacagaacgaccagaacggcgctggcagggtccagcgcgccttgcaccacaccaagccccggcgccggcacatcttcgaccgggtctgcgtgatacaggatcacccttgccccatccgcctcccagcgcagttcggcctgcgagacccgccgtccggtatcggcgcgctcgaaatagcgcaatggccgaagcagatcgccctgccgaccggaggcccgcccctcgaagcgcacggccctgaccacgcctgccagcccggcgctgcggatcacaagctctgcccgatactcgggtgcccggctttcggtgcgcagggtcagccgccctacccgcaaggggccataggtcacgtcatagtcgaagatctctgcccccgctgcaccgcctgccagcagccacaggccaaggacgatttcacgcaaggccatgcgtcgcctccactggtcaacccctgccgcttacggctagatggggccgatttgcaaaacgggtatgacgaggcgggcatggcgacagtggcggaactggcaaagggcattccggcaggcgaccggcgcagccttgcccgtgccatcacgttggtggaaagcgcacgggccgatcaccgggcgcaggcggcagagctgctttcggccctgggaaccagccggcaggcgctgcgcatcggcctttccggcacgccaggggtgggcaagtccaccttcattgaggctttcggattgatgctgacggccatgggaaagcgcgtcgccgttctggcggtcgatccctcttcggcgcgttcgggcggctcgatcttgggcgacaagacgcggatggagcatctctcgcgcgatcccatggctttcatccgcccctcgccctctcaggcacagatgggcggcgtggcgcggcgcacgcgcgaggcggtggcgctgtgcgaggcggccggtttcgatgtggtgctgatcgaaacggtcggggtgggccagtcggaaaccatggtcgccgatatgtgcgaccttttccttctcctcctcgcccccgcaggcggcgacgaattgcagggggtaaagcgcggcatcatggagatggccgatctgatccttgtgaacaaggccgatggcgacctgaaacccgccgccctgcgcaccatggccgattacgccggagccctgcatctgttgcgcaaacgcccgcaagacccgccgggtttcccgaaggcgatgacggtttccgccgtcgaacaggccggtctggccgaggcgtgggagcagatgcaaaccctcgccgactggcgccgcagccatggccactggaccacccgccgcgccgaccaggcccgcaactggttcgaggcagaggtgaggcagggccttctgtcggccctgctgcgcgaacccgccaaaggcatcatggcgcggctgggcgatcaggtcgccaccggagaagccacgccagaggcggcggcggcggaaatgctggggctgttggggaaggggtgaggggcgggcagaaatgcgcctacggaatttattcgcgtgagtgtttgcggcgcgataggcggataccggactgacggcggtgcggcatgcctgcatagcaaccatgggcaagcgaccgttcgcggctggcagcattccaaccgacgttgtatcatttgcaaccaagatcatatggaaatcactaagaattccccaaacacttatgttctaccgggaagaaacttccgtatgcttggagccagccaaacagcaggtttcgtcagtatcagggcagaagtcacagacccagccattgagactgcatagaaaaggcagggccgtagccctgcccttatttggtgcagccaaactgcttgttaacagccagcctgcggtttctgagccttaaccttggcatcgaaccgagcgaaggtcaagacaacccagaaccgcaggccgaccgtaaccaggaaccaccatttctcaccgcatggaatgaagcgtggacttattggcgccccctgttgtggacgcaggggcacccgttactttggcttttgcgcagcggacactttgctgacctgtccgggactgggggtgaacccagccggacaggcgaccgtctgcggttactcctcttgccgggccgcccgtctcgcatcaatagttggtttccaggggaccaagaggcgcggaatgaccactacactcggcatcgaccttggcacgtcttctctgggatgggcgctgctcgaagacaacctgcgcatcatcgacctcggcgtgatcatcttcagcgccgcggccggggcgggacgggatccgcagtctggtgcccccttggccgagggacggcgcgaggcccgctcggcgcggcggcggcgcgacaggttcatcggccgccgttcggccctactgggcaagctgatcgcgcttggtctcttgcccggcgatccgccttcgggcgagggccgccgatgcaatgaagcggtgccgaacgcccagaccaaggcgctggccgatatagagccctatgacctgcgccgtcgcgccttgtcggaaccgctgtctccgcatgagatcggccgggcgatctttcacctcaaccagaggcgcggcttcaaatcgaaccgcaaggccgaccggggccggaacgaacccgagacgggcaagatcgctattgccgggcaggcgttgaccgaggcgatgggtaagcgcaccctgggtcagttcctggcggagcgcatcgacggaggcctgcctgcccgggtgcggatgggcggcgagaaccaagcctatgacttctatccgcagcgcagccatctggaggcggagttcgacgcgatctggcaggcgcaggagcggcatcatcccggcctgctgaccgatacggccagagcggcgatccaccgcatcctgttcttccagcgtccgctgaagacgcccgaggtaggctattgcacctttgcgggtatgggcggcgtgccgcaggatgaccgccgcttgccgaaggcgcatccgctgtttcaggagcggcggctttacgaggaggtgaacaacctcaagatcgtcagtgccggggccgccccgcgcgatctgacgcgagacgagcgggacatgctggtcatggccctgcgcgacaagaagcagatgaccttcgccacgctcggcaagaaggtgctgaaactggccgagtgtgagcggttcaacaaggaaagcgagacccgcaaggatctgctgggcgacgaggtgcgtgccgaaatgtcggacaagaagcggttcggcgaccgctggaagcacttcccgctggagcggcaattgcagatcatcgaccggctgcagaacgaggaaaacccctatgtgttgctggactggttgaaatcggattgcggtctggatgaggcggcggcggtggcggtggccaaggcgaatctgcccgagggccacggccgcttcggcgaaaccgcgacccgccggttgatcgaggcgctgaaggccgaagtcatcacttatgacaaagcggccgacaaggcgggcttccatcacagcgacttccgcaccggcgaggtcttcgaccttttgccttattacggtgaaatcctgaccaaggagatcgcgccgggcaaggccgaatacggcgacgatctggagcgccgctacggcaagatcactaatcccaccgtccatatcggcctgcgccagttgcagaagctggtgaatgcggtgattgcccggcatggcaagccagaccgcatcgtcatcgaactcgcccgcgagctgaagctgaacgacaaggagaaggaggcacatcagcggcgcatccggcaggatactgcggcggcgatacggcggggcgaaaagctggttgaggcgggccatgccgatagcggtgccaatcgcgcgctgatgcggcagtgggaagaactgaacccctcaaacccgctggaccgccgctgcccctattgcggcgagccgatcggcatggcgcagatattcaacggtctggccgatatcgaccacatcataccttactccaagtctctggacgacagcccggcgaacaaggtgctggtgcatcgggcctgcaaccgccagaaagataaccttactccccatgagaaatgggggcatgatcccgacagatgggacatcatctcgacccaggtcgcgcggatgcatcggtcaaagcaatggcgcttcggccccgacgcgatggagcggatagagcgcgacggcggttttgccgcgcggcagctgaccgacacccaatatctggcgaagatcgcgggcaaatacctgcgcagcctctaccccaccgctgaggatggacgggtcgatgtcattcccggccggatgaccgcgatgctgcgccgggtctgggggctggacagcctgctgcccgaccacaacttcgtggagaacaagcactctaatgcgccgaagaatcggctggatcatcggcatcatgcgattgatgctgttgtggcggcggtgacatcgcttgcgcttatgcagaagatttcaaaagcggcgggccgggccgaggaaaaggaactcgaccgtatcttcgagaaccttgatcagccttggccgggtttccatgaggaacttggagaacgcatccggcgcaccgtagtcatgcacaaacccgaccacggccgcagcaccaaaccctcacgccaccgcgatgtgacggctggcaaactgcatgatgaccaaccctatggccttaccggaatgaccggcaaagatggcatcatgccgattgtggtcaaacgaatacccctctcaaaactcacgccagctcagatctctgaccccgaaggcattccagactctgccctgcgcaacgccttgtggttggcgacccgagattgcgacgggaaagaatattctcgcgcactggaaagattctcaaaggatcatccggtgttcaaaggcattagacgggttcgtttccggtcagcccttacggtgatcccgatccttgaccgccacggaaagccttacaaagccgtcaagggaaatggcaatgatcacattgatatctggcgtcttccgaacggcagttgggtttctgatgtcgtttctacctttgacgctcattcgatggccgcgggagatcgaagatgcctccctcttgccaaagaacgcggctttgaccatccagccgcgaaaaagatcctaagcattcgacaaggcgatattcttgcaattgagcgcacgccggatctggttgacctgtttgtcgtgcgcaatttcaatcaggctggtcgcctgacgcttgcgggtgtgaacgatggcgggaatcttgatgcacgccacaattcatccgaagatcccttccgatatatttatatttccccgggctctctgaaaaaggccaaggcacgccaggtccgcatcgacccgctcggccgcgtcttcgaccccggtccgcgcgaataagaggggcgagggatggaccgcatcgtcgatattgcaaccgacggcctccatctctcactccaccgcggcttccttctggtcgagaagggccgcgccgaggtcggtcgcgtggcgctggacgacatccatgccctgatcgtccatgcccacggaatcacctggaccggcaacatcgtcgccgccttggccgaacggggtgcgccgatcgtcttctgcaatgcctcgcacgcgccggtcgccgtgaccctcccgctggacggccaccacgcccagaatgcccggatgcaggcgcagatcggagcttccggccccctgatgaagcaactctggcgccggatcgtctcggccaagatcctgatgcagggcgcgctgctctcggcccgtggcatcgcgggcgcagaggccttccccttcatggcccgccgcgtcacctcgggcgacaaggagaaccttgaagcgcaggccgcgcggcgctactggcccctgctgatgggtcccgactttcgccgcaaccgcgacgcgggcgatgtcaatgcgctattgaactacggttacgccgtgatgcgggcgacctgcgcccgcgccatcgtcgccgcaggcctgcacccgacgctcggcatccaacattccaaccgcggcaatgcctttgccctcgccgatgatctgatcgaaccgttccgaccgctggtggactctttagccgagacaatgatgcgcgaaggcgtcgtccgcctcgacccggcgcagaaacggcgtttcgctcggttgatcgccttcgacctgcgcatcgccggtgaaacatcgcccgtctcgatcgccgccgcccggctggctcaatcgttgggcaaggcgttcgaaaccggccgccccgacctcatcctcttcgatccgcccggcgcactcgactgggccgcgctcggtcgtgacgagggcggtggcgggtgaagaaggatccttcgtatctgagcggatacaggctaatgtggattttcgtgatgttcgacctgccggtgggcagcaagaaggaaatgcgggatgctacgaagttccgcgagttcctgctggatcaaggcttcgagatgagccagttctcgatttatgcccggttttgtaacgggaaggacagctacgagtcgcatctgaagcggatcgagggcaacctgccagagaaaggcgaaatccatgtgcttaccttcaccgacaagcaatacgagggaatcgtccgattctcgagtcaacgccgccgcaagccccgcgaaaacccggaccagctggcgctgttctagttatgtccaagatttggcatcgcctggatgtgccgattacttattttttatcaataagttactgacacatccaggttagcgcttcagaaaccgcaggccaaccgcaacgatgtgaggcccatcttattggcgaccgccaggttagcgcttcagaaaccgcaggccaaccgcaacctcaaagcacggcacctctgcatggagagccaggttagcgcttcagaaaccgcaggccaaccgcaac

SEQ ID NO: 3514 - DNA, 5843 bp, synthetic construct
  source 1..5843: mol_type = other DNA
  variation 479..613: note = note, n is a, c, g, or t
  misc_feature 1..5843: note = Synthetic
ctgctgataccactcaacttaatttcggatcaggctcttagcgcgcacagcgccgaggaactcgccgcagtggccgccacgctcaacgccagaccgcgaaaaacgttgggatggaaaacaccagcagaagcccttgaccagtggttgcgataggcagaaatcgtcggtgttgcgacgacggattgaaccggccctcgatccccaggtccttgtgatgggtgcctatgaaccccatcaccatttctcgcggcgccaaggggattcaggctcgctccgcctgcgcaaaatatgccgacgccttgcgcaagatctcgttggcgcggcgcagctctttcacctcgcgctccagcaacttcagccgagccttgtcatcggacgtctgcgccgctggcgcgcttcgtcggctcgcctcctcgcggcaccagcggcgcagcgtctcggtcgtgcagccgatcttgccagcaatcgacgtcaacgcnnnnnnnnnnnnnnnnnnnnnnnnnnnnnnnnnnnnnnnnnnnnnnnnnnnnnnnnnnnnnnnnnnnnnnnnnnnnnnnnnnnnnnnnnnnnnnnnnnnnnnnnnnnnnnnnnnnnnnnnnnnnnnnnnnnnnnnccgctcggtcgcagacctcaggcgaaaatctgttcgatctctaactcatagtgcaggccccttctcacattcaggagcctccggaaaacccgggacggttcagcaaagctccgagcggccgacatagcggcgttgatgctggcagcagtggtcgacgatgttgtcgtgtgggaagcaccggtttccacctaggccgctgctggctctgagcagcctggtcaggcaggaaagggtcttcgatcaagtgtgagcgtagttggcgaaaacggtggcatcttcggacccgatcgtgcgcgctcacaaccgtttcccctgaatactccaacaaacagaaaaggcggccccgcaggaccgcccttatttggtgcagttcaaactgcttgctaacagccagcctgcgatttctgattagccacgattacccgacggatcacaagctgtcaacttcaatctaaaatcgcaggccaaccgcagcatactaccattgaggaggatgaaactgcatcgcttcgcaagcttgcatagccaatcgctagtataggcgttgacgaccaggcgttgaggaagcattggagtcatctcatccgcctagcgcagttgggtggttgcgggaacgagcgagggcggcggaagtcgtcctcgccattctaagagggctggacatgcgcagactcggactcgacattggaacaaacagtattggatggtgcctgatcgaggacgatgcgaaaattgtggctatcggctcgcgcatcttttccgatggtcgcgatccgcaatcaggcacgtcgcttgcagtcgatcggcgggaggcacgtggggcgcggcggcggcgtgaccggttcctggggcggcgaagcgcctttctcgctacgcttgttgaatatgggttgatgcctaacgacaccgatcaggcgaaactcgtcgccgaacgcgacccatacgctatgcgtgcgcgggctctggcagaaaagctgcacccctacgaaattgggcgcgcactgtttcacctgaaccagcgacgcggcttcaagtcgaaccgcaaggccgaacgcaaggcggaagacactgaggatggcaagattgccgaggcagccaaggcgcttgtgcaggcgatggccgaggagggcgccgaaacgctcggccaatttcttgcagggcgcgaaacgaagcgcgtgcgcatggatagcgagcgccagatatacgatttttacccgcagcgtagcgacatacagcatgagtttgactgcatctggagggcgcaggcagcgcaccaccctgatcttctcaccgacaccgcacgcgatgcgcttgctcgcatcctgttcttccagcgcccgctgaaagagcaggaggttggcgtctgcaccttcgttacagaggagcggcgtctgcccaaggcgcacccgctgttccaggagcgccgcctatacgaagaggtcaaccaactcgaggtcacgacgccgggcgagaaatcgcgcaagctgacggtccaagagcgtgacgcactggtcctcgagctacgcgacaagcgcgaggttagttttgcgcggctcgcaaagcgactgaagctcgacgacggccagagtttcaacaaggcgagtcagacgcgaacgcacctggtcggggacgaggttcgcgcattgatgggcgacaaaaagcgcttcggctcagcctgggcgcatctcgatcgtgtgaggcagtgggaaatcgttgagcgggtgatggaggaagaaaacccggaaactctgcacgcatttctgacccgtgagtgcggccttcatgacgaacacgccctcgcaacggccaaggcaccgctgcctgagggctatggccgcctcggcgaaaccgccagccgccgcatcatggaggcattgcgtgatggccacgacaacgacgcgccgcttacctacaatcaggcggtcgaggcttgcggatggcatcactcggatcaccgcactggagaaatccttgattgcctgccgtattacggcgaactcctgacacgcgagataccgccaggctcgcaattgcccactgatccacctgagattcgctggggcaagatcaccaatcccactgttcacatcggacttcgccagctcgaaaagctcgtgaacgcactcatcgccgtgcacggacgccccgaccaaatcgtcgtggaactcgcacgcgagttgaagctcaacgaaaaagagaaggaggagcacgaaaagcgcattcggaaagacacggcggccggcatttcgcgcggccagaagctgaccggcgagggcttcgccgacaatggcgcgaaccgggcgctgctccggatctgggaggaggccaaccccgccaatccgctcgaccgacgctgcccctattgcgggcagccgatcggcatgcgcgcgctgtttagcggggaggccgatgtcgatcacatccttccctatcgtcgcacgctggacgacagtatcgcaaacaaggttgttgcacaccgccactgcaaccgcagcaagcgcaacctcacgccttacgagaaatggggtccggacaaaaacccggcacaatgggacgtcattgcagcgcaagtagcgcgcatgcaccgctcaaagcaatggcgcttcggcccagacgcgatggagcggttcgagcgcaacgaaggcttcatcgcgcgccaactgaccgatacgcagtatctgtcgcgcctcgcgggtcgctatctttcagcactatatccatcgaaggacgacggcagcgtttatgttattcccgggcgcatgacggccatgctgcggcgcctttgggggctcaacagcctcctgcccgatcacaacttcgtcgaaaacgagcattccggcgccccgaagaaccggctcgatcaccgccatcacgctatcgacgctgccgtcgtagctgtcacgacacgcagcctgatgcagcaaattgcgcacgctgcaggccgcgccgaagacaaggacctcgaccggctgttcgaggatttgccgcaaccctgggacgggtttcgcgaggaacttggcgaaaggctgtccgctgtcaccgtaagccacaagcccgaccacggacgcaagggccgacccgcgaagaatcgcgatgtaacggcaggtcgcctgcacaacgataccgcctatggattcacgggtgcattcgctattgatgggaagacgccgatagtcgtgcaccgggtgcccttcagaagcctcaagcctgccgatgtcaccgatcccaagcgcattgccgacagggcccttggtgaccgtctgcgcgcatatactttgggcttgaccggcaaagatttcgaaagtgccctcgcccgctttgcaaagcatgataccgtgtttgccggcattcgtcgggtgcgcgttcgcgaagcgttgaatgtcatcccgatccgcgaccgagacggcaaggtgtataagggccacaaaggcgattccaacgcgcgtttcgatgtctggcggctgcctgacggcaagtgggtgtcggatattgtgtcgatgttcgacgcccatcttcccggcgagcgcgcgcggccacatcccgcggccaagaaaattctctctcttcgccagaacgatatgatagccattgagcgtgacgggggtccacccgagctgctacgcgtggtcaagttttccagggatgggcaaatggcgcttgcaccgcataacgaaggcggatcgctgaaggcgcgaaacagtctgccggtggagcaggacccattcaaatatgtcttttcttcagccggcggactcaagaagttgaaggcgcggcaggtgaggattgatccgctgggtcgcgtgtttgatcccggaccgcgctaaccggcacgagcagcggaggcgcccttggaacgcatcgtcgatattgccacggacggccaacacgtccgcctgtatcgtggtttccttctcgtcgagcgtgagggcgttgaggtcggccgcgtaccgctggatgatgtgcatgcgcttatcatccacgcacacggcgtcacctggagcggcaacctagttgcggcactcgccgagcgaggcgcgccgacagtgttctgcgcagccaatcattcgcccgttgctgtgactttgccgatcgaggggcaccatgcccaagccgcgcgaatgcgcgcgcaacttgctgcttcggggccattgcagaaacagctttggcggcgcgtcgtgggcgccaagatttcgatgcaaggtgcgcttcttgtgcaccgaggaagcgaaattggaaccgggcttaccgtcatggcgcgtcgcgtcaaatcgggcgatcccgaaaatctggaggcgcaggcagcgcggcgttattggccagcgctgttcggcagagactttcgccgcgaccgcgacgcgggcgggactaatgcgctattgaattatggctatgccattgtgcgcgcaaccgttgcccgcggggtcgtcgcggcgggccttcatccaacgatgggcatacaacacagcaatcgcggcaacgctttcgctctggcggacgatcttgtcgagccgttccgccctctggtcgatgcgctggttgctttgatggtcgacgaaggcattgacgctcttactccagcaagcaagcggcggatggcgcggctgatcgcgttcgacgtccgaattggaggcgaagcgtcaccggtttctattgcagcgcagcgcctcgcccaatcgcttgcgcgaagctttgagttgggtcgggctgaactcgctcttttctccccacctttgccgatcgagtggggtgcaattgggcgcatgtcagatgagaattcggcatgagcgaccaatatcatctgagcggatatcgtctgatgtggattttcgtcatgttcgatctgcccgtcgggaccaaacagcaatcgcgggaagcgacaaaattccgggaattccttctcgatcagggtttcgaaatgagccagttctccgtctacgcccgcttctgcaacggcaaggacagtttcgaatcgcaccttcgtaggatagcgggtaatcttccccaaaagggtgacatccatgtgctcagcttcacggataaacagtatgagaatatcgtccgattctctagccagcgccgccagcgcagtcgaaaaagcccagaccagcttgcgctgttctagttttgtccgccagaaagcgtctgccggatgggcctttttctcaagccttagcaacgacttgatagcacatctggcttagcatctcagaaatcgcaggccaaccgcagc

SEQ ID NO: 3515 - DNA, 23468 bp, synthetic construct
  misc_feature 1..23468: note = Synthetic
  source 1..23468: mol_type = other DNA
ttggtgattatatccggatgagacgtctttcgcttgcggcagatgagctcaggagcagcaatgacaagatcatcgatattgctctcaggtacggatatgagacgccggagagctttacacgtgctttttcacggttccatggtgtaacaccgaccgaagccagaaacggcggtacggtcaaatccttttcaaaactgtctgtaaaactgatattgacaggaggtaaagaaatggattacagaattgagaaaccgggcgcgatcaaagtgatctgcaaaagagaatttgtacaccaacctgaaaccggagccgggacacctgatatcactggattctggacaaaatgcggacaagatggaacaatacagaagatttgcagctatatccccgaaaagccgaggatggccgggctgcttgggatctgtttttcgctcgagacagaaggagatatgttcccgtatggaatcggcgcagagtataatggtgcactggtagaagaaggtcttgaggtaattgaacttccggagtatacctatgcggtatttccgtttaaggggaagatgccggaggtattcatcgagacatataggaagatcgtaagcgagttcttcccgagcagcgacaggtacgagtatgccggaggagttgagatcgaagtctatccttcggacaaaacggatgacccgaactattccggagaaatatggatcgccgtcaacgagaaagaataatatattcgagaggtatcagcagtatgagcaaatatgaaccattgtggaattgggtaaaggaaaacggcacggacagttttaaactgacatttgaagagatagagaagattgccggtataccaattgatcattcttttctgaattacaagaaagagctgcagagttacggttttaaggtggggaagatctcactgaaggaacagacagtgacattcggaaaagagtaatacggtttgaatgttttatacagctatatttgagacaaacaaagctcctcactaccaatcacggcggtggggagctcttattatgcctcaatgtctattgtgatcccggacttgaagttgacggtgaagtgatcctcgaaaactgtgatcttggcgatgtgccttgagaccagcatctcgtcaaactctgtgatgtcggtagcctgcttcttgatgaaatcttgcaggtctttgatccgtttcatctggtcatcgcgcagaaactcgacccgtgccgtgcttgtacgaagcgccgcttatgcttgaaaaatccaacttttcgtcggtcgttttaagagagttgcatatcgacaatattgcggaacccgaccttaacgattggaaacagatggttaaagatatcaaaacggcgaaaaagcacgttactatcggtcttgtcggaaagtacgtgcaacttcacgacgcatacctttccgttgcggaagagttaagacacgcgggatactgtgtacccgtggggaaaaggcgcacacaagcataagagtgagcattattgcctgcaataatgtgatttcaaaagtgaagtgtgcgacgtgggcaagtgatgtgccttacggcgcgatgctttgcaaaaagcaaagcgatgtttctctctttgagagaagataaggaaaaaatataaccgtttacggagtaaacgatataactaaaacagcccgccgtcaaaacggagggctgttttttcttgatttttgtggggattacccctttgtcttttttaaaagtgcagattacagtttcatcgcgacgtcccatgcgcgccagataaccgtacgcaggttgccgatgccgttgcagtcgccgacaagtttcacgccgtcttttgcgacgggggtgggaatgtagccgacagacataatcacgctgtcgcctgcgatttccgactccttgccggttttaaggtctttgaccttgacgcctttgtcggtgatttcgacaagaccggtgttcgtacgtacgtcgactttgttaagcgcgaagaagtcacggagatacgaagtgttcgcaaggcagacgcctctcattgcgacaaggtcgtttttcatttcgacgatgacgggagttttgcctttgttgtaaaggtcaagggcgatttcgcaaccggacaagccgccgccgatgacgatgactttgttgccgacttctttggtgccaagcagatattcgcacgcttcgacgcctttttccgcgccgggaacgcgaagttttcttgccttgctgcccgttgcgacgacgacttcgtccgcgccgagcttcgcgatgtcttcgggtttgacctcggtgttaaattttacttcgatattaaggtctttgatttccttttcgtaccatttgataaggtcgcggtctttttccttaaacgaaggcgccgcggcagcgatgaatacgccgccgagaacgttcgacttttcgtaaatcgtaaccttatgtccgcgcagggttgcgacgcgcgcgacttccataccgccgataccgccgccgataactgcgattttcttgggacgagcggctttgacgattttgtattttttgctttgcatcgtctgcgggttaagggcgcagcgagccataccggcgttgtccgcaagggtttggtcgttgccgacgagttgtccgtcgtcgcctttgtaggaagccatatcgaagcaggcgttgtggcagcagatgcaggggtgaatcgacgcgatatcgtcgttcataagcttggttacccatgcgggatcggtaaggaactgacgagcaacgcccaagccgtcgattttgccttcggcgattgcttccgcgccaacgtcgggttccatacggccggcgcacacgacgggaatgtcaacgaattttttgatgtgagcgacgtcatcgaggttgcagttttgcggcatatagggaccggggtgagcccagtaccaggcgtcgtatgtgccgttgtcgcagttgagcatatcgtagccggcgtcttggagatattttgcggctctttcgctttcttccatatcgcggccgacctcaacgtagtcttcgccgggaagcgcgcctttgccgaatcctttggttttggaaacgacggaatatctcaaagaaacggggaagtcgtcgccgcacgcctttttgatggctttaacgatttcgacggggaagcggtatctgttttcaaacgatccgccgtattcgtccgtcctttggttggtgtatttcatcgtgaattggtcaagaaggtagccttcgtgaacggcgtggatttcaacgccgtcgacgcccgcgtccatgcagagtttcgcggtttttgcgaaagcctcgaccattttgtggatttctttttgagtaagggggcgagagatgcaggattcttgccatctgttgggggttgcgcttgcgcttgcggtaaggtaacttacgtcaagggcgggtttcaagacggttgcaagggctttgttgtgtaacgcctttaccataatgtcgttgattgccagcgacctaccgaagcctgccgtaagttgtacgaacatttttgcgcccgttttatggaactcgtccataaattctttaagcttattaaactttcctttgccttgataaagccatttcccgagaaggatatccctgatgggcgcgatgccgggcaggataagaccgacgttgttctttgcgcgttcaagcaagaagtttgcggcttccttgtcaaagtggttgggctccatccagccgaagattgacgtaccgcccatagaagtcattacaatgcggtttttgatttcgcaattcttgattttccacggcgtaaacaggctttcgtattttgaatccataacatgcctccaaacacataataatttaatagtaacaaaaatatattacaataattagcgtcaaaaatcaaccgctgcgataaatttttaacgagcgcgcaaaaaaaatcgtaatattttccaaaatatctcaatttcacaaaaacatattaaaaccctgcgataagcgtgcgtttttgcaacgaaataaccccgttctgcaaaacggcgcggataaggcgtatttcggcacattgcaaaacaaagcgttaattgtttaaaaacgatatgttaaatgttgatttatgctatatttacaaactgccgcttgtgtattaaagtaaatccgcatttatttttagttgaaatatttcgcgcggtatggtaaaatatcgataaataaagaggtgtctatgagcgaattcgaaatcagcttattatgttcgtccgtgataagttattatcaggtgcagaacgggatatcccccgtcaaaaggctttacgtcagaaacgcgtccgacttcgactgcgaaaatatcgaaatcagcgtgtcgtcaaagcccgattttttgctgcccgtttccgaaattcaggcggtgtttcccgcccgcgccaatctcagattcgacggcatcgcgaaactgtcgcccctttatatggtggcgcaaaacagaaagcacgacggcgaaataacggtgcaggtattgaaggacggcgtcgtcctggaagaatcgacggaaagggtaacggtgcttgcttttgacgagtgcaacgtggataaacccgaaagtatcgcgactttcgtccgccgcacgcccgacgtcaacagacttctgaacctcgcgcacaaaaagattgcggaatggggctttaaggacgttaccggcacgggctatgcgaacgcgtcgaaaaacaaagtgcgaaatctctgcgccgcgacgtatgcggtactttgcgaccatggattccttatgggcaagaaaacgacggcggacagcgtcatcgtggccgatttttcggaaatactttcggacaaggtagcaacgccgatggaacttgcgctgatttttgcgtcggtgatcgaaagcgcgggatacaatcccgtcgtcgcgaaatatgacaacagctggtacgtcgcatgcttccttaccgaagaatgtatggcggaagacgtgttcgacgatatgtcttacgtcgcgaaaaaagcggcggcgggagtcggtgaagcgacgcttatcgacatttcgggcattttcaagggcgaaagttttgaaaagtgcgagaaaaacgccgtgtcgttccttaaaaaatcgccgaccgtcgatttggcggtcgatataaaacgcgcgcgtatcatgggcatactgccgcagtctgtccgcgtgaaaacggagggcggatacgaccttgtcgaaagcgacgattataaacaagccgctccgccgaaaatcaaagaatacggcgaaaatatcggcggcgaaagtctgttcacccgcgaaaaacagtgggaacgccgcttgctggaactcgatcttcgcaattcgcttttgaatttcagggtgtcgaataccgccgtgaaaattctcaccgcgtcaatcgaaacttttgtcgaaaacgtcacgcacgataaaccttatacgctcacggcgcaccccaaagacttgcccgacggcgacgcaaggctgaatccgtctttcgacaaccccgcgccgctgaaaccgctgtcggaataccttttatacgaatacaaaaacaaaagactttcgaccgtgttttcggaaaaagagcaaaacaaaacgttgctcaatctttatcgcaaggaaaaaaccatcgaagaagagtcgggcaccgcaagtttgtacgtggcgtgcggctttttgaagtggagagagtcggaaaacgaaaaattcaaatacgcgccgcttattctttacccggtgtcgattgacaaaaaaggaatatcgctcccggtattttcgataactttcgacgttgacggggcgcagataaacaatactttgctggaatttttgtatcaggaattccgcctcgatatgcgggggctttcggcggtcgaactgtccgacgcgaaaagcatactcgcagtcatcgcgcgcgtcaaaaaagaaatcgccgataagcccggatgggaaattatcgacaacgtttatctgaacgttttgtcgttcacgaattatctcatgtggcacgacgtgcgctataatatcgacaagttcaaggagtcgccgcttatccgttctatgatctcgaactcggtggacgccggactgaaaaacgaaaccccgaccgacaccgccaactcggacgaagcgtacttcgggacggacagaatgttgctgccgataagcgcggacagctcgcaatatcaggcgataaaagcaagtctgaacggctcgttcgtgctgcacggaccgcctggcacgggcaagtcgcaaacgataacgaatatcatcgtcaacaacatcgtgcgcggcaggcgcgtgctgttcgtcgctgaaaaaatggcggcgttgaacgtggtttataaacgacttgtcgactgcggcgcgggtgatttctgtctggaacttcattccgacaaaacgcacaaaaccgatattttatcgaaaataatcaacacgttaaaccttggttctgccgcttccgacatcgactttgaagaaaaagcgaatgaaatcaaggagtgcatcgacaagttgcagggcgaaatcgacgcaatgcacagaaagcgttatctcggtttctcgctgtatgaggcgatgatggcgtatcttgacaattcggacgctcccgattgtttaagaatcgacgggttgttttacgaaaaactgacggcgtcgtcattcaacagataccttgatattctgacggaacttgcaatccgcgcgaaagagtgcggcgatatcgaaaagtcgccgtttcggtacatcggaaaattcgattacaccgacgcctggcgcgaagaagccgaaagcgtgctcgatatttaccagatggaactcagacatctgaaaacttacgcgcgcgaacttcaaaccttaatcaatatgcgtacgatttcgctcaccggcgaaaagttgaaggcgttgtatttcctgtcggacaaactcacgtccgacgaaaaaatcgcaaaatattttgaaaacgcctgcgccgtagagaacgcgaaagggcttgtggagtcgtatctcgaagcggctcgtcgcgacgggcttatcacgaaagaatacgagaataagtacggaaagtatcccgaaaacgtcgcgcccgccgaggtcaaagaagcaatgcaaaaaagcgcgtttttgccaaagtcggtgaaaaaggcgctctcttccgtcgacaaaaacaaccgccgcgaatttctggaattcctgcttattatcgcggaaaccaaagaaaccgtcaaaaaacgccgcgcggaagtcgcatcgcttttcgccacaaccgaaaacgatatggctcttgacgacaaaatcgcgacggtgtccgcgctttacgacgccgcacgcgcactgtacgccgattgcgacttcaatcttttcaacgaaacctgtcgtcggctgacgaaaaataagccgcacgtccttatggaatactatatgcgcgcttacgaaaccgaacaaaaggcgaaaactgcgtttgaaaatctcttttgcatcgtcaaaaaagacccgcgcgaagaaatcaacagcactatcgaccgcatttcgagcatcgaaaagaatatggactatatcccgagttggtgcagataccagagcgtcggggaacgttgcggacaagaaggcttcgatttcgtgctggaaccgctgtttaacggcgaaatcaccgccgaagacgtgctgagaagtttcaaaaaatgcgtgtatttcaactttgtcaggagcgaactttaccttgacgacgtgctttgtaggttctcggggctgtcgcttgaagaaacgatgcaacgtttccgcgcgctgtccgacgaatacgaaaaactcacaaggtcggagttgtatttaaggctcgtgtcgaaacttccgcgcaccgatacttcgggcgaacataacctggaaagggttttgctgtaccgcgccgaaaaaacgaatatgcagggcacgacgatacgcgcgctgttttcgcaaattcccgaaatacttcgcgcgacctgcccgtgtcttttgatgagcccggtatcggttgcacaatatctcgatatcgaaaaggaaaaattcgaccttgtcgtcttcgatgaggcgtcgcagatgcccacgtgcgaggcggtaggcgcaatcgcgcgcggtaaaaacgtcatcgtcgtcggcgatccgaagcagcttccgcccacgatgttcttccgcaccgattatcgcgacgaacagcacttcgaggtcgaagaccttgaaagcgtccttgacgactgtcttgcaatcggcatgcccgaacgtcatctttcgtggcattaccgcagcaatcacgaaagccttatcgcgttttccaacagcatgttttacgacaataaactgctcactttcccgtctccgaacgagctgaaaggcaaagtaaaacttgcctacgtcgacggcgtttacgaaaggggcggcagcaaatgcaacaaaaaagaaggcgacgcgcttgtgaaagaagtcgtggcaaggcttaaaaatccgcaggaacgaaaccgctcgatcggcatagttacgttcaatacggcgcaacagaattacatcgaagataagctgcaacacgagattcacaaggaaggtctcgacgacgtggcgtacgacgtggacgagcccgttttcgtgaaaaaccttgaaaacgttcagggtgacgagcgcgacctgattttgttcagcgtcggatacggtcccgacgcaacgggcagattatcattgaatttcggtcctataaaccagcagggcggctataaacgacttaacgtagcagttacccgcgcaaggagcgagatgattgttttcagttccgtaacggggaatatgattgaccttaaccgcaccgacagcgttggcgtcaaggcgttgaaagcctttctcgaatacgccgaacgcggtcccgagatgctttcgattgcggcaaaggacgtcagggtggagtcgaagggtatcggcgaaaacgtcgcgaaagacctgaaagaccgcgggctgttgtgcgacgcgaacgtcggcgtgtccgacttcaaaatcgacgtcgccgtcgttgatccccgcgacaaaaacaagtatattctcgcaatcatcgcggacagcgagcactcggcaaaaatcccgtccgcgaaagaccgcatgaccatgcagacgagaatcctgaaaaaactcggctggaacgtctataacctttggacgataaactacttcaacaaccagaaacgcgaaatcaacaaaatcaaggaagtcgtcgcgacgctcaccgaaaagaaggtcgtttccaaaaaaaccgtccgcgacgcgctgcaaaaatacagaaaaatttataaggcggcttatatcaaaccgctggcgcgcgccggggcggaatacgtcctgaatttcgtcaacgaagaagcgattatgaataaaatccgcaccgttatcgaggtcgagtcgccgattgaagaaagctgtcttatcgataaaatcgcagcggcgttttgtgtgccgaaaaccgccaaaaaagccatcgcgcaaatttcaagatacgtttcgtcatacgaggcgcaacggcaggaatattctggcaaagtcttttacgtcgataagcccgtttcgactttccgcccgagcgacgcgcgcgttacccgcgatttgacaaaggttcaccccgacgagatagtcgccgccgcaaaatgcgcgatcgaagcgaccgtctatatcgaaaaggacgaccttaataaggaagttttcaaactgttcaacgtcgcgaaacgcacgaaatccgccgtggaatgggttgacgctgctttgagtgccgccgtccagaccggcgaaataatcgtcacccccgacggcttctgccgcatctgacaatcaatggaactttaagttgacaagctacgatgcgtatgttaaaatataattaacctttataccataccaaaaattaaaggtttctaaaacaagggttaattcccgaaaagctctatcccttgatgattttcatcaagggatatcttttataataaggaggaaatatgtacagactcggtcttgacgtaggtatcaaatcggtaggttggtgcgtgctcgaatgtgacgaaaacggcgaacctattcaaatcaatgctcttaattcgcgcatatttgacgcggcggagcaacctaaaacaggtgcgtcgcttgcggaacccaggcgaaacgcaaggggactgcgccgtcgcatcaggcgaaaatctttcaggctcgaaagaatcagaaaacttttctccgaaaacggaattgtattatttgaagcgcaggatgatttaatttgtttaaaagacgaatataagaatcttgacgttgtcaaacttcgttcggacgctttggacaaaaaattgaccgaggcggaatttgcgcgtgtcttatattcgcttgctcggcatcgcggtttcaaaagcaataaacgagtagttgtaacagatgacgacgatggagaaaaaaaagggaagggaaaagaaaaagacgaaggaaagcttttaagcagtatccgagaaagcgaagaaaaaatgcgagagagcggtatgcgtacccgcggcgaacaactttataaaaggtatttaatggaagggaaacccgtccataataaaggcggcgattattcgatgtgcgtatcgcgggatattctcgtgaaggaaatcgaactgttgtttgaaaagcaaaaggaattcggcaacacttttgcgaccgataaaaacaaagagaaatatcttgatatattcctttcgcaaaggaattttgacgaaggtccggggaaaggaagtcaatacacgggaagtcacgacgtgaaaaagtgcgagatatatcgtgacgaagacgtggcggcaaaagggacatatacgagcgaatgggcaacgatttatcaaaaaatcaataacatttcgataatatgcgggggtgacagaaggcgccttagcaacgaagaaagacaaattgccgtcgaacttgcaaaaaaagcggataaagttacttacaaagcgttcagaaaggcgataaagcttgacgacgattaccgtttcagtgcgcttaattatagcgagaaaaagaaacagggtaagaagaaaaacgaaggggagtcaaaaagcgacgtcgttgagataaacgatgttgtcgattcgttagcctgcgaagataaaggcgagtttattactgcaaaaaacagcaataaaatcataaaggcgttaaacgataaacttaaaagcgatattgaactcattgacgaaatcgccgaaatctgcacgaaatacaaaagcgaaaacctgttccgtagcgccattgccaaaagtaagataatcggcggaagacttgacgaagaaacgattgaaaagctttccaaaatagatatgaagggatatggtcatttgtcgcttcacgtgttaagggaaatcctgccgtatctcgaagaaggcatggtttacagcgatgcaatgcaaaaggcggggcacaatcattccgaacataattttgaaaagcaaaagtatctcgggacaaaagaagtttacgatgcaatcggaggcgtaacgtcgcccgttgtaaagcgcgctctttcgcaaaccgtgaaggtaatcgacgcggttataagacagtacggcagtccctatgcaatcaatatcgaacttgcaagggatatgtccatgacgaaagacgaacgcgataaactgaaaaaagaaaacgacgcgcgcgccgtgaaaaacgaagcgatccgcgaaaacatcgcaaagctaaacgcgatgccaaacgcaaccaacgttttgaaatacaaactgtacgaagagcaggaccataagtgcgcgtattctatggaaacgctggatatcaatcatttgttcgaagacggatattatgaaatcgaccatatcatcccgtacagcaggtcgtttgacgacagtttcaacaacaaggtccttgtattaaaacgagaaaaccaaaacaaacgcaattctacacctgtcgagtattttgaaagaatcggcagagattacgacgaagttcttgcattctggaaggcggtttatcagaaacgcaacagaaaaaaacttgaatttttgcaaaagaaagagattaacgaatcggaatggaaaaaccgcgcgttgaacgatacccgatacgcttcgagaatgcttgcaaatcttataaaagattatttactatttgacgaaaagtcaaaagatcagtacggaagagttgaaacagtcaagggtgctattacgtcgtatcttcgcagattctggggtgtaccgaagattcgtgaggacggcgacaagcaccatgccgtcgacgcggcgattattgcgtgcgtcacgccgaaaacgaaaaacaaaatcgaaagatacaatcagattaaggaaagtcgtaaaatgcgtaacggacaatacgtccttgaagacggtgagatttgcgattccgattattacgacaagaacagtcatttggttttgccttatccttataaagagtttatcaacgaactcgatgcgcgcgttatggacgaaccggtcttaatgcaaaacaaattgcgattgctcggttttaacgagaattatttgatgaaagcaaagccttttgtcgtaagtcgtatgacaagccgcaaggcaaaaggctgcatcaacgaagcaaccgttttcagttcaaaatatgcggataataaatatccgacggtttgtgacggtaataacgtcatcgtaaaaaggactgcgcttgcaaaccttaaacttgataaaaacggggaaataaacggatatttccaacccgaaggcgatgcagcgttatacaacgccttaaagcagaggcttgtcgaatttgacggagacgcgaaaaaggcgtttgcaacgccgataagaaaaccgtgcaacagcggacaaggcaatattgtccgtaccgtgaaaacgtatgaaacatataccggcggcggaatgcttctggaaaagaataagggcattgtcaaaaacgacggaatgataagagtcgatttgtattcaaaagacgggaagtatttcggtgtgcctgtttacgttgcggatttgtatcgcggcgaattgccgaaaagagcggcaactaatgggaaaccgcaaaacgaatggcgcgtaatcgacgactcatacactttcgaaatgtcaatttatcaagacgacttactgcgtattgaaaataaaaaaggaatcgagtttaaaaagaacaaagacgttgaaaacagcgcaaaagcagcgtcaaaaacaattacggacgatttcgtgtattttataggatttgatagatcaacggtatcgattaaagtcgaagataccacggggtgttattttgcaagaggcgtgggaatacaaaacatcggtaaaataacgaaatgcgaaatcgacgtgctcggcaacgttcaggaaattaaaaaaagaccgaagcaaccgcaaccgctgaaaatgcttaccgacaaggaaaaagcggaaaaaagaaaaaccaatcaaaacaaataagaggtgtatatggggtacataaatttatttttatctaccccttgcagtatcaggatgaatcacgggcaacttgttgtaaggggtgaagaagagcatagttttcccgttgaagatttgaacagcgttcttatcgagacggcggaatgtacgataacgagttatgcgttgagcacgctttcggacgcaggtgcggttgtgttcacctgcgacggaaaacatttgccaaacggagttattttaccgcttaacagttattatcgaccgttaaagatattaaaattgcaacagaacatgccgaaaccgctgcaaaagcagttatggcaaagcatcgtaaagcgcaaaatcgaaaaccaggcaacctgtgtggaattcacttcaaacgaacctgtggacgatttatattctcttgcaaaatcggtaagcagcgacgatgcgaaaaatcttgaagcggttgccgcaaatttgtatttcaaaaaaatattcggcaaggatttcgtaagacgcgacgactctttcataaacttggcattaaactacgggtattcaatcgtacgcgggctcattgcgcgcactctcacggtgtacggtttcgagccgagtataggagtgcatcacgcaagcgaattgaacaattttaatcttgccgacgatattatcgagccgttccgaccgattgttgacatgattgttttcaattttatcggacaagaaaaactaacgccgcaaataaaaaaacagttgtttgcattgatgaatcaggacgtggaaatcaacgggcagatttacgcattgtcctatgccatcgaacttgtggtgcaaagtctgaaaaattgcttaacgtcggggaagtgcgaattactgctcccgaaaattttaccgatttgcatgcatcgatatgagtaagtttatgagaataatcgtattttttgatttgcccgtttccacaaaaacagaaagatatcttgccacgtcgtttcgaaggtttttgcttaacgacggatactatatgttgcagttttcagtttacgcaagactttgtaacagtgttgaaaatgcggaacagcattttgcaagactggaaaaagaggccccgaaagatggatccgtcaggtgtatgattgttaccgaaaaacaatatgcaagcataaaaataatcacgggaaagaaaaaagtaaaagaatcgtccgtggactttttccaactttcttttttataaaaaaacaagaaaaagacgaaaacggaattataaaattttgtttttcgcgaaaaagtaacaatgaaaaatgcagaaaaaactcctgaaacactgaggttttcaggagtttttctcgttccctattataccataccaaaaattaaaagggaactaaaaccgccttataactcatagacgtgcttttcgtattataccataccaaaaattaaaagggaactaaaacttcggaagacgcggcgcacgacgatagtccattataccataccaaaaattaaaagggaactaaaacagggcataatatacaaccgagccttttcttattataccataccaaaaattaaaagggaactaaaactgatttccttttatttatccctcgtataggattataccataccaaaaattaaaagggaactaaaacgataatagcagtattaatacttatgaaaatattataccataccaaaaattaaaagggaactaaaacgcgtgcatagccgctgaatacgatatatcgattataccataccaaaaattaaaagggaactaaaacttgtaagtaatgcaagtacggcagatagcgattataccataccaaaaattaaaagggaactaaaacagcggtatggaagaatcgcaagaaatttcaattataccataccaaaaattaaaagggaactaaaacgtaggtcgtgcaagtgtagcccagaacggcattataccataccaaaaattaaaagggaactaaaacatcttgatgatgttcttgaagccattgtttattataccataccaaaaattaaaagggaactaaaaccgcgaatacggtcgattatatgaggcttctattataccataccaaaaattaaaagggaactaaaacacggctgatacttattatggttttagattaattataccataccaaaaattaaaagggaactaaaaccttcgcgtcgtatatggcgttgcttatgcaattataccataccaaaaattaaaagggaactaaaactgccgtaacgcacgaatacttggaatttggattaaacaatgccccaaattaaagcggtgtgtcaatgaaaaaagaatagccgttccgagtagtcggagcggctaagtaagaagtctgtgttaagtgcgccaaacactcttctttgtcaatgcgaataaccattgcttccgtacctacggactctcgggcgcaaaattattataaaacgaaacgacgacgaaagtcaagaataaggggaaaggcggcgaaaagaaagcatatttttagtaaagataaggcgtgtgcgtgcgcgggcgggatatgtgcgcggggggggcacgcgggacgcgcgtatttattaagtaagcggaaaggagaaatgcggaaaaacgagagtggcgagcatgcgggtggcgcgcgggagagcaaacggaatgattggagaggtaatcatgcgaaagcgcgggcgggaaaatggttgaaacgtgaataaaagttcagaaaaacccttatatttcgtcgcctttgtatggttattattttttaatttgaaagaagttgaaaataatgttcaaaagtggcgattttcgtttgacacattttgtcgttttggttataatggcactatcttacaggtggcggaaagccaacaaacacaaaataaagtgttttcgaccgacgccaaccacattatattggggtacagagtgaaacttttggaggaacgcatcctcagggacggtaaagtcttccccggagaggtgttaaaagttggaggttttctcaatcatcttatagatgatactttgatggaggaaatcggcaaggaaatctactcactctataagtgcgaccaagttaccaaaattctgaccttagaagcatcgggaatcgcaattgcatgctacgcagctatgtacttgcacgtcccggtgctttttgctaagaaaagtaaaaccgccaacatttcaaaggacgtttattctgcggaagtcaaaagttatacccacggcaacgtaaacacgataatggttgaaaaggaatttctgaattcttccgaccgcgtgcttatcgtcgacgattttcttgctcacggcgaggcgttgcgcgggcttatcacattgatcgggcaggcgggtgcgactcttgtcggttgcgcgatcgccatcgaaaagggcttccagaaaggcggggacgagttgagagagaagggcgttcgcgtcgaaagccttgcgattatcgaaagtatgtcggacgacggcgtcactttcaggaaaaactaagttaaaaaatgccatatggcaaaatatatggagggtttcataatgaagaaaaaaattcttgcaattttccttgttgtagcgatggttgcagcactcgcagtcggtcttaccgcatgtaagaaagacgacggcggagaagtcgattattcgaacatcaaaatcggtatgctttgcttgcatgacaaaaacagcacgtacgacaaaaacttcatcgtagcgatggaagaagttcaacgcgaactcggtcttcgcgacgatcaggtcatcatcaaaaccggtatccctgaggatgatacttgctatcaggaagccatgaaccttgtcgacgcaggttgcaacattattttcgctgactctttcggtcacgaagcatatatgttgaaagctgcgaaaaaagctcccaaagttttgtttgcacacgcaaccggaacgagagctcacaccgaaaatcttcctaactttgtcaacgcattcgcttccatttacgaaggtcgtttccttgcaggcgttgccgcaggtttgaaactcaatgaaatgatcgaagcaggcaaattcaccgcagaagaagccaaaatgggttacgtcggcgcatacacctatgcggaagttatctccggctacacctctttctaccttggcgcaaaatccgtctgcccgaccgtcaagatggacgttcaatttaccggtagctggtatgacgaaaccggtgaaaaggaagcagcaaacttgctcattcaaaaaggttgcaaacttatcagccaacacgctgactccatgggcgcacctaacgcttgtgaaacagcaaaagttcccaacgtatcttacaacggcagcactttcgaagcatgccccgaaacgttcatcgtttcttccagaatcaactgggcaccttactacaaataccttgctgaacaaatcgtaaacgccaaaggcgacgttaataaagcaaacgttgctaaggactggaccggcactatcgcaaccggttccgtagaacttaccgctttcggtacggcagctgctgccggcacggcagaaaaagttgctgaaatcaaagcaaaacttatgaacggcacccttaatgttttcgacaccgccaccttcactgttaacggcaagaaacttgaaacatatatggcaaacgtaaactttgaagacgacggcaccggcaatgataacctcaaagccgacacgcaagtcattgaaaacggcgttttctttgaatccaaacatcgtgcagcaccttactttgacgttcgtatcgacggcatcacgcttcttaacgagaagtactaatttacaacaacagaataggattttggcgggacaatcgtcccgccttaacccttttttttcggcgtgataatcgctatttttggagagttatatgggacaaaacaacgctatcgaactcagaaacgttactaaacggttcggcgcggtcgttgcgaacaatgacgtcagcatggacgtcaggcgcggtgaaattttgtcgcttcttggcgaaaacggaagcggtaaaaccacccttatgaatatgattgcgggcatatacttccccgacagcggtgaaattttcatcgacgggaaggaagtcgtgattcgttctccgcaggacgcttataaataccacatcggaatgattcatcagcattttaagctgattgacatctttacggcggcggacaacgttattcttggcgaaaagatgcccccgttcagtatccgtgaaaaatcaaaagaatacaaagaaaaacttgacgactacggcattgtcgttgacgccgatgacgagcgttcgcccgtcaaagaaattaggcttggcgacaaacctgccgaaaaaataaaatgcgccttaaaatgcgcggcacttccttttgtaaaactcggcaagaaaatcaaattcaaccatttgtcgagaaatcgcgttggaatcgtacaaaaaatcgtcgataagtacggtttcgatatcaacgtcaaaaagaaaatttacgatatgtccgtttccgaaaaacaaaccgtcgaaattattaagacgttgtatcgcggcgcggatatccttattctggacgagcctaccgccgttctgacgccgcaggaaaccaaaaaactttttgacgttttaaggaaaatgcgcgacgacggaaagtccattatcatcatcacgcacaaactcaacgaagttctggaaatttcggacagagtcgccgttttaagaaagggcgaatatatcggcaccgtcgatacgaaagacgcaaccgaaagttcgttgacggaaatgatggtcggcgcaaaggtcgagcttaatatcgacagaacaatccccgtcaacgcagaagaaaggctcacgatttccggactcacctgcaaaaaccgcgaaggaatacttgcgcttgacaacgtgtcgttcacggcgcgttcgggcgaaattctgggtatcgcaggtatcgcgggcagcggtcagcgcgaacttttggaatcaatcgcgggacttcaacgtctggaaggcggcgcggtcacttacttcgatcccaaagacaacaataaagaagtcgatttaagacagaaatcccccacgcaaatcagggaattgggcgtaaggctttcgttcgtccccgaggaccgtctgggcatgggacttgtcgggaatatggacttgacggacaacatgatgcttcgttcttacggcaaaggtcactcgatgtttttggacagaaaaaccccgcacgaccttgcggaaaatatcgtggaagaacttgaagttgtgacgccttccgtgaaaactcccgtcagaaaactttcgggcggaaacgtgcaaaaagttctggtcggtcgcgaaatcgcgtccgcgcctaccgtccttatggcggcttatcccgtaagggggctggacattaactcgtcctacattatttataatttgctcaacaaacaaaaagaaaacggagttgccgttattttcgtcggcgaagatttggacgtactgcttgcgctttcggacagaatcatggttttgtgcggcggaaaagtcagcggcattgtcgacgcaagaaactgcacgaaagagcaagtcgggcttcttatgacaagtatgcccgaaaaagtcgaaatatttgacgatgaagtaaaggagggacacaatgcgtaaaacagttcacgaacccgtcgcgcaccttgtaaaacgcgtggatatggacaggaaaaaagcgtggcttatccgccttatcgcttttgcattgtcaatccttgcctgcgcgattatcactacggcaatcacgaaaaaagacatgggtttcttcttcaaaaacttcttcggcggcgcattcagcaccccaagacgcgtctggggacttttccatgaaacggcattgcttttgctggtcgcgcttgcggtcactccgtgtttcaaaatgaggttctggaacatcggcggcgaagggcaaatccttatgggcgcgctcggttgcgctgtcgtcataaactttatgggcggcaaatcaagcgacgcgggaacgattattctgtcgcttgtcgttgcgatggtattcggcgcattatggtcgatgatccctgcaattttcaaagcgaaatggaacaccaacgaaacgcttttgacgcttatgatgaactatattgcggtatgtcttacggaatactttattaaaagcgttgcgtcgacgggcaccggcacgctgacgtttacgaaaggcgttgtcggctcaatcggagataacgaattcattcttaaaatcatcatcgcggcggttattacgattctgatgtacatttatcttcgtttcagcaaacacggctatgaacttaccgttgtcggcgaaagcgaaaacacggcgcgttatatcggcattaacagcaaaaaggttatcattcgcacgctgattctttgcggtattatcgcaggtattacgggattccttctcgtcagcgcgacaaaccttgacttgaacagcaaatataccgtcaacggcagaggctttacgggcgttcttatttcctggcttgcaaagttcaatccgtttgcgatggtgttgacgtcgtttttggttgtgttcgtacaaaagggcgcggcagaagtttcaacgtatgcgcgtcttggtgcgtcgttcccctcgatgcttgcgggcgtgttcttcttctttatcatcgcaagcgagttctttatcaactataagataatgttcaacaaaaaatatttcaaaattcccgcatgcttcaaaaagaaaaaacaagcggaagttgtcgcagaggaggataagtaatatgtttgttacgttaataactcaggcaataaaattcggtattgttttccttttcggctcgaccggcgaaattatcatcgaaaaatccggacaccttaatctgggaatccccggcgttatgtgctttggcgcaatcggcggctgtcttggcgcaaacattgcaaaaaacgcagggcttgcagccggcggaatcgtctttgtcgcaattcttatggcaatgctgttcggcgcaatgatgggcgtcgtttacggactgtttacgattacccttcgatgcaaccagaacgtcacgggacttaccattacaacgtttggtgcgggcgtacttgggttctggggctcgatgatgagcaacgagggcacgacgttttacgaagtaagcaaagtgttcaccgcgccgttctttggaaatgtcgaaaacaactggttttcacaaatgttcttgtcgcacggcgttttggtgtacgtcggtataattatcacggtgcttgtcgcaatttttatgaaccgcaccaaaacgggacttaacttaaaagcggtcggcgaaaaccccgcggcggcggacgcggcgggtatcaacgtcatcagatataaataccttgcctgcataatcggctccgcaatttccggtatcggcggcgcgttttatcttcttgactgcacgcgcggatcgcttgaatacgttatcgaagggcttggctggcttgcggtcgcgcttgttatcttctcattgtggcgcccgggactttgtattatcggctcgttcattttcggtcttttgtacattatgcccaactacattacgggcgtaagccttgccgaaaaagaacttgtaaaaatcattccttacgttgcaaccgctctcgtccttattattatttcgttcttcaataagcgcgagacgcagccgcctgcatcgctgggactttcctatttcagggaagaaagataatttcaaaaacgttaaaaaggtcgtcctcggacggccttatttattgtcaaaacgccacgatgtgatataataaaaatatgaatgctttgaccattgtacacgaaacaataaggaaattcgtcggcgcgggcgacgtcgttatcgacgcaaccgcaggacgcggatacgatacgtcgtttttatgttcgcttgtcggggacaacgggaaagttatcgctttcgacgtgcaaaaagacgccgtggacagcaccgaaaaccttctgaaaagccgcggacaaacggcggacgtccaccttgaatcgcacgaaaatatgacaaagtacgcggatagagacagcgtatcgtgcatcgttttcaacctcggatatctgccgtcgggcgatcacagcgtgttcacgcacgcagagtccacgataaaagcaatcgagggcggactcggacttttgaaaaagggcggcttaatgtgcgtgagcgtttattacggcggcgactctggctacgaggaaagagacgcgctgctgccgtatctgaaaacgctcgattcgtcgaaatatcaggtcttaaaactcgatttttataattggacgaacgacccgccgttcccggtgtttatcatcaaaaactgaacgataaacccataaggacgatgtattaaaagaaaaaccacgatattttcaagttaaaaaaccaaacaaacaataccgctgccgacaggctcctgtgataaaataaaccatagagctgctgctggcaagagaaggcgatgagagcacgaagtattcgcgatcgccgagcgcagacgacaggctccacgcacaatttcaaagaaattgtgcaattgtgtgcaaaaactttgcacacaataaaaaaacacacccgaagcggtgtgttttttagtggagctgctgaccagacttgaactggtgacctcatccttaccaaggatgtgctctacctcctgagccacagcagcgtttttgtcaatgctcaattattatattgaataaggcgaaatatgtcaaacgaaatgagcaacaaaacaaaaagtcgaaaaaataatttatcgcggtgtttataatatattttttaatgaaagccgtgcgatagaaacattttgtcatgattgataaaactgtcgcataacgtgaatgaaaaccgcaaaaattttttttgaatcgcaaaattttatggttgaaaacgacctaatctattttacataaatcaacatattatatataatatagaaagtaacttattataatggagagaatcgggcaa

SEQ ID NO: 3516 - DNA, 23396 bp, synthetic construct
  source 1..23396: mol_type = other DNA
  misc_feature 1..23396: note = Synthetic
tggttttcggttttttaacaacgggtttatattcttcgccgtcaatcgtgtaaagcgttccttcgatgctttcttcctcgaaataatggattgcccaaccgtaaacggtggaatcttcaacacaagcgcaatttgctccttgctcggcaagttttctcgcttcgtcgcaagaatatttcataaaacccgaaagcgtctttttgttgagcaaaggcttaccgtctttttcaaagggagtgccgttgttgctcacgtcagtcacccaagtccaacccgtgcccgatcccggcgaaccgcacgtgacttgcaaaaacggatttgccgaatccgcatacgcaacgccgggagcgcttattaccccgaccgccgtcaggacaagcgcaaacacgcatgcaagcaagaccgcacgcaaaatttttgttgattttgttgccattttgcacctcataagatggttttattttcgttgcgctcacactttgcaagcgcaaaaagttcttttattgacgcaatgaccaaatctcaatgacgattgtctgtcgaaaatataccgattattttatatttcgaaaatatataacattgcagattattataggggagttacatttgtaactggtaacggcgttttttacatttatttttaaatttttttgattatcaattactttcctaatacgaatgatttacaaatctttttattatccgaacaagaggagcctggattgaagcttacagctgaatcatattgaaaattccaaattttttttgttttgaaaaaataaaggcatcctgttaaaatagtctggaggtggaaaatgaaaaaaagtttaaagataatttgtatcggcgtgattgttgccgctgttcttgcagtcatcgtatatatcattataaaaataataaatgttcagagtagtagatttgaaaaaaaagacgattcgaaattaagagaagaaataagtcacgacactcctgataaagacccagatgacattgtaataccggatgacataacagaagaagaaaagcaaaagctgcaagaggaaaaagagtattggactgccgtaaaagaggcaaaaaaactaattgccgaaaaagttttatccagtgcattgcctgacgaatcagcggaacttaccatatatattcaaaattttcaatcagttcgaagaataaacaatttttatgttgaaggaaacaacattattgtcgacgcagacattctctataatggagatgacggaagtcttcaacaaatgaatttcgtttactctttttcaaataatggaattgaattagaatctaaagatttaagcagtgtcatgaattatatcactgaagaaaatacgaaagcaaaaaccatttcaatgttatcagcttatgatttcactgactctctagacgaattttatcaaaatcacgtaaaggataaatatttgctaaaggaatatcagaaacaggaatatttgattgagttggcagatatcaaatgtgagatatctggtaaaggagaaatccctacaatatttctttgtatttcaaaattaacaaaagatgacgagataatgtatatggcacataaacttgacacgtttatggtggcaaacggcaatatggatattgaacaatggagagaatttgtcaaaacaacaagcaataaaaatgtttttatatcgctggaacaaaagtggactccgactgattttgacttgaaggcgttgtctgaagaatatagcggataagaacttctaaaacagaaacgtaagtgagggcagggattcgtagcgtaagcgtaatagcgaagcgtcagccccgggaagggggttcgtgcggcaaaagccgcaggacttgaagagtccggaaaccgaagataaagcaaaaagcaggccgatagcctgctttgtggcggaggcggagggattcgaacccccgtgggctttcacccaaacggttttcaagaccgcctcgttatgaccgcttcgatacacctccgcgattttataggttgaagtatagcaataaaaaccgaaaaagtcaaacgccttgagcgcattcggcaccgcgcaaagctgttcaggatattttatcctcgagcctgacggaaatcacggcggcaagagcggttttaacaaggtcggggacgatatacggtacgacgcacgtcataagtgcggcggaaagacctatctcggcgcccgttttttttgcgtatacgccgagaaaccacagcgttccgaacgaatagcagacaataagtccgagaagcattcccgcaaaggcggccgttgtgcggacagttttattttttagcggaaggagtttacaaaaacccgaaacggttacggcgaaaagaaaaccgaaaatgtatccgccagtggggccggcaatcgcctgaacgcccgctctgaatccggcgaaaaccggaatgccgacaagaccggcaagaatatatatcgcgacggcggcgaaacctcttttccaaccgagcaacattcctataacggaaaccgcaaaagtctgcaaagtgaacggaacgtcgccgacgggaatagaaatccatgcgcataccgtcataagggcgacgcccgtcgcaacgtaggcaacgtccctggaagaaactattgcacgcggccttccgacgggcataatttcggttatattattttcgagtgcgggagttctgttcatcgtaaatattttaaaattcttgaatacaaatgtcaaacgaatgttgttttattgcaaaataaaggccggaaaacgcttgtttccggccgaatatcggacaataacgcgttatcttgcaaacgtcgtgttgtcgtgcgtccgcgaagcaagttcggttacgggatgttccttgacttcgtaacgatagtcttttccgaattttctgatatgctcgtcgataacgttgtgacttgcaaccgcgcccgtacgtttgtttacggatttattatactgtctgaaaacgtcgtccgagggcaggttatgaacgcactcgtatccttcgagttttttggtaaagcagtcggtgcgcgcgataacgtcgcggatatattcgatattgccttcgaacataagaggctcggggaagtccgcgccgtcggggaagagcgacattgcgtcttttccggcgaaagttttataaaggtttttggagtgaatgagatgtccgcattcctcgagataaagcctttcgtataattttttcaggttcttgtcggtttcgtccagcgcgcacgagtggtagagatagcactcggtatattcgtgcataataaggttttcaagccatccgcaggtagtatcgagcagcgagccgtattcggtaacgtgctgttcctctatcatggctatttcggcatacagttttctgccttcggaagtggggtgaaggtcacctatattcatatagtaattcatagtctgttgctcggcggcggtaattatatttgttacgagaacagtaaataaatcggactttaagttgcaaattgagtggttaatcgcgtcaaacggatgacgatgctccgcaatggtaggacgtcccggcattatttcggtatattcgcgagtgatgtcttttgccgattttccctgttcggattcaagaagattggcaaatctgtaaagatggtcgaaatcttcgagaagggcaaaattcaatgcgttttttacgttttcgtctttgacgtgtcgcgccagaacggcggtaaggtccacggcgagctgttcgtacgaaatcgtcgtttcgagcgccgattcgtcgacgggctttaaggacgaaatcactttctgctgctgttgttcgtgccggcgcagaagggcaagttcgcggcgcaggtcgttattcttttcgtgtcgcgaaaaattatgaaggaaccagcattgttcgaattcggtgccgttcataagaattactctcgttttcgtataaggggcagcggtgtttttgttgtaaggtttcagtgtcattccggaccagtcacggaattccgatacgggaatggcgttttcctcgtaaaaaggattggtttttttcataatactctccttatgtttgataaaagtattgttgcggttttaggggaaattatacaatcgggctgtttttagtctcatttttcggtcaaactgtttacaaaagtaaaccgtataatgtaaaatattcgggaggtgtaaatatgaaatacggaaaaatcaatcacgttggcatagttgtcaaagactggaacgaagcatccgacaggtacggcagacttctcggcataaaacactggtacgaaatagtaaccgacgagggctctttcgatatgcgttaccgcggcgaaaaggaaaacagcaaggtaagaattttctatgggggaaagggaacgaccaaaatcgaacttatcgaaacttcgggcgataaaaatatttacgaccgcttttatgaaaagcacggcgaagcggtgcatcacgtaatgtatatgacgaaagacctcgataagacaatacgggagttttcggacaacggctttcaggttttgcaggacgcgacgttcacgagtaacggcgctcgcatacgctatgcgtatatggggaaagacgaagactcgctgatattcgaatttgtggaatgttcgctcacaaagagcattaaaaagggcgatatgcctttcgaaatgcagataggcgcgcttaccggaagttataaaaaagtcaaataagggagagagttatggatattagagatattctgagccactgcgaccatacgttgcttgcgcaaaccgcaacgtgggacgaaatcaaaaccgttctcgacgacggcgtcaaatacggcgtagcgtcctgttgcatacctccgtctttcgtaaaaagggcgaaggaatacgtcggcgataaaatgaaaatctgcactgtaatcggatttccgaacggctacaatacggccgacgtaaaacttttcgaaaccgaacaggcgataaaagagggcgcggacgaaatcgatatggtggttaatatcggcgacgtcaaagagggtaaattcaaaaaagttaccgacgaaataaaattgctgaaaaacgcttgcggcaaaaaaattctgaaagtaataatagaaacctgtctgttaaccgacgccgagaaaatagcaatgtgcagggcggttaccgacgcgggcgccgattatatcaagacgtcgacgggattttcaaaagggggcgcgactttcgacgacgtcgaattattcggaaaacacgtcggagaaaacgttcgtatcaaggctgccggaggaatttcgtcgctcgccgacgccgaaaaatttctcgctctcggcgcagacaggctcggcacgagtcgcatagtaaaacttgcgaaagaaaaagaaaacgaaaagaggtaaattatgaataacattcccacgccgcacaataacgcgaatattgacgatttcgcaaaaaccgtccttatgccgggcgaccctcttagggcaaaattcattgccgaaaactttctcgaggaccccgtgcttgtaaacggagtaaggggaattaacggatataccggtatgtacgacggcaaaatcgtttcggttatggcgtcgggtatgggtatgccgtcaataggaatatattcctatgaactgttcaatttttacggcgttgaaaacattatcagaataggaagcgccggcgcgatatccgacgaggtgaatctgcgggacatcgttataggtatggcggcctgcacgaacagcaattacgccgctcagttcgcacttcccggaacctatgcgccgatagccgattataagcttttaagacaggccgtagaggttgcggaagaaagaggcgtcgatgtaaaagtcggtaatctgctttcgagcgatacgttctacgacgattcggaaagattgtcggactggcgtaaaatgggagtgcttgcagtggagatggagagcgccgctctttatatgaacgccgcaagaagcggaaagaacgcgctttgcatatgcaccgtatccgattgtcctttcacgggggaaagctgcaccgcggaagaaagacagaatacgtttacagaaatgattgaaatagcacttaaagttgcaggaatgaatgattaaacgcatttttttgatagttatggatagtctcggcataggtgcgttgcctgacgccgcggctttttccgacgagggtagcaatactcttgccgcaataagaaaatcaccgtattttaaaggggaaaatcttaaaaaactgggcttattcaatatagacggagttgaaggaggcgtcgtaaatcctgcgggcgcttacgggcgctttcgggaaaagtcagccggtaaagatactaccgtcggacattgggagattgcggggcttgtatccgaaaagcctcttcccgtttttccggacggttttcctgctgaaatcatttcggaattcgaaaaactgacgggacggaaggtcttgtgcaataagccctattcgggcaccgaagtcataaaggatttcggcagagaacacgtaaaaacgggttgcccgattgtttacacttccgccgacagcgtatttcagattgccgcgcacgaggacgttatccccgtaaacgaattgtacggaatgtgcgtgacggcgagaaaaattcttaccggagaattcggagtcggaagggtgatagcccgaccgtttaagggcacgtaccccgattacgtcagaacagataaccgccgtgatttttcgcttactccgccgaaggacaccatgctcgatttgataaaaaataacggactcgatacgataggcgtcggaaaaatcagcgacatttttaacggaaaaggaataggaaaatcatatcatattaaagacaattccgacggtatgcggattacggaaaaccttttgaaagaagattttaacggcctgtgttttgtaaatctcgtcgatttcgatatgaaattcgggcatcgcaacgacgtcgacggttatgcaaaagccgtcgccgcgttcgacgggtggcttccttcgttcattacgggaatgaggcatgacgacgtgctgattatcacgtccgaccacggctgcgacccgtctacgccgagcaccgaccacagcagggaatatactttcgctctcgtttacggaagcgaggtaaaaaacggcgtgaatctgggtacccgggatagttttgccgatatatcggcaacgattttaaatgctttcggcatagaaaattctcttgccggacgaagtttctatagtgaattaatcggctgaacggacataaaatacagcggttaaaagggagcgcagatggattataaagaattgattcggtttgctttcgacgcggcggaaaaatcttattcgccgtattcccgttttaaagtgggcgcggctgttctttcaaaagacggtcgggtatttaccggagctaatatcgaaaacgcgtcgtattcggttactaactgcgccgagagagttgcgttgcagaacgcggttttcgagggcgctcgggaattcgaggcggttgccgtcgtcgggttcaaagagggcgaaacggcggatttctgtccgccatgcggggtttgcaggcaggcgttttcggagttttccaaggacggaagccttaaaatagtgcttgccaaaagcgaggacgactttaaagtttacacactgaacgaacttatgcccgaaacgttcggaacgaggcggattgtattatgagagcgtacgacgttattaaaaaaaagagagacggatatccgctttccgacgaagaaataaggtttttcgtaaaaggatatacggaaggttcgatacccgattaccaggcggcggcttttcttatggcggtttattttcgcgggatgaacgcttccgagaccgtagcgtttacgcgtgaaatagccgattcgggcgacaaagtcgatttatcgggaattaagggtttcaaagcagataagcattctacgggaggcgtcggcgacaaaacaacgcttatcgttgcgcccgtcgttgcgtcgtgcggcgtgaaagttgcgaaaatgagcggaagaggtctcggtcatacgggaggcaccgtcgacaaactggaagccattcccggttacagaacgactttatcccgtgaagaatttttcggtgtcgtgaacgcagtggggtgcagcgtgataggtcagagcggcgaactcgcgccggcggacaaaaagttttacgctttgcgcgacgttaccgcaaccgtagataaaagaccgcttatcgccgcaagcattatgggaaagaaacttgcgtcgggttcggacggaatagtgcttgacgtaaaggtcggaagcggcgctttcaacaaaactttcgacgaaggactcgcgcttgcaaaaacaatggttaatatcggcaacaaagcgggaaaaatcacgcgtgccgtgatttcaaatatggataaaccgttaggttatgccgtcggaaacgccgtcgaggtcagagaagcggcggaaatattgcaaaagggcggcgacgaagaacttacggaactgtgcctcgaacttgctgcaaatatgctttgcatcgccggtctcggcagccttgaaaactgtcgtaaaacggccgaaagaaaacttaaaaacggagacgctttcgaaacttttgcgaagatggtctcagcgcacggcggagacgtaagttacgtcgaaaaccccgataaacttgttttggggaagttttcacgcgacgtaaccggcgatgaaagcggctatattgtcggtatgaactgcgaaggatacgggcttgcaagtctggcgctcggcgccgggagaaacaaaaaggacgacgttatcgacccgggagcgggcatcgtagtaagaaagaaaacgggagattacgtcaataaaaacgacgttgtcgcaacgttgttctcctcgtccgaagaaaaactggacgcggcggaaaaaatattgaagagcgcgctgaaaacgggagataatcctccgccgtacgtgcctataattttgggaagggttaaataatataattatataaaacatagtttttgggggttcgtcttatgattaacgatttaaaagaggcaagaaattttttcaaaaacgacaggtttgcaaccgaagcaacgggtattatcgtgttaaacgcagaaaaaggattttcgcgttgtatgattaacgttacgcccgttcatatgaataacgacggtttcgtgcaaggcggcgcgatattcactcttgcggatacggcgtttgccgttgccgcaaatatgaaaaatgctcacacggtgacgctggacagccatatcaattatcttctgccgtcgcgggcaaaacaattgtacgccgaatgcgaatgcgtaagagacgggcgcacgatatgtctttacgtcgtaaacgtaaccgacagtaacgcaaacaaaatcgcgtacgcgacgtttacggggtatcgcgttcgtaacgattgataatatgagcgtatgtgttaacatatgcgcaaatttacttgttcagacatttctgcactttatgcgcataattatgcgcgtaaagtcggattattgcaattatgcgaataattgcggaattttcatagtatttatatttcctgtttacatttttggttgaaggcgtaaaatcagattgcttaatatttcgacgcggtttaaaaactattgccgggtagattagaaaatcagcttcgagtcccgtacattcgttattgccgtatctgaaaaggtggatattatacccttttgtcaataagtcgacaaccgccgtgtccggtttttcgtctggtgtgaagcgtgcaatcttttttagcgcacgcttttttttaattcagaaaaggagcattaaaacggtattgacaaagtacacgccttgtgttattataaaaatgacctttataccataccaaaatctaaaggttactaaaacaagggatttatcccgaaaagctctgtcccttgactaaactcaagggacatcttttattgagagggggaaatgtatcgtatcggtcttgatgtaggtattaaatccgtaggttggtgcgtcatggagtgcgacgcaaacggcgagccgttgcatatcaaagcgttgaatacgagaattttcgacgcggcggagcaacctaagaccggagaatcgcttgcattgcctcgcagaaccgcgaggggtcaacggcgcagaacgcgcagaaaatcttcaagattaaaaagcatccgggatttgttttctgcaaacggcatcgcaattttcgacgaaactgccgacggttgcgttttgccgaaaaaagaatacgtaaatatcgacgtgctcaaaaagagagccgaggcgttggacaagcctgttacaaaagaagagtttgcaagaattctttattcgttggcgcgtcatcgcggatttaaaagcaataaaaaaccgggtgcaaaaaccgccgaagacggcaagttattggctgcgattaacgaaaacgaaagaaaaatgcaggaaaagggacttcgcaccgtcggagaactgctttatcgagaattcgaagaaaaaggtctggccgtacataataagggcggagattattccaggtgcatttcgcgcgacagtcttataaaagagattaaattattgtttgaaaaacagaaagaatacggaaacggatttgcgaccgaagaaaacctcgaaaaatatctcggctatttttcaaaacagcgcacgtttgacgagggtccgggtcccgggagcaaatattctggcggtcatgaagtaaaaaaatgtcaattttataaaaacgaacattgcgctgcaaaaggtacttattcgtgcgagttatcgacagcatgccagaaacttaataacttgacgttggttatcggcggcgacaggagacttctgaccgacgaagaacgaaaaacagtgttgttgcttgcggaaaaaaaggacgcgttgacgtacaaggacgtaaggaaggcactcggatacgtcggaaacgaagatatgcgtttcggctcgttgaattatgcgtccgccgcaaaaaagaaaaaagacggcgcgataacggatgactcggatattttcaagtgcgaaagcgcaaaattcataagtctaaaaaacagcaacgcaattagaaaaacgttgccggacgaattaaaaaacgacattgagcttatagatgaaatcgccgaaatctgcacgaaatataccaacgagacgttgttcaggaacgctgtaaaagaaagcggaattattaacggaaggctgaaagacgatactgtcgacgaacttctgtcgctcgacatgaaaggatacggccatctgtcgttgaaggcattaagagaaattctgccgtatttaaaggcaggggacgtttacagcgtggcatgcgaaaaggccggacacaatcattccgtttccgaacacgaaagagcgaagtatctcggaaagaatcccgaagtcagagaaattcttgacgatattacgtcgcccgtagtaagaagggcaatgtcgcagacgataaaagtcatcgacgcgttgataagagaatacggcagcccgtgcgctgtaaatatcgaacttgcgcgcgatatgtctctgaatttttcggacagaaaaaaagaggaaagagataatgcagagcgcgcaaaagtcaacgaagaaataagaaaaagcattgccgcagcgggggccgttcccaatgcgaccaacgttctgaaaagaaaattatatgacgaacaggattgcaagtgcgcatatagcggaaaaacgctggacataaacagactttatgaagacggctattacgaaatcgaccatattataccctacagcaggtcttttaacgacagtttcaacaataaagttctcgttctgaaatcggaaaaccagaataaacgcaacaacactccttatgagtattttttaagaacggggcgcgactgggaagatttttcggcacgggttaaagcgatttatcaaaagcgcaacaacaaaaaaatggaattgttgttgaaaacgacggtcaatgaagacgaatggaaaagcagagcgattaacgatacccgttatgcgtcgagattgcttgcaaacgtcataaaagattaccttttgtttgacgaaaacgcaaagggcaaaaaacgtgtgctgaccgtaaaaggcggtataacgtcgtatctgcgcaaattctggggaatacagaaggtaagaagcgacggagacaaacatcacgccgttgacgctgcggtaattgcgtgctataccgataaaatcggacattctatcgagcgatataatcagattaaagaatcgaacaaaataggaaacggagcatatatgttgaaggacggcgagattgtttcgtccgaatattacgacaaaaacaacaatcttattttaccgtatccttacaataatttcaaggacgagcttatcgcccgtacagaagacagcccggtgataatggaaaacgctttgagacgcatcggaatgcccgaagattatattcataacgccgccccgtttatcgtcagcagaatgacgcacagaaaagcgaagggtgctatacacgaggcgacggtatggagttctaaatacgttgtaaacgaaaatcccaaaattcacgacggagaaaagattatcgtaaaacgaacgcccgttgaaaatctgtctcttgacgataaaggcgaaattaaaggctattttaatcccgacggcgacaggcttttatacgaggcaatcaaaacccgtctgaaagaacacggcggaaaaggaaaagacgctttcgccgtgccgttgagaaagccctgctatagcggcgaaggcaatatcgtaagaaccgtaaaaacctacgagaagtatttcggaggaggcgttgttcttgaaaaaaacaaggggattgccgccaacggctcgatgatacgtatggatttgtattcgaaagacggcaagtattacggcgttcccgtttacactgccgatttgtataagggcgaattgccgaaaagagcggcaacgacaggaaaatccaaaaacgagtggagagtaatggacgatacttacacttttgaagcgtcgatttatccttccgatttgttgcggattgacagtaagaaagatattcgcatgacaaagaaacgaaaagaccagaagagtcaaaaagaagaaaaatactcttttcagggcggttatttttactatatagcatttaatatctcaacaggagctattgatattgaagacacaacaggatgctataagactacaatcggaatacagaatttagggaagatagtaaaatgcgaaattgacgtgcttggcaacgttaccgaaatcaaaaagcgtccgaaagcgcccgaaccgctaaaactgcttaccgaaagcgaaaggaaggaaaagaaaaaatttaaataaaaacaaaggtgaaagatgggatacgtcaacgtttttgtatcttccccgtgcaacctgtctgtaaagaacagacaactgattgtaaaagggcaggaagagcattcctttccccttgaggatatgaacgcattgcttatcgaatctgcggagtgcaacgtttcgggttatgctttgcaggcgcttgccgatgcgggcgtagtagtctttacgtgcgattcgcgacatcttcccaacggtgtattaacgccttataattgctactatcgacaactaaagatacttaatttgcagttaaacatatctaaacctcttcagaaacaactttggcaaacgataataaggcgaaaaatcgaaaatcaggcgttatgcgtacgaatgtgttcggacgaaagcaataatgaccttctgacgcttgcgaagtcggtaagcagcgatgactccggaaattgcgaagcgacggctgcgaatatttattttaaaaaaatattcggaaaaggtttcgtacggcgcgatgattcgtttgtcaacgcagcacttaattacggatactcattgataagagggcttattgcaagaacgcttgccgtatacggattcgaaccgagtctgggaattcatcattcaaacgaacttaacgcatttaatcttgccgacgaccttatcgaacctttcagacccgttgtagatatgctggttttcaacatgtcgggcagcgaaacccttagttcaaacgataaaaagaggcttttttctttgcttaatcaggacgttcagataaacggcgggatatattcgctttcgtacgcggtggaaattacggtgcaaagccttaaaaacagcatggcagaagggaaaaatattttgcagcttcccgaaatacttccgataagtatgcacagttatgagtaaatatatgcgaattttagtatttttcgatttaccggtaaccacgaaatccgaaaggtttcttgcaagttcgttccgcagatttttgattaacgacggatattatatgttgcagtattcggtttatgcgagactttgcaacagtgttgataatgccgaattgcattttgcaagacttgcaaacgaagcgccgaaaggcggttcggtaagatgtatgatagtgaccgaaaaacaatatgcgaatatgagaattattgcaggcgaacaaaaaatcaaggaaaaacctgcagattattatcagcttacttttttgtaaaaaaaaagaaaaatgccttttaagaaaagcaaattcaaaaaaaattttataaaataggaaataaaagtgaaagtaaaatccccgtaaatattgaggtttacgggggtttttcttgttccgtattataccataccaaaatctaaaacggaactaaaacctgttcgactttattatttttaaatcacgcattataccataccaaaatctaaaacggaactaaaactcatcgtagtttcatcgaacgccacttcaaattataccataccaaaatctaaaacggaactaaaactttcttcgtagtcaatcattgttcgccaaaattataccataccaaaatctaaaacggaactaaaaccgcgcgctcataagctctgatgcgttcataattataccataccaaaatctaaaacggaactaaaacaaactactactttcttaaaaagcacttttaattataccataccaaaatctaaaacggaactaaaacttaagtaaaccaccacgatttacagtagtaattataccataccaaaatctaaaacggaactaaaactatgtcaacaaaaacctcgacaaggaacttattataccataccaaaatctaaaacggaactaaaaccgtcaaaacctgctttttttctcgcagtctattataccataccaaaatctaaaacggaactaaaactcaaggtttttaactctcttgctgccttttattataccataccaaaatctaaaacggaactaaaactcgcaaaattcttttatcggctgtcttaaaattataccataccaaaatctaaaacggaactaactgcaagatgctcgcaaatttcgtttttttaggtaacaaatttcaacgaaataacaaaaggcgtttcttaacggaagcgatagctatgccataggtaacgatatcggcgtatatgtcagcatacccgacttggacaaatatgtcattgacaccgaaggtttttaaaaaccaaacgtgcgaaaagttgacgacacacggacagattatcgatagtaatgcttataactacattttctacaacacttcgcccgaatatccgacaaaagtaaagttggaaaaagaagaattgcagtctttacgcgaattaagccacccgaaagccgaaaaagacgcggaaaataaagaaagcaccccgtttgaaccattaaagttcaaattgggtgcttgtggcgggcaagtggtgattgcattctaatttttattgttcgttttttaatagttcttgtgcaatattttgcattttttcatctaatatggtatttttatcgtctaatatttgttgcaaagctaatttttgtaaattttttgtaaatatggtttttgcataattaattctagatttttttgtttcttcactgtattgctcttcaattatatcaattacatctaaaactgaattattttttaattgaacataatatttaacaaaaaatttagaacctaccttttccaataaataattgagccttttttgttgtttatctaagagtttatcagagtgtttttgcgaattctttttcttttcgttataaatggcgacaaataattttacataaaaaatatgtcctataatcaaaaaaacaagtgcaagtccataagtatatcctaaaaaataaaaacatccaaaaccaaaattaattaaagcaaatatgaaaacgaataatggattagtaaaaatcaaaatacaaattaaatttcctaattttttttcaagagacgcagtgtatttttgataatctttttttgtattcattccgttaagaggggcaaatatttcgataagaattacacaaatcaaattataattaaaactccaagttgttgaatttgcctttattaaaaattcataaaatagagcaaacgatatttgaacgacagccataataaaagaaactatgaagaatttttgagccaatttcatatttttttcaatactcataatattctcctaaaaaatttgtttcaactatttagttggtttagcataattattatagctctaattatagttaaagtcaaattatttgcgtttttcagtttgtgttgcgactataaatccagcaacacctttataacaaaaataaaagagattgtatccgttgttagaatacaatctctcttggcggagcgtaagtaacgtaaatcgaattacgggttaggaacaaacctctatttagaaaaattgtaattttctacaaaaattctcaatagccgtattgacatactttagtgtgaatgatataattagtacaaatatcattggagcattatgtatggaaattaaacgtgatttttatctaaacaagttgatactgcacaagaaaaacggaatggtaaaaatcataaccggcgtcagacgttgcggaaaatcttacttgttatcaaaactttttcgtgaacatttgttgtcttgcggcgtgccggaagaccacataatttttattgctttagacgattacggaaacaaaaaattgcaaaaccccgacgaattgtatgcttttgtaaaaaatagcattgtagacgatgcagattattatattctgttggacgaaatacagcttgtcgctaattttgaaagcgttgtgaacggttttatgcatatatccaatgcggatatttacattacgggcagcaattccaagtttttgtctagcgacatcatcaccgaatttcgcggtcgcggagacgaaatccgagtttatcctcttagtttttcggagttttattccgtgtatggcggcgaattcgacaaagcatgggcaatgtattgcaattatggaggcatgccgctttgtttgtctatggaaacaatggaagacaaggcgaagtatcttacgagtctttttgaaactacctaccttgccgacataatcaaccgcaacaatttgcgtggcaatgcggaaataggcgagttaaccgacgttttggcgtctagtatcggttcgcttaccaatccgctcaaattgtccaacactttcgcaagtgtgaaaaacgtcaagttgacggcgaacactatttctgcgtatatcgactatttgcaagacgcttttttaattgaaaaggccgttagatacgatataaaaggcaaaaagtatataaacacacctgccaaatactattttgtagatatgggattgagaaacgccagactagcgtttaggcagcaggaatacactcacataatggaaaacgtaatatataacgaattgcggttgcgtgggtattccgttgacgtgggggttgtggaaaacgtagaaaaagaaaacggaatttctgttaggaagaaactggaagttgattttgttgtcaatcttggaaacagaagatattacgttcagtcggcttacaatattcccgacgaagcaaaaatggcacaagaacaagcgtcgttgctggcaataaacgatgcgtttaggaaaataataatcgtgaaccaacctattttgagcgggtacaacgagcaaggaatactgctgatttctttgcaagactttttaatgaaccctgaaaaagcattgaatttttaagagaggggctatcaagagaaaagccacatatttaacggaggaaaaatgactgaaaataaaatcattgatacgatgtgggacgacagtccgatagatataactcaggaagcgaattttatatggagcattgccaacaagttgcgcggctcatatatgcccgataaatacggcgacgtcgtaattcctatgacgattctgcgccgtttcgagtgtgcgcttgaagccacaaagcaggcggtgttaaaagcctatcagtcaaacccgaattacccgtcgaaagcactttgcaaaatcgcggggttttcgttctataacacgagcgagtacgacttaaaagaactctgcaacgattccaagcatattgcggcgaacttcaaaaattatatcagcggtttttcggctaacgtaaaggacatttttgccgaacttgaaatggacaagcatatcgacaaaatggaaaaagacggctgtctgtattccgttgtcgaggcgttttccgtgcttgacctgtccataaaaacttacgacagtatcaaaatgggatatatttttgaaaacctgatcggcagattttatcagaacgtggacgccggacaattttatacgggcagagatattatcaaattgctcgtagaaattttaatggcagaaggttgcgacgatattttcgacagccacaaggttattaccgttctcgaccaagcctgcggaacgggcggtatgctttccacggcgtatacctacataaaacactataatcctacggcggaagtcaaactgttcggacaggaatttatggggcagtcttacgcggtagggcttgctgaaatgctcatcaaaaatcaggactcggataatttccgtcacgtcgatacgttcaaaaccgattgctttgccgatacaaaaatgcgttttgtcatcgaaaacccgccgttcggcacaccgtggtcgggtaaagacgcaaaggacggacaggagcaagccgtgcgcgacgaatacgccaaaggcgaaacgggcagatggggacacggacttccgagcggtggcgactcgcaaatgattttcttgcagtccgccgtggacaaaatggacgacttctgcggcagagcggcgattatcgaaaacggctcgccgctgtttaacggcgataccgcttcgggcgaaagtcagattcgccgttggcttttggaaagcgaccttattgaagcgattatcgctttgccgactgatttgttctacaacacgggcattcagacttacgtttggattctctcgaaaaacaagcgcaaagaacgcaaaggcaaaatacaactcatcaacgccgccgagatttaccataaactgcgtaaagccgtcggcaacaagaagaatgaaatcacgagagaggacagaaagagaatcacgcacctttatgccgattttgtgccgagcgacctttgtaagatttacgataacacggagtttctttataaggaatatgccgttatgcaaccgcttcaacgcagttatgctatcacggaagagcgtatcgagcaaatgctgatgaaaggcgcgctttcaggtgtttacgacgaagcgaagattgccgactacgaaagtcagggtgttacgcttgccgataaagataagaaaaaatacgaagaaatgcttgaaagaaagccgttatatgaggacattctgcaaacgctgaaagagcatatctcggacaaggtatataaagaaccggaaagtttcatcaagtacctttcgggaatcttgtcgtgcgataaaaaactgacagagcgtatcgcggacgggctttccgagatggacaaaacggcggaaattcagcgcgataaaaagggcaatattatttacgacaaagaaacgcgcgacaccgaaatcgtgaaatataccgaggatatagatacctatatggcgcgtgaagtattgccttacgttccggacgcgaaatggttttgggaagaaaatctcggcgcgaaaaagcccgtaattaaaatcggcgcggaaataccgtttacaagatatttctataagtacacgcaactcgaaaagagcgaagtgttggaagaaaaattcttaatgcttgaaaagagcgtgagcgaaagaattaaaaacttgtttgggggaaagggaaatgaataatgatcaaagaaaatcaatgataaacgttagaagttgttttagcgagtctattggagagtataaatgtgcaatggaaatgcaatatgatgactttgatagtaggacaaggactctaatcagtaataaactctatgaaattctagaattttatatggacggaaaatctagttttttctgtcctggtatcggatcaagcgacaccttgaaagaacgtttttgtaaagcattactttcagatgtcttcaaccaaagcactgtgctagaatatggctattcgtttgattggagaagagtttttacgcgcattcaaatggttataagaaatgccccattcaacgaagtgcttgatgttttatggtacataaacgattggattggaaaaagctattattcatataccacttattttagcgaagagtttaataagctttttgaaacagaatatgtcggatataggtttgtggatgggaaaattgttgccataacagataaatgtgaaatagaagagatagaacaggcttgcaatgttccatatagcggatgtaaagcgcatatcgaaaaggcggttggttttcttgctgaccgcgaacacaaagattataaaaactgcataaaagagagtatttcggcggttgaatctatttgtcagattattgtaggcgatgacaatgccacgctcggtggggcgcttaaaaaattaaaagacaacggtataaatattcacgccgcaatggaatctgctttttcaaaattatatggatatacatctgatgaaggaggcatacgtcacgccgaaggactttttgtcagagaagtgtcatttgatgaggcaaagtttatgcttgtgagttgtagtgcgtttgtcaactatttaatagcggaatacagcaaaattacaaagggttaattatgcgagagatgaaagacagtggaatttcttgggtaggagagatacccaaagagtggctttgcataaaagctaaaaatataatcaagtctaatgatggaggggtttggggaaatgaaccaacaagtacagaaaatgataaaattgtattgcgttctaccgaacaaacaattgacggaaaatggataattgaagagcctgcaaagcgagatttaagtaaaataccatataaaaattgtcttattaagcctaatgatttactgattacgaaatcaagcgggagttctttacatatcggaaaaaccactttggctgatgactattttacaactaatgaatgttattactctaattttttgcaacgcattagactgcaaaaatcatattatccgttatatgcttggtttatttttaatgcagtttttgttagagaacaatttgcatatatgcaaaattctacatcgggcttaggaaatattaactcaacggatatagaaaatataatagtaccaatcccgacacttgacgagcaacagaaaattgcagagtttttggatagggagtgcggaaagattgacggattgaaagcggatattcaagcgcagattgatacgcttgaacaatataagcgttccgtgattaccgaagccgttacccacggtctgaacccgtccgccccgatgaaagagtgtagtgtttcgtgggcgcggcaaataccgcaacattggaaagttatgccgaacaagtacttaatgacgaagataaagaatatttgtcctatatacaagggggaagatattttatctttgactatgtatggtgtgattgtacgggatttagacgcagggggtaaaatgccgtcatcttttgatggctatcaatacataaaaaaggacaatttgttaatgtgcctttttgatattgatgttacaccgagatgtataggaattataaagcaaaacggtataacaagtcctgcgtatagtcagttcaaaatgaaagaaatagcaaaggcgagattttattattactattatctaatgttggactatacaaaggaactattgcatcttgcaaaaaatctgcggcattcgcttacagaagatcaattgggtgcaataaaacaacttgttccgccacttgacgaacagcaagaaatagccgattatctcgataacaaatgtgccgaaatcgagcagattatcgcggataaaaaatcgcaaatcgaaacgcttgacggcttcaaaaaatcacttatttacgaatacgttacgggcaaaaaggaggtggaataaaatggatataaatttaatgaacggtaatttttgttcggctgagcagtatcatagagccttagaagaagtcgaaaaagaaaaaaaacagcaaaaaatcgaagaagaaagaaaaatagaaaaattaaattcgccgattgtagaacaattgcgatcattggctgagcaaagtaataaacaagtcaatgttttgcaagaagaaaacgaaatacgaaaacagcaggtggctaaacttgaagaaagtgaagaaagagccagaaaggaagcaagatcagcgaaaattctcagcatcatttcattttgcgtgagtacggcaatagcaattgcttcggtgattgtgtcgatagtaaaataaaatgaaaggagggatagaataatgtggtgggaatggatgatatttgccattgtgcttgtgattgttccatttggagtaaagggtttgaaaaagcttgctttttcggaaattacaccgacaaaagaacaagagcgttatgcacggaataaagctgttttatatacggcattcttttggctctgcgatttgtttggcatgtcttttatcatagacagtatcacatgtcgctttgcgtttggcattatggttatgatttgtatcttcgcaaatttagcggttcaacctgttgttggtgcaaaaggttttttgttaaaattggggttgattggcgactttttgtgcggcgtcggattttctatatatctgatttacataatcccaaacaaagatttgagaacggttgttttggcaattgtcgcagcggtatatggcggaatgatgactttggtcggcgttgcgtggacaataaagaaaggtgacaaagatagaaaagaagatttacagcgactcgaaaatga

SEQ ID NO: 3517 - DNA, 21921 bp, synthetic construct
  misc_feature 1..21921: note = Synthetic
  source 1..21921: mol_type = other DNA
aggcagacgataatatacagcaacctcggcaaagttcaggtgccgaaagaactcggcgtggaatatttttacgtgaacatgaacgcgtccaagtccaacactcaaaatatgagttccgcgacaacggacggcaaagcggtgtttacgatcacgcgcgccataaaagaaaaggatttgtcggacgagctcttcgcgctgcttgaaaagggcgaataacaaagaatcaataacaaaacccatagaatgcaaaaaccaaacaaagccaacgaagttggcgaagttggaggaaatatgaaacagtttacatcagacgaactcagaaaactctacttggagttttatcactcaaagggacacgcaatcatcgactccgcgtctcttatccctgaaaacgatccgacggtcctctttacgactgccggtatgcacccgctcgtaccgtacctgctcggcgaaaagcatcctgcgggcaaccgcttgaccgacgtgcaaatctgcgtcagaacgggcgatatagacgaggtcggagacgcgtcgcactgcaccttcttcgagatgctcggcagatggtctctcggcgactacttcaaaaaggacgctatcgcgtggtcatacgactttatgctcaacaaactcggctttgacaaggacaaattctccgtcacggtgttcgccggcgacgaggactgcccgagagacgaggagagcgcaaactattggagagaggtcggcatccctgcggagaggatcttctatcttgacaaaaagcacaactggtggggacctgcgggtatcacgggaccgtgcggaccggataccgagatgtttatcgacacgggcaagccgaagtgctctcccgagtgctctcccgcctgcgactgcggaaaatatctcgaagtcggcaacgacgtcttcatgcaatacttcaaaaacgcggagggcaagtttgaaccgctcaagcaaagaaacgtcgacgagggcttgggacttgaacgtctcctttgcatcttgaacggctacaagtcggtttatgagacggatttgttcagttttgccatcaaaaaactcgaagagttgtcgggcaagaagtacggcgaggacgagcaaatgacagtcgctatgcgtataatcgccgaccacacgagaacggctaccttcctgcttggcgacatcaaggcgatttctccgtccaacgtcgaccaaggctacgtgcttcgcagacttatccgtcgcgctatgagatattgcagaacgctcggcgtcgacgactccgcactcgtagaccttgcaagactctacgtggagaagtataaggaagcatatccgtacatcaaaacaaacgaggaaagaattgtctccgaactcgaggctgaaaaagataaatttgcaaagactatagaacaagggctcaaagagttcgacaagatagtctcgcacctccctgagggtatgaccgtattcccgggcaagacggcgttcagactttacgacacgttcggcttcccgatcgaaatgacggaagaactcgcaaaggaaaagggctatacgttagaccgaaacggctatgacaaggcgtttgcggatcaccaagcgctttcaaaggcgggcgcggaacaaaaattcaagggcggtcttgcggacggcggtgaatttacggcacgtctccacagcgcaacccaccttctcaacgccgcactcaaaaaggtgcttcacgacgacggtatcaaccaacgcggttcaaacatcacggcggaaagactccgctttgacttcaacttcccgaggccactcacggcggaagagatcgcggaggtcgaaaaactcgtcaacgaagagatcgcaaaagatacggaagtcaaacttgaagagatgaccgtagacgaggcgagagcaagcggtgcggtcggcgtgttcggctctaaatacggcgaagtcgtcaaggtgtacaccatcggtttctcaaaggaaatttgcggcggacctcacgcaaagcgcacgggcgaactcggcaagttcaagatcgtcaaagagcaaagttcttccgcaggcgtaagacgcatcaaagccgtcctcgaatattaaagtaggtttgcaaatgatacgcgtcgattcacatacacacacaaatcactctcacgacgggcacgtgtccgttgcggatatggtgaaacttgcgcgcgagcaagggctttcatatctctgcacaacggaccactgcgactacgacctcgtgtacggcggttgcaaggctccgttccgttggggcgatacggacgtggaaagttattatgaggactggaaaaaagtcaaagaagaacttgacaaggacaaaacgaacactttaaccctcggttttggcatcgaagcggcttttgcccccggcgaactcgtcgccgaaaaataccaagaactcattgccaagtacccctttgacacagtcatcaactccgtgcattgcgcgggcggaaaggacatgtatttcaaaaacgcgttccttttcaagtcaaagcagcaggcgtacgggctgtatctcgacaccatacgcgagagtctcgaagcgccctaccagtacgacgtcatcgcgcacatcgggtatctcacacacggcgcgccgtacagggacaaggcactaaggtacgtcgactttgcggacaagatagacgatatactcaagcggatcatagagcttgacaaggcgctcgaagtcaacttccatcacgagatgaatccaaagagggatataatcgagagatacttcgaactcggcggaagaaaaatctcctacggcagcgacgcgcacaggggagacatttgcaaagagtttgaaaacgtctccgctatgctcaaagaaatcggcttcactcactttgtcgtctatgaaaaacatcagccgaaatacgtgccgataggcgattgacattttgtcaaattaagtttatattagaaaatacaaatatatgtgctcgcgcacatccagaaggaataatatgaaaaagaatctcgaaaaaatctttacccttgccagcgtagtggtcgccataatcctcattatggtcctcatcgtcacagcgtttggcggtatcaaaacggaagagtttgacaacggtctcgtcaagggcttgctctttacgctcgccgttctctatatcgtgctttccatcgtcgcggttgtgcttatcttcatcaacaacgacgtcgtcaaggacgtgactttgagaaacgacaagggcggttctatcaaagtctccgcaaacgtcatcacaaagtacgtcaaatccgcttgcgctcaagttgaaggcgtaaagtgcaagaaggtcacgctcgtcagcgacgaatacggcgtaagactcaaaacggacgtcaaagtcatcgacaaagacgttatcgaagtcgagacatatctcagaactctcctcgaagacctcttctacaacgaattcaattttgcgttcagttctatcgaattcaaggtgaccgcgctcgttccgaagtatgaagccaacaaagaggcgatcgaggaacaagtcgcgaagaaacttgaagagatcaagaaggcggaaacacctgaagaaagcgaagaattgaccgcggaagaacctgcggcagaggaagcgcaacaagaagagacagacgctcaaccagtcgaacaagaagagacggctgacgtcgaagaacttatcgaggaacaaatcgaacaaccggcagacgaggcaaacgcggcggttgacgtcgaagttccggaacaagaaaaacccgaagaataaaaatatacccgtcgcgtatttagcgcgagggtgaaaaggaatatagcatgagtgtaaaagaagtattgttgaccaaagaaggtcttgaagaactcaaggaaagactgaattatctcgtcgttatcaagcgtaaagaagttgcagagcatttgcaacacgcaagatccctcggcgacctttccgaaaacgctgagtacgacgccgcaaaacttgaacaaactcaagtcgaggcggaaatcaacgaactcgaagagaaaatcaaatatgccgtcatcatcgaaaagggcgcaaagaacaaagtttctatcggtagcacggtagaagtcgaatttttgggagaactcgacgagggcgaagacgcgcgtatgactttccgtatcgtcggcgagacggaagcggatttctcaaagggatttatctccaacgaatcaccgctcgcaaaggcgctcctcggcagaaaggaaaaggaaacggtcatcgtcaacgctccacacggcgaagagagttacaagatcatctctataaagtaaaaattttaagttggcaagaaagggcaactgtaagttgccttttccttgcgtttatttggaaaaatggcagaacaagaaaatttgaacgtacaacaaaatcaagaaaaagaagtcgacgcgcttgaggtccgcaaagttcgtatcgagaaattgaacgaactcgtatcccgcggtcaaaatccgtttgaaatcgtccgtttcgaccgcacgacaacggcgggcgcgatccacgcaaactatgaggaattcgagggcaaagaagtctccgtcgccggtagacttatgtcaaaacgtatcatgggcaaggcgagtttcggtcatatcatggactcggacggaaaactccaagggtatttctcccgtgacgacctcggagtcgacgaatatcaagatttcaaaaaactcgacgtcggcgatatcgtcggcatcgtcggcaccgtcttcaaaacaaagacgggagagacgtccgtgcatgcaaagaaggtcgtcctcctttcaaaatccctgcttccgcttcccgaaaagtaccacggactcactaataccgaactcagatacagacaacgctacgtcgaccttatcgtcaatcccgacgtcaaagagacgtttgtcaagcgtagcaaaatcatttctacgatccgtaaagtcctcgacgaaaagggctttgtggaggttgaaactcccgtgctcaacacgctcgcgggcggtgcgaacgcaagaccgtttgtcactcatcacaatacgctcgatatagatatgtatctccgtatcgcgaccgaactccacttgaaacgctgtatcgtcggcggttttgaaaaggtgtacgagatcggcagacaattcagaaacgagggcatggatccaaagcataaccccgagtttacgtctatcgaaatctaccaagcgtacgtcgactacaacgaaatgatgaacattacggaagaactctacacggctgcggcagaggaggtttgcggtagtctcgacatcgtctaccaaggtcaagaactccacctccaacgcccgtgggcaagactcactatggtagaggcggtcaaaaagtatctcggtttcgattttgacaacgagccactcgccgatctcatcaaaaaggcgaacgcaaaaggactcgacctcgctcccgacacgagttggggcaatgcgctctatgcggtcttcgacgcgtttgtagaagagcaactcgtcgggcctgtctttatcacagattacccggtcgaggtcagcccgctcgcaaagaaaaaaccgtcggacaaccgtcttaccgaaagattcgagttctttatttgtgcaagcgagggcggcaacgctttctccgaactcaacgatcctctcgatcaacgtaagcgttttgaggcgcaaatgcaagccaaagccaagggcgacgaagaggcgcaaccatacgacgaggacttttgcacggcgctcgaatacggcatgccaccgacaggcggtctcggcatcggcatagaccgcatggtaatgttccttacggacagtgcgtccatacgtgatgtgttgttgttcccgaccatgcgtccacttgccaagtaaaaacaccacattgtggcgacctgctttgtcaggtcgctttttttgtcggttgcgtacgtccgtgtacgcgcgctccaaaaaaatcgcccttccgcgcatctcatccacactgtggcgtttttatcttggcaaggcacagttttgcgacttgcatcgtcaccataacagcgtgtttgataacaggcacacgaagtgtgtggcgttatttattttgtttccttgcacctcatcaaaactgagcggtttggatgatagcaatatgaacaagcacacgaagtgtgtcggttgcgtacgttcgtgtacgcgcgctccaaaaaaaccgcttatataaacattatcaaaaaaccgctcgaattggcttattgctctgtcaatatcgccacaactcacggatttatccgtgaatataactcgccgtccggcgaatataactctcgcggtgcgagaatatagctcccgtagggaatataacaataaaagtttcggaacaaatccgaaacttttatttatatgaactgttgagggtgagttcaaccaatttcccgtagcgggaggcggtttcgacgaggtcctttgtgacggtgatgccggcgcgagcgatgagagtgttcgcataggtgaacaggtcgcgaaggagagtcctgccaagcaggaagtcgtagtcgcttattatgcgagcgggagttttttcttccgaatcgtcaaacaccaactctttgccgactatcttttcaagggcgtcttgagagaatagcggggagccttgctcgataaacgcaggaggttttggctccgcaggctctatggcaaagatgtccgccgtgttcttgcctgcgtcaacatcggagttgctctccgccgtgcggacattcgtttcttgtccattcgcaaaatcacctgcgagcgcttgccgttccttgtctgcggtgcgcgccataatctcaacttttctattcgttttgtcgcgcgggatacggggctttgcaacccttttctttgcggattttaggagtagcacgtcgccaaacgcttggaatgaggacggagaatagtctgcgtcgcctgcaaaaatcttgttcgttttgccgtttgcaaacagttctacgccgtccaccacgccctttttctcgcccgtttgcgaatatatctcctttccgtccaagaagcggagcgacgtcatgtccatgtcgtagtcgtaggcgagaaccgcctccgtgcctatgacgacggcgtcttttgcgctctcgattttgtcaaatggaagcagggtagcgcctccgtcgcgggaaagggcaaggtagaagacctgtttgccgtccgcgccaaacaacacggctttgacttcgccgacgatagaagaattctcaagacacagcaccttgcgcccgataaaaccttgtgtgttatacatcattttcacctcaaaaaatgtatattaaacacgattcgtaaatatgtgtataattgccattttgtacgacaatttcaaaaggctaagttagatatgcgatttttgtcgaagggtgtcgaacgggatttttgaaaaactgccatagagaaaaatttggcagcaatttttgccttttgcgaaaaccgtgttctaatatagaattttgcgggttatccaccgacttatccacaaaataacctcaaaatgtggataactttgtggaaaacagtgaatttttatacttttctgcataaacttacaactgaaacgatatgcgagtttttgtggttaaaaagccgaatattctctccgtcatcgccgtcattttggcggtgtgcatagccctttttgcgctcggcactccaatgatcgtatacgccgtgcgcacgtcgtccggcacttctacgatcgttatcgacgcagggcacggcggcgtagacgcaggagttgtcggcaggactactggaatgaaggagagcgaactgaatctcgaaatcgcattcctcctcggcgacttgctaaagggcttaggattttccgtcgtgtacactaggacaaacgatacgatgctcacgaccgtcacgagcgacacgagaaagcgcagcgatatgttttctcggggaaaaatcataaattccgcaagggcagacgttgtcgtcagcattcacatgaactattttccgtccgacgtccgtcgcggagcacaggtcttctttgctcgacgggacgagcggtcgttttcgctcgcaaagtgcgtgcaggatatgctcaacgtcctcaatagcgagcatacaaagagagaatactctccgctcaccgccgacaaatacattctgtcctgctcctcagccgcgtcaataatcgtcgagtgcggtttcctctccaacccccctgacgaaaaactccttcaagatccgcaatacaaagccgccctcgccgaaaaaatcgcgcagggcatctgcgcgtacttgggttgagatagaactaattgtctctaactctttatagtagcaggtttgttgtcccgttttcggtacaaatagtgtgctattattttgtcgtagcggaaaggtacaaggggactgcgcagaaaacatattgacaataataaaatattgtgctaatataacgataaccttttataccataccaaaatttaagaggttactaaaacaagggagtaatcccgaaaagctctatcccttgatgtcgctcatcaagggatatcttttttaggagacaatatgtacagattaggcttagacatcggtattaaatcagtcggatggagtgttttggaatgcgatgaaaacggtgaaccaacgaaaatattggcgctcaattcacgaatttttgatgctgcggaagtgcctaaaacaggtgcttctttggcggaacctcgcagaacggcaagaggaacacgtcgtcgtcttcgcaggaaagtggcgcgtttagcctatataaggtctctatttgaacttaataatatatttatatttgataatagtgacggattgcaaataaaagatgaatataagtatataaatgtcttatcaaaacgagtagaggcgcttgacaattatgtcagcgaagaggaatttgcaagagttttatattctattgcgcgtcacaggggatttaagagcaacaaaaagaaaggcgcacaaggcaaagaagacggagaattgaccgcttccatcaaaaaaaatgcagataaaatgcacgaactcggataccgcacaattggcgaaatgcttcttaaagagtatcagcaaaaaggcgaggctgtacacaataagggcggagattattcaaagtgcattgcgcgcgacgatttggaaagcgaaatcagattgttgtttgcaaaacaaaaagaatttggcaattcatttgcaaccgatgaaaatcttgaaaagtttttaggatatttttcaaaacagcgttcatttgatgagggccccggtccgggtagccagtattcaggcagtcaccctgtgagaaaatgcacgttctataacgacttgtattgcgcggcaaaagggacttattcaaacgaacttgctacagcgttacaaaaaataaacaatttgaaactcataattgacggtgagtcggaaccgcgttcgttgacacgcgaacaaagagaacaaattattgctcgcgtacatgaagaaaaagacggattgacttataaaaaggtgcgtgatcttttaggctataaaaaagacgagaacatgagattcaatgttctcaattatagcgtgcgcaaaaaaaatgaaaaaagacggtacggaagaaactccaaatccgttcaaatgtgaagaggcaaagtttatatctcttgcaaacagcaacaaaatcaagaattgtttgagagaagaactcaaaaacaatatagaagtcgttgatgccatagcggagatttgcacaaaatacacaagcgagaatttgtttagaaaagcaataattgacagcaatttgctcaatggaatactcactgaagaggagatagtcaaacttcttgacatagatatgaccggatatgggcatttgtctcttagagcgttgagggaaattttgccataccttcaagagggttacgtgtacagtgaggcttgcaaaaaagcaggacacaatcattcgcaattcgatacaagcaagtcaaaatatctcggcaaaaacgatgacgtcagagcgcaaattgatgaagtcacttctcctgttgtaaaacgtgcattgtctcaaacaatcaaggtggtcgatgcgattattcgcaaatacggcagcccttttgctgtaaacatagaacttgcacgtgatatgtcacaaacgcgtcaggaacgagataaagccgacaaagagaatcgtgatcgcgcggcggataacgagagaataaaggcaaagttggagggagagtttaacgtaagaataagttctaccaatttgctgaagtataaattgtatgaagagcaaaacggaaagtgtgcatacagtggagaaacaattgatttgaacaaactgtttgcagacgacaagtattgtgaaatcgaccatatcatcccttacagtcgttcgtttgacgacagtttcaacaataaagtgcttgtgttgtcaaaggaaaaccaaaacaagcgagattctataccatacgagtattttacaagaattggcaggaactgggaagagtttgagggttttgtcaagaccacgttcaagtataacaggcgaaaagcagaattgttgctcaagaagaaggcagatgaagagggttggaaaacgcgcgccctcaatgatactcgctatgcttcaagaatgttgacaaatcttgtaaaggatcatcttttgtttgatgaaaagtcaaaaaatcgtcctgttttgagtgtcaatggcaaaataacatcttacctgcgcagattttggggtattcaaaaaataagagaggacggagacaagcatcatgctgttgatgcaacgattattgcgtgcgtttcgtcgggtataattcaaaaacttacaaattacaattatgtcaaagaatctcgcaacatgaaaaacggcgagtatgtgcttgaagacggcgaacttgtctcttccgaatactatgacaaacatagcaatcttgtcttgccatatccatatccaaaattcagagacgaacttattgcaagagttgcggacaatgccgttgagatggaaatcaaactcagagacataggcatggacgacgaatatgtcagtgcagcaaagccgatagttgtaagtcgtatgccacatagaaaagtaaagggcactatgcacgaggcgacggtttggagttctaaatatattgacaatgacaatacaaaaatccatgacggcgaaagcattcttgtcaaacgtacgccaatagaaaaccttaaacttaaaaacggagaaatcgaaaactattttaatcctgaaagcgataaactcctttacgatgccataaaacaacgtttgaaagactttgataacgacggcaagaaggcatttgcggagcctctttataaaccgtgtgcaagcggacaaggcaatattgtccggacggttaagacgtttgaaaaatactatggtggaggaatgcaaatagacaaaaacaaaggtgttgtcgcaaatggctctatggtgcgcgtcgacctatattcaaaagacggaaaatattatggcgtgcctgtttacactgcagatgtctacaaaggagttttgccaaatcgtgcttcaacagcaggaaaagcacgtaaagattggagagtgattgatgacacttacacatttgaaatgtcaatttatccaaacgaccttttgcatattgagagcaaaaaagaaattacattgaataaggacttaaaaaatgaatttagtcctaaatctgacgagtattgcttcactaaaggtttagtatattataatatgtttgatatttctggtgctcgctttacaatagaagatacaacaggatgttataaagggagaaccgctatacaaggacttgcaaaaattacgaagtgtgaaatagatgtgcttggaaatgttgtagaaatcaagaataaaccaaaagcaccgcagccgctttgcatgaaaaaataaagtatgggatatatcaatgtgtttttgtcaaaaccatgcaaattgtttgtgaaaaacaatcaaattttttgaaaaatccagcgatatgattataacaaaaacgcagtaaacagtgaggtttactgcgtttttgttcgttccctattataccataccaaaacctaaaatggaactaaaaccttaaaagccttataagcctcgcacctgtcattataccataccaaaacctaaaagggaactaaaactacgacatagtcagagtgcagggcggaaagattataccataccaaaacctaaaagggaactaaaacgccttgacgtagttccactttgcacgtataattataccataccaagacctaaaagggaactaaaacttgacgtttccgttcaagtccataaaaatttataccataccaaaacttaaaagggaactaaaaccgtacttcataactccaccccatattctctattataccataccaaaacctaaaatggaactaaaatctatggtttaataacaaagaagttccctcatattttaactatgaaaatgtcaagaaataatgcgaaaaattttgaatatttttgaaaaatgctaaaataaagacgttggagacttttgtatcggcaaaattttgccgatacaaaaggacttgacagcaaactcaaataataaattatatgctaaaatacaagcctttggcttgttattttaatttatgaaattttgacccaggaacgcaacgccggttgttcgcctcgttgcaaactaaacatttatttttgccaactcgttttgaaagacttcttcggaagaagcccaattcaatatctttcttgggtaagtattaaaccaagtttcaacggcgcggatttcttctgcggtaaacttggcaaaatctgtccctttcggcaacttccgacggatctctcgatttattctttcattcgtgccacgttcataactgctatatgggtgacaataataaaccgagagacgtttccgtttcccaaagatagatttttccataccgcaaaagtcttgaaattcgctcccgttgtcaacggttatcgtcttgaacaccgcagggaatctctttccgaaacgtctttctaaaacgttcaaacaatgtatgacggtttcagtctttttgtttggtatagggaagatgatttcttttcgtgtcagtctttcgcttaaaaccaacaacgccgatttagacggtccgcacacacagtccatttcccaatgcccaaatgtatttctttcgtttatctctgacggacgtttctctatgctcgcgccttttgaaatacgctttgcaacaactcttcgttttctatgctttttctgcttgccgggaagatccgcaagagacaaagaaagaaatacgcccttggaaatataactgtaaagtgttgcaggacaaatcgtcgtgttgaattttaatcccttatgcttaatctctccgagaacagcacaaggcgaaagacggtctctacctatacgtttttctaaatagttggcaaactcaaaatcgttgcctattttgagcggtgcgccgtgagaagtcatgttcatacggtacttatcaaacgcaagttcagcactatattgtgtttttgttgtgtagtacttatcgcctaaccaatcatagcgcgtttttgtgtgttcatacgctccacgcttgatttcacgatagacggttgaaatatgcacgccgagtttgacggcaatttcttgttttgaaagttttgttttgagatatgcttcgagttgaagacgttgtgtccaagtcaaatgcttaaaagttcgtttcatcttttatcaccccctacacttgacattttcggtataaaaaaatagaaagccttaccacaactttctattgcaaacacttttcaaagattaaattttcactacccagtcgagagtgtatcaaaaacgacttcaaaaagtcaagcaaatacacaaaaattatttcaaggtttgccaccttgaccgcttggggttgtcaaccccaaacccctgaatattcgccatacaggcagggagagcagtacaaatgcctgctctctgacgagagattatctttcagtttcagccgtcaagcattttcgattccgataccgaaaattttttgcaagcaaaaagtttttccaaaatacttgaccgccgaccaactataaagcaagaaacaaacaacgttgattgacccaggaatgtgacttcgatttttgacggcgctgattggcgcagctgtgcaaagccaaagaaaaaacacggttgacacgctaaaccgcttgttgtcaatccgtgttatttttcttatgtctttgttattgcttttaaaaatcctatatgttattatattgccagtctttgaaaggagaacaacattatggaagaattaaaatgcccgatttgtggcgaacctactaacgtatatatgggaaatgcaagaaaagaccatctttgccgtaagcacgcaaaagaacttaaagacggtttaattgaacaatgtcaggattgtggcaaatggcacaaagctagcgaagaatgcgaatgcaaaaaacacaattcagaaaaattgacatgtttaatttgcggtaaaccatcaaatggcaaacatttctgtcttgattgctggaaaaaatacaaagacaaatctattgatttgagaataaataattgttcggaaacagaagttttagaccaatacggaaaccttacaatagaatgtgatgacggcagaaaagtaagaagcagagcagaagctttaatcagtaattttttttataacaacaaaatacgttcagtatatgaaaaaacaatttactatgaagaagacggaactaacaaaactctgcacccagatttttatctgcccgactatgatatttatatcgaatattgcgaactcacgaataaaccatacttaaaaaagaaagagtatacgcaaaacttatacgaaaaattaggtttcaaggtcattataatggacgataaagacttaaatagcatagcaggttgcttaaaacctaaactaaaaatcaattaaaaaaaagagccaaacggctcttttattttattttcaaaattcttttattataaaactcttgaaagccgtcgacagcacccttataaaattctcgttctttctttgtgagttttttatttttgcgccgtccgtctttaagatacttttcacaaatcatacttgctttatcgcattgacgaataccatattcgccatagaccttgactttgttcctaaaaattgcaaaaccccaacgtctgcctttttcataatcattcataaaatcacctccttattttttattgaaagtttttgtcaaatcattgacaaaataactgttttgctcttgtaattcttcgagagtcgctttttccgtagcatattctttcaaatcgtcaattccgaatttgctccgcagagatttttccgtgaagaagtcagaaaaacagtccgtagaaaaacgtttgctgtatatctttttactactcaaaaaatacttcctttcttcgattgctccgtcctgtgttccgctttcaacttgtatattcaaaagactatacccgaaaagattgtatatgcctgtgtagtagtgcacaatttttgtcgtcaacatcttcaaaacgtgcatagtgagcgtattgtcgccacgattgtatctatatttcaaatagagatttacaaacttgctccaaaacacgctgtacagcatttcttcaacagcgaaaaacggcattgtcaaacgaatatcgcttgttttctttatgctgacgatttcacacaaggcacgagcatcgagtccccaactttcaggacgttgttcgtccgtgacaacacgcacgaacggaaagttgtcaatcgttgcggagtggcgcaccattttaagccaagaattgaacaagtcgtttttttgatttgctgtttcagcctttttgattttgtccgcaagctcgatgacgtttccacgctctttgcctatctccgtaatgttgatgacaccgaactcgaagttgtccgcattttcgttgtcttcaagcactttgagaccaagacggagagtgtcaaagtccaagatataactatgtcgtgacgacacgtcaacttcttttgaatcacgccggaaaaaatccgtatttcacagcggaaaatttccgttatcttcgagaacgttgtccgtccggattgaatagtttgagattatcaaactactttgaatgacgtacacgaaatataattgtgaatatgtctcaatgacttcccaaatagtttgcactttgagtttgtcatcgtattcaaacccatattgattgtagtcataatcaaacaaaagattgtcaaagcaggcaaacggcaatgcctttttcaaatgccgaagtatagactttttataagacggtatttgatacgacacccaccagtatgtatatagtcgctttatgaatttgcgagtagtggcaagattgtagattatatgacggcgcattgcttcttgcagagtcttttcaaggttaatccaagggaagttcggaaacttcatatcgtttgatatgagcatatcgagagctttgtccctgaacataacttcctgcgagagtgctatgtccgttataaccgtcgttttcttcttgcccattgtaccgcaaaccataaagacgatagggcgttcgtttataaagcccctatctttcatttcgttgtgattaagacgtttgtatgcaatactgcgacggaatttgtcaaagatgaccaagcctgcaacgagccaaacgacaaaaggtatttttgtaaagagcggagacacgtcaatcgcaaatttgtacatttgacggtacaaatgcacaaaatcaagcgaaaccgcaaaataaaaatagtatgcgaaaaactccacaactaccgttatgacgttgaatgacacaaggaacaaacaaagccataatttccaatatacgctgttttccttgacaaagccgataaacacttcaatccaaagtttaacaggcgtataaagccatttagacgcttttttgtgcaaaatcaaaggtctgctgtccttgttccagtcgttgttttccaccttaaaatgcaatgtgaacaacaaaatcaccgccattataaagggaataacaacgattatgccataaaagaaaatatgatataacagttgtcccaaaaatttcaaatacaaactgaaatttgcttttgacacaaaagcctgccaaaacgcttgccagtccactttgaagtctgcaaacgtaaacggaaaatcaatcctatcaaaccattttgacaaattgccaacggacggttgaatgtccgcaggcaatctgaaaagagttttgacataatatgcgacggaaagtccaaagtctttgacactttcgccggctcgtgcgtacgacttccatgcgagcagaccgctcaagagtgcaaacaagaccgtcaatccgatacaaatatagtgcctataatcaagttttttcaaaaagtttctcatatttgtttcaccgtgaacactatgtagccgataaccgccacaacgatcaacacaacaagtgttgcaatcaagcccttgacgattttcatttaagttctttaagccccctaaccgcaagtgctttatagttgtagtcgttatcgacatacacaccgccgacgttcaaaaagccgtacacggcgcacgcttggctatatgccatatctttgttatctgccaaaatatgaacaaacttgttttcaaacttcgttccagagcggaacgtcacaaaatattttcttttattcattgtgcaatcactccaaaaattatttttaaccccgggctttgacccaggaacacggcgcagctctttcgctacgttgcgtgacaactttgtaaaaaacagttgactttcgtctatttagtgcatataatttgaaatataaaagaacacaagttcttagggcgtgagtttcaaatgaaacaaaatctcggtgagacttatgtcaaaatcctgacgggcgccacaaaagtggagaaaaataattctccactttattttttatatttccatggaagtggacggtcttcaaagtttgtttttttgtcatgcctaattcttttcgcaatatacattggttttttatctttagaattaggatttggaaaaactttttcattcaaatgtctaccgtctttttcactatgcataactttacgatattgatactcttcgacaggttgctcgcctactattaaagcagggtgtcggttttttcgataatatcgaaagtgcggatatggggcagaaatatgcttacttggtttgttttgctctttatgctttatgtttttcttttttgccataaaatctccttagccgagtttaatactgcacgttgcgctctttgtagggtcgaaaacgcttgtgcaggtcaacagcaaataagctgtcacttttatgcctaaacctttgttgtacttgagaagtgtcattgtgcaagtcagaccgtcaatatcaaggcgtatgtagtcatacggattattgtctgacaatgcccaatacacaacgctgtttgtcttgtctttgtcccattcaagagtccactcgacttcctgcaaaaacggcgcagacgcttcgactgttgccgtgacaacttcggttgctccaacgtccgcaaatgctatgtcatacgtcggcgcagacacaaacataggaacaaacattgacaaaagcaggcaaaacagcaaaactataatgccaacattgattgtcattttttcgttataagtcattttttcacctgccttttaatcttagattttgtttttgtctttttgcttgttttagcctttgcggttgcctttttaaccgccttgaatggagcagacacaagccacgccacacccttgacgatatacggcaaaatcggcgcaaggattatcaaaaagagaacgagagcaaggagcataagaacaagtttccaccaatcaagtgtttgtggcggagcagttatgccattgattaagtcaataggatttgacacaaccgggacgaccttgtaaacgccgtctttgttgaatgtcaactctataatgtcaaaatcaaaaaacattgtttcttgtgcgagatacgtgtccgcatctttttccgcaacgcctgtacgtccaaccgcttttgcaaaataatcggtattcgcaaaacggaagagaacgaccgaacagtcattgagttccgcatgagcatacaacgtttgcaaatccgcaacgtcattttcgtttatgagcaaattctttgaaattgtgcttgcaggcaaaacggggtttaagtcttccgctttcaaaatataaatcggcgcaacgtcggcatattcttcgtttgtggacggccaagaaaagccaaaagtccacaacttgtcccaccaactgtgattgctgtcataagatttcaaatcgaaagtgtccgcaagatctatcgtcttatcgttgtagccgatagtgcgaccgtcatcgacatagttttcaaacaagcaagcaggaatttgcctgccgttgtcaatcgtgagcatatctgccgagccgtatgtatctatatagtcataaacccacttttgcacgacggaatctgcgacatttcctgcgataggcttgctatacaaaaatgaaaagagcgtttcaacgttttgcacagcttcactataaaaagcatattggagcatatcgcaaattttataaactgttgttctatcggttgaaccgttcggaaaactctcataagaattggcaatattgtatgcccactcgtatgtatcatatacgtgaaaaacagctccgatgacaccttgagacgttgtttcagcgtgttcaaagccataccacattgcccagtcaggcttttcggttttgccgacgtattccaacaactgttgataaaagtctgcgtttgacgtgacaaacatttctcttgttttatattcccaccattcagcacggattttttgcagtttgccgtagtctctcaaaaagtgattaggcaactcaaaataaaccgtattgacttcattatagtgtcctgcaccgagcgaagaaacaccgtccgtcctgaaataagtatgataaacgtcaagtttgcacgtctccaagtcttcgacgacacacgcaagagtggactcgtcagagccataaccctttgcaaatccagtaaagcaatatgagccaccgacggtgtactcaactgcattttgcttgccatacgtcaagagttcaacgcccgacacgtcatatttacgtgccgacgagtcaactctatctgcgaatgttgtgccgtctatctgcttgtcttcgaccttgaatttatagaaaagatttctatgatctccgtcggacttgtcgcagaaaacaagatgaaatttctcatagcgaatcgctttgccgtcttcgtcatacgcaacagcaatttgaattttgttttgttgcgaagtcgttgagaaatttattttttgcggattgtatacgtagatatacaaaccgtagttttcatgcatattcttcgttgcggaatagcaatattcaacaaaattgatgattttgacacttccgttttcgtcggcaggatattcgttcaaatcgaacgcttgtccgtttattgtagaagactgcaaatcttcaagaacgctcgttttgtcaaaagccactccgtcgtcagcataagcgacatttacgacactctgcaccgtgaaaaacacggtgcaaaatgccataatgcagacagcgaatatcaaaaaaattttatattcttttgtcagtttcatagaataatctccgaatggtcgagtacaataccctttacgccgatgacattttcaacgccgaaagaaacataaacattttgactgtcgtcataggacgttatgacaatcgtaaaaagattttcaaaattgacttcggaatccaattcaacaactgattcagggaatacgccttgaagaactgacaacaaaccttgtccaaggagagaaacagagaacgaattttgttgtttgtcaattttgaaaccttttgtatagtccttttccgccttaaaactatacacgtcaccgtccacggtgaagtcaaaatcttttgcattgctgtttggcacaatcttaacggaatagcccgtttgttcttttgaaaatgccccgaaagtgtatttcacgtcaaccgatagcggattgttgtccgctacgatataaccgcccacagagtccaaaatcattttgttgtcaacaacagcataaaaagatttgaaatcattcttaaagccgtttgtaaaaattgctactgctccaacaagtgcaacaaacacaagcaaaagaacgatatacacaataactgtgatttttttatttttctttttgctcatagttcaccgccttgttaaaacgtgattgacgttgtagaaagagaaacgcttgatactgacaaagaagaataagaaacagttccttttggaacatgctttgtagcactataatttgaatatgtgccagtaaaagaatatgtcacgtcaaaaatattcccagaatatgaattgattcctgccttgcaagcattttgaattgaattaacaaaagctgtataatagcgtgaagatgcgcccatagtaagcggttgattaaaataagcagtaaagaaaccaaactgtttatttgattcattatcaaaaccgatacccgtcatatcaaggaaataaaatttaaaagcgttaccgctttgactatatttcgcattgaaagtgacatttgtaattgggtcgtttacaactgtcaaaccaccttttgtcatgatttcatttttcaaatgacttgtaaacgcagaagacaaagaaacggaaactgttccttgtgctgtttcagcaacagttcctacactccaaacaggagtagcggaaatcgaataaataggttcagcatcgccgaagtcgattgcgttgacaacagtt

SEQ ID NO: 3518 - DNA, 14875 bp, synthetic construct
  source 1..14875: mol_type = other DNA
  variation 1908..1923: note = note, n is a, c, g, or t
  variation 12805..12820: note = note, n is a, c, g, or t
  misc_feature 1..14875: note = Synthetic
  variation 7553..7583: note = note, n is a, c, g, or t
gatcatcgatattgctctcaggtacggatatgagacgccggagagctttacacgtgctttttcacggttccatggtgtaacaccgaccgaagccagaaacggcggtacggtcaaatccttttcaaaactgtctgtaaaactgatattgacaggaggtaaagaaatggattacagaattgagaaaccgggcgcgatcaaagtgatctgcaaaagagaatttgtacaccaacctgaaaccggagccgggacacctgatatcactggattctggacaaaatgcggacaagatggaacaatacagaagatttgcagctatatccccgaaaagccgaggatggccgggctgcttgggatctgtttttcgctcgagacagaaggagatatgttcccgtatggaatcggcgcagagtataatggtgcactggtagaagaaggtcttgaggtaattgaacttccggagtatacctatgcggtatttccgtttaaggggaagatgccggaggtattcatcgagacatataggaagatcgtaagcgagttcttcccgagcagcgacaggtacgagtatgccggaggagttgagatcgaagtctatccttcggacaaaacggatgacccgaactattccggagaaatatggatcgccgtcaacgagaaagaataatatattcgagaggtatcagcagtatgagcaaatatgaaccattgtggaattgggtaaaggaaaacggcacggacagttttaaactgacatttgaagagatagagaagattgccggtataccaattgatcattcttttctgaattacaagaaagagctgcagagttacggttttaaggtggggaagatctcactgaaggaacagacagtgacattcggaaaagagtaatacggtttgaatgttttatacagctatatttgagacaaacaaagctcctcactaccaatcacggcggtggggagctcttattatgcctcaatgtctattgtgatcccggacttgaagttgacggtgaagtgatcctcgaaaactgtgatcttggcgatgtgccttgagaccagcatctcgtcaaactctgtgatgtcggtagcctgcttcttgatgaaatcttgcaggtctttgatccgtttcatctggtcatcgcgcagaaactcgacccgtgccgtgcttgtacgaagcgccgcttatgcttgaaaaatccaacttttcgtcggtcgttttaagagagttgcatatcgacaatattgcggaacccgaccttaacgattggaaacagatggttaaagatatcaaaacggcgaaaaagcacgttactatcggtcttgtcggaaagtacgtgcaacttcacgacgcatacctttccgttgcggaagagttaagacacgcgggatactgtgtacccgtggggaaaaggcgcacacaagcataagagtgagcattattgcctgcaataatgtgatttcaaaagtgaagtgtgcgacgtgggcaagtgatgtgccttacggcgcgatgctttgcaaaaagcaaagcgatgtttctctctttgagagaagataaggaaaaaatataaccgtttacggagtaaacgatataactaaaacagcccgccgtcaaaacggagggctgttttttcttgatttttgtggggattacccctttgtcttttttaaaagtgcagattacagtttcatcgcgacgtcccatgcgcgccagataaccgtacgcaggttgccgatgccgttgcagtcgccgacaagtttcacgccgtcttttgcgacgggggtgggaatgtagccgacagacataatcacgctgtcgcctgcgatttccgactccttgccggttttaaggtctttgaccttgacgcctttgtcggtgatttcgacaagaccggtgttcagacgnnnnnnnnnnnnnnnntgttcagacgtacgtcgactttgttaagcgcgaagaagtcacggagatacgaagtgttcgcaaggcagacgcctctcattgcgacaaggtcgtttttcatttcgacgatgacgggagttttgcctttgttgtaaaggtcaagggcgatttcgcaaccggacaagccgccgccgatgacgatgactttgttgccgacttctttggtgccaagcagatattcgcacgcttcgacgcctttttccgcgccgggaacgcgaagttttcttgccttgctgcccgttgcgacgacgacttcgtccgcgccgagcttcgcgatgtcttcgggtttgacctcggtgttaaattttacttcgatattaaggtctttgatttccttttcgtaccatttgataaggtcgcggtctttttccttaaacgaaggcgccgcggcagcgatgaatacgccgccgagaacgttcgacttttcgtaaatcgtaaccttatgtccgcgcagggttgcgacgcgcgcgacttccataccgccgataccgccgccgataactgcgattttcttgggacgagcggctttgacgattttgtattttttgctttgcatcgtctgcgggttaagggcgcagcgagccataccggcgttgtccgcaagggtttggtcgttgccgacgagttgtccgtcgtcgcctttgtaggaagccatatcgaagcaggcgttgtggcagcagatgcaggggtgaatcgacgcgatatcgtcgttcataagcttggttacccatgcgggatcggtaaggaactgacgagcaacgcccaagccgtcgattttgccttcggcgattgcttccgcgccaacgtcgggttccatacggccggcgcacacgacgggaatgtcaacgaattttttgatgtgagcgacgtcatcgaggttgcagttttgcggcatatagggaccggggtgagcccagtaccaggcgtcgtatgtgccgttgtcgcagttgagcatatcgtagccggcgtcttggagatattttgcggctctttcgctttcttccatatcgcggccgacctcaacgtagtcttcgccgggaagcgcgcctttgccgaatcctttggttttggaaacgacggaatatctcaaagaaacggggaagtcgtcgccgcacgcctttttgatggctttaacgatttcgacggggaagcggtatctgttttcaaacgatccgccgtattcgtccgtcctttggttggtgtatttcatcgtgaattggtcaagaaggtagccttcgtgaacggcgtggatttcaacgccgtcgacgcccgcgtccatgcagagtttcgcggtttttgcgaaagcctcgaccattttgtggatttctttttgagtaagggggcgagagatgcaggattcttgccatctgttgggggttgcgcttgcgcttgcggtaaggtaacttacgtcaagggcgggtttcaagacggttgcaagggctttgttgtgtaacgcctttaccataatgtcgttgattgccagcgacctaccgaagcctgccgtaagttgtacgaacatttttgcgcccgttttatggaactcgtccataaattctttaagcttattaaactttcctttgccttgataaagccatttcccgagaaggatatccctgatgggcgcgatgccgggcaggataagaccgacgttgttctttgcgcgttcaagcaagaagtttgcggcttccttgtcaaagtggttgggctccatccagccgaagattgacgtaccgcccatagaagtcattacaatgcggtttttgatttcgcaattcttgattttccacggcgtaaacaggctttcgtattttgaatccataacatgcctccaaacacataataatttaatagtaacaaaaatatattacaataattagcgtcaaaaatcaaccgctgcgataaatttttaacgagcgcgcaaaaaaaatcgtaatattttccaaaatatctcaatttcacaaaaacatattaaaaccctgcgataagcgtgcgtttttgcaacgaaataaccccgttctgcaaaacggcgcggataaggcgtatttcggcacattgcaaaacaaagcgttaattgtttaaaaacgatatgttaaatgttgatttatgctatatttacaaactgccgcttgtgtattaaagtaaatccgcatttatttttagttgaaatatttcgcgcggtatggtaaaatatcgataaataaagaggtgtctatgagcgaattcgaaatcagcttattatgttcgtccgtgataagttattatcaggtgcagaacgggatatcccccgtcaaaaggctttacgtcagaaacgcgtccgacttcgactgcgaaaatatcgaaatcagcgtgtcgtcaaagcccgattttttgctgcccgtttccgaaattcaggcggtgtttcccgcccgcgccaatctcagattcgacggcatcgcgaaactgtcgcccctttatatggtggcgcaaaacagaaagcacgacggcgaaataacggtgcaggtattgaaggacggcgtcgtcctggaagaatcgacggaaagggtaacggtgcttgcttttgacgagtgcaacgtggataaacccgaaagtatcgcgactttcgtccgccgcacgcccgacgtcaacagacttctgaacctcgcgcacaaaaagattgcggaatggggctttaaggacgttaccggcacgggctatgcgaacgcgtcgaaaaacaaagtgcgaaatctctgcgccgcgacgtatgcggtactttgcgaccatggattccttatgggcaagaaaacgacggcggacagcgtcatcgtggccgatttttcggaaatactttcggacaaggtagcaacgccgatggaacttgcgctgatttttgcgtcggtgatcgaaagcgcgggatacaatcccgtcgtcgcgaaatatgacaacagctggtacgtcgcatgcttccttaccgaagaatgtatggcggaagacgtgttcgacgatatgtcttacgtcgcgaaaaaagcggcggcgggagtcggtgaagcgacgcttatcgacatttcgggcattttcaagggcgaaagttttgaaaagtgcgagaaaaacgccgtgtcgttccttaaaaaatcgccgaccgtcgatttggcggtcgatataaaacgcgcgcgtatcatgggcatactgccgcagtctgtccgcgtgaaaacggagggcggatacgaccttgtcgaaagcgacgattataaacaagccgctccgccgaaaatcaaagaatacggcgaaaatatcggcggcgaaagtctgttcacccgcgaaaaacagtgggaacgccgcttgctggaactcgatcttcgcaattcgcttttgaatttcagggtgtcgaataccgccgtgaaaattctcaccgcgtcaatcgaaacttttgtcgaaaacgtcacgcacgataaaccttatacgctcacggcgcaccccaaagacttgcccgacggcgacgcaaggctgaatccgtctttcgacaaccccgcgccgctgaaaccgctgtcggaataccttttatacgaatacaaaaacaaaagactttcgaccgtgttttcggaaaaagagcaaaacaaaacgttgctcaatctttatcgcaaggaaaaaaccatcgaagaagagtcgggcaccgcaagtttgtacgtggcgtgcggctttttgaagtggagagagtcggaaaacgaaaaattcaaatacgcgccgcttattctttacccggtgtcgattgacaaaaaaggaatatcgctcccggtattttcgataactttcgacgttgacggggcgcagataaacaatactttgctggaatttttgtatcaggaattccgcctcgatatgcgggggctttcggcggtcgaactgtccgacgcgaaaagcatactcgcagtcatcgcgcgcgtcaaaaaagaaatcgccgataagcccggatgggaaattatcgacaacgtttatctgaacgttttgtcgttcacgaattatctcatgtggcacgacgtgcgctataatatcgacaagttcaaggagtcgccgcttatccgttctatgatctcgaactcggtggacgccggactgaaaaacgaaaccccgaccgacaccgccaactcggacgaagcgtacttcgggacggacagaatgttgctgccgataagcgcggacagctcgcaatatcaggcgataaaagcaagtctgaacggctcgttcgtgctgcacggaccgcctggcacgggcaagtcgcaaacgataacgaatatcatcgtcaacaacatcgtgcgcggcaggcgcgtgctgttcgtcgctgaaaaaatggcggcgttgaacgtggtttataaacgacttgtcgactgcggcgcgggtgatttctgtctggaacttcattccgacaaaacgcacaaaaccgatattttatcgaaaataatcaacacgttaaaccttggttctgccgcttccgacatcgactttgaagaaaaagcgaatgaaatcaaggagtgcatcgacaagttgcagggcgaaatcgacgcaatgcacagaaagcgttatctcggtttctcgctgtatgaggcgatgatggcgtatcttgacaattcggacgctcccgattgtttaagaatcgacgggttgttttacgaaaaactgacggcgtcgtcattcaacagataccttgatattctgacggaacttgcaatccgcgcgaaagagtgcggcgatatcgaaaagtcgccgtttcggtacatcggaaaattcgattacaccgacgcctggcgcgaagaagccgaaagcgtgctcgatatttaccagatggaactcagacatctgaaaacttacgcgcgcgaacttcaaaccttaatcaatatgcgtacgatttcgctcaccggcgaaaagttgaaggcgttgtatttcctgtcggacaaactcacgtccgacgaaaaaatcgcaaaatattttgaaaacgcctgcgccgtagagaacgcgaaagggcttgtggagtcgtatctcgaagcggctcgtcgcgacgggcttatcacgaaagaatacgagaataagtacggaaagtatcccgaaaacgtcgcgcccgccgaggtcaaagaagcaatgcaaaaaagcgcgtttttgccaaagtcggtgaaaaaggcgctctcttccgtcgacaaaaacaaccgccgcgaatttctggaattcctgcttattatcgcggaaaccaaagaaaccgtcaaaaaacgccgcgcggaagtcgcatcgcttttcgccacaaccgaaaacgatatggctcttgacgacaaaatcgcgacggtgtccgcgctttacgacgccgcacgcgcactgtacgccgattgcgacttcaatcttttcaacgaaacctgtcgtcggctgacgaaaaataagccgcacgtccttatggaatactatatgcgcgcttacgaaaccgaacaaaaggcgaaaactgcgtttgaaaatctcttttgcatcgtcaaaaaagacccgcgcgaagaaatcaacagcactatcgaccgcatttcgagcatcgaaaagaatatggactatatcccgagttggtgcagataccagagcgtcgtggnnnnnnnnnnnnnnnnnnnnnnnnnnnnnnnagcgtcgtggaacgttgcggacaagaaggcttcgatttcgtgctggaaccgctgtttaacggcgaaatcaccgccgaagacgtgctgagaagtttcaaaaaatgcgtgtatttcaactttgtcaggagcgaactttaccttgacgacgtgctttgtaggttctcggggctgtcgcttgaagaaacgatgcaacgtttccgcgcgctgtccgacgaatacgaaaaactcacaaggtcggagttgtatttaaggctcgtgtcgaaacttccgcgcaccgatacttcgggcgaacataacctggaaagggttttgctgtaccgcgccgaaaaaacgaatatgcagggcacgacgatacgcgcgctgttttcgcaaattcccgaaatacttcgcgcgacctgcccgtgtcttttgatgagcccggtatcggttgcacaatatctcgatatcgaaaaggaaaaattcgaccttgtcgtcttcgatgaggcgtcgcagatgcccacgtgcgaggcggtaggcgcaatcgcgcgcggtaaaaacgtcatcgtcgtcggcgatccgaagcagcttccgcccacgatgttcttccgcaccgattatcgcgacgaacagcacttcgaggtcgaagaccttgaaagcgtccttgacgactgtcttgcaatcggcatgcccgaacgtcatctttcgtggcattaccgcagcaatcacgaaagccttatcgcgttttccaacagcatgttttacgacaataaactgctcactttcccgtctccgaacgagctgaaaggcaaagtaaaacttgcctacgtcgacggcgtttacgaaaggggcggcagcaaatgcaacaaaaaagaaggcgacgcgcttgtgaaagaagtcgtggcaaggcttaaaaatccgcaggaacgaaaccgctcgatcggcatagttacgttcaatacggcgcaacagaattacatcgaagataagctgcaacacgagattcacaaggaaggtctcgacgacgtggcgtacgacgtggacgagcccgttttcgtgaaaaaccttgaaaacgttcagggtgacgagcgcgacctgattttgttcagcgtcggatacggtcccgacgcaacgggcagattatcattgaatttcggtcctataaaccagcagggcggctataaacgacttaacgtagcagttacccgcgcaaggagcgagatgattgttttcagttccgtaacggggaatatgattgaccttaaccgcaccgacagcgttggcgtcaaggcgttgaaagcctttctcgaatacgccgaacgcggtcccgagatgctttcgattgcggcaaaggacgtcagggtggagtcgaagggtatcggcgaaaacgtcgcgaaagacctgaaagaccgcgggctgttgtgcgacgcgaacgtcggcgtgtccgacttcaaaatcgacgtcgccgtcgttgatccccgcgacaaaaacaagtatattctcgcaatcatcgcggacagcgagcactcggcaaaaatcccgtccgcgaaagaccgcatgaccatgcagacgagaatcctgaaaaaactcggctggaacgtctataacctttggacgataaactacttcaacaaccagaaacgcgaaatcaacaaaatcaaggaagtcgtcgcgacgctcaccgaaaagaaggtcgtttccaaaaaaaccgtccgcgacgcgctgcaaaaatacagaaaaatttataaggcggcttatatcaaaccgctggcgcgcgccggggcggaatacgtcctgaatttcgtcaacgaagaagcgattatgaataaaatccgcaccgttatcgaggtcgagtcgccgattgaagaaagctgtcttatcgataaaatcgcagcggcgttttgtgtgccgaaaaccgccaaaaaagccatcgcgcaaatttcaagatacgtttcgtcatacgaggcgcaacggcaggaatattctggcaaagtcttttacgtcgataagcccgtttcgactttccgcccgagcgacgcgcgcgttacccgcgatttgacaaaggttcaccccgacgagatagtcgccgccgcaaaatgcgcgatcgaagcgaccgtctatatcgaaaaggacgaccttaataaggaagttttcaaactgttcaacgtcgcgaaacgcacgaaatccgccgtggaatgggttgacgctgctttgagtgccgccgtccagaccggcgaaataatcgtcacccccgacggcttctgccgcatctgacaatcaatggaactttaagttgacaagctacgatgcgtatgttaaaatataattaacctttataccataccaaaaattaaaggtttctaaaacaagggttaattcccgaaaagctctatcccttgatgattttcatcaagggatatcttttataataaggaggaaatatgtacagactcggtcttgacgtaggtatcaaatcggtaggttggtgcgtgctcgaatgtgacgaaaacggcgaacctattcaaatcaatgctcttaattcgcgcatatttgacgcggcggagcaacctaaaacaggtgcgtcgcttgcggaacccaggcgaaacgcaaggggactgcgccgtcgcatcaggcgaaaatctttcaggctcgaaagaatcagaaaacttttctccgaaaacggaattgtattatttgaagcgcaggatgatttaatttgtttaaaagacgaatataagaatcttgacgttgtcaaacttcgttcggacgctttggacaaaaaattgaccgaggcggaatttgcgcgtgtcttatattcgcttgctcggcatcgcggtttcaaaagcaataaacgagtagttgtaacagatgacgacgatggagaaaaaaaagggaagggaaaagaaaaagacgaaggaaagcttttaagcagtatccgagaaagcgaagaaaaaatgcgagagagcggtatgcgtacccgcggcgaacaactttataaaaggtatttaatggaagggaaacccgtccataataaaggcggcgattattcgatgtgcgtatcgcgggatattctcgtgaaggaaatcgaactgttgtttgaaaagcaaaaggaattcggcaacacttttgcgaccgataaaaacaaagagaaatatcttgatatattcctttcgcaaaggaattttgacgaaggtccggggaaaggaagtcaatacacgggaagtcacgacgtgaaaaagtgcgagatatatcgtgacgaagacgtggcggcaaaagggacatatacgagcgaatgggcaacgatttatcaaaaaatcaataacatttcgataatatgcgggggtgacagaaggcgccttagcaacgaagaaagacaaattgccgtcgaacttgcaaaaaaagcggataaagttacttacaaagcgttcagaaaggcgataaagcttgacgacgattaccgtttcagtgcgcttaattatagcgagaaaaagaaacagggtaagaagaaaaacgaaggggagtcaaaaagcgacgtcgttgagataaacgatgttgtcgattcgttagcctgcgaagataaaggcgagtttattactgcaaaaaacagcaataaaatcataaaggcgttaaacgataaacttaaaagcgatattgaactcattgacgaaatcgccgaaatctgcacgaaatacaaaagcgaaaacctgttccgtagcgccattgccaaaagtaagataatcggcggaagacttgacgaagaaacgattgaaaagctttccaaaatagatatgaagggatatggtcatttgtcgcttcacgtgttaagggaaatcctgccgtatctcgaagaaggcatggtttacagcgatgcaatgcaaaaggcggggcacaatcattccgaacataattttgaaaagcaaaagtatctcgggacaaaagaagtttacgatgcaatcggaggcgtaacgtcgcccgttgtaaagcgcgctctttcgcaaaccgtgaaggtaatcgacgcggttataagacagtacggcagtccctatgcaatcaatatcgaacttgcaagggatatgtccatgacgaaagacgaacgcgataaactgaaaaaagaaaacgacgcgcgcgccgtgaaaaacgaagcgatccgcgaaaacatcgcaaagctaaacgcgatgccaaacgcaaccaacgttttgaaatacaaactgtacgaagagcaggaccataagtgcgcgtattctatggaaacgctggatatcaatcatttgttcgaagacggatattatgaaatcgaccatatcatcccgtacagcaggtcgtttgacgacagtttcaacaacaaggtccttgtattaaaacgagaaaaccaaaacaaacgcaattctacacctgtcgagtattttgaaagaatcggcagagattacgacgaagttcttgcattctggaaggcggtttatcagaaacgcaacagaaaaaaacttgaatttttgcaaaagaaagagattaacgaatcggaatggaaaaaccgcgcgttgaacgatacccgatacgcttcgagaatgcttgcaaatcttataaaagattatttactatttgacgaaaagtcaaaagatcagtacggaagagttgaaacagtcaagggtgctattacgtcgtatcttcgcagattctggggtgtaccgaagattcgtgaggacggcgacaagcaccatgccgtcgacgcggcgattattgcgtgcgtcacgccgaaaacgaaaaacaaaatcgaaagatacaatcagattaaggaaagtcgtaaaatgcgtaacggacaatacgtccttgaagacggtgagatttgcgattccgattattacgacaagaacagtcatttggttttgccttatccttataaagagtttatcaacgaactcgatgcgcgcgttatggacgaaccggtcttaatgcaaaacaaattgcgattgctcggttttaacgagaattatttgatgaaagcaaagccttttgtcgtaagtcgtatgacaagccgcaaggcaaaaggctgcatcaacgaagcaaccgttttcagttcaaaatatgcggataataaatatccgacggtttgtgacggtaataacgtcatcgtaaaaaggactgcgcttgcaaaccttaaacttgataaaaacggggaaataaacggatatttccaacccgaaggcgatgcagcgttatacaacgccttaaagcagaggcttgtcgaattnnnnnnnnnnnnnnnncttaaagcagaggcttgtcgaatttgacggagacgcgaaaaaggcgtttgcaacgccgataagaaaaccgtgcaacagcggacaaggcaatattgtccgtaccgtgaaaacgtatgaaacatataccggcggcggaatgcttctggaaaagaataagggcattgtcaaaaacgacggaatgataagagtcgatttgtattcaaaagacgggaagtatttcggtgtgcctgtttacgttgcggatttgtatcgcggcgaattgccgaaaagagcggcaactaatgggaaaccgcaaaacgaatggcgcgtaatcgacgactcatacactttcgaaatgtcaatttatcaagacgacttactgcgtattgaaaataaaaaaggaatcgagtttaaaaagaacaaagacgttgaaaacagcgcaaaagcagcgtcaaaaacaattacggacgatttcgtgtattttataggatttgatagatcaacggtatcgattaaagtcgaagataccacggggtgttattttgcaagaggcgtgggaatacaaaacatcggtaaaataacgaaatgcgaaatcgacgtgctcggcaacgttcaggaaattaaaaaaagaccgaagcaaccgcaaccgctgaaaatgcttaccgacaaggaaaaagcggaaaaaagaaaaaccaatcaaaacaaataagaggtgtatatggggtacataaatttatttttatctaccccttgcagtatcaggatgaatcacgggcaacttgttgtaaggggtgaagaagagcatagttttcccgttgaagatttgaacagcgttcttatcgagacggcggaatgtacgataacgagttatgcgttgagcacgctttcggacgcaggtgcggttgtgttcacctgcgacggaaaacatttgccaaacggagttattttaccgcttaacagttattatcgaccgttaaagatattaaaattgcaacagaacatgccgaaaccgctgcaaaagcagttatggcaaagcatcgtaaagcgcaaaatcgaaaaccaggcaacctgtgtggaattcacttcaaacgaacctgtggacgatttatattctcttgcaaaatcggtaagcagcgacgatgcgaaaaatcttgaagcggttgccgcaaatttgtatttcaaaaaaatattcggcaaggatttcgtaagacgcgacgactctttcataaacttggcattaaactacgggtattcaatcgtacgcgggctcattgcgcgcactctcacggtgtacggtttcgagccgagtataggagtgcatcacgcaagcgaattgaacaattttaatcttgccgacgatattatcgagccgttccgaccgattgttgacatgattgttttcaattttatcggacaagaaaaactaacgccgcaaataaaaaaacagttgtttgcattgatgaatcaggacgtggaaatcaacgggcagatttacgcattgtcctatgccatcgaacttgtggtgcaaagtctgaaaaattgcttaacgtcggggaagtgcgaattactgctcccgaaaattttaccgatttgcatgcatcgatatgagtaagtttatgagaataatcgtattttttgatttgcccgtttccacaaaaacagaaagatatcttgccacgtcgtttcgaaggtttttgcttaacgacggatactatatgttgcagttttcagtttacgcaagactttgtaacagtgttgaaaatgcggaacagcattttgcaagactggaaaaagaggccccgaaagatggatccgtcaggtgtatgattgttaccgaaaaacaatatgcaagcataaaaataatcacgggaaagaaaaaagtaaaagaatcgtccgtggactttttccaactttcttttttataaaaaaacaagaaaaagacgaaaacggaattataaaattttgtttttcgcgaaaaagtaacaatgaaaaatgcagaaaaaactcctgaaacactgaggttttcaggagtttttctcgttccctattataccataccaaaaattaaaagggaac

SEQ ID NO: 3519 - DNA, 7297 bp, synthetic construct
  misc_feature 1..7297: note = Synthetic
  source 1..7297: mol_type = other DNA
cggcaaagtattcgcgcaactttttaatctgcgcaacgctcgggggagttacgcagtcgatttcgactttgagtttatctttttgagaggttgcctcgtttttgccgaaacctactttttttatttcgtcactcatttggaacccttggaacttttagaacccttggaatctttggaacccttggaatctttggaactttcggcagggcgtttggtctgcttgataaattcgtcgtacaatttcgaatctttatcgggggaagccgagtccgcaagtaacttttgcgttgcggacagcaccatttcgcctatctcggtttgcgccgattcaagtacgtgtactttacgcgcttcggcttcttgttcagccgatttgattatagcgtccgcttttacttttgcgtcgtccatatatcgacttgctgtgtcggctatttcccgttcggcttccgcacggcgcgctttgatttcttcgtccgcgttctttaatttggtttcgtactcggttttgagacgctcgttttcggcttttgtttccgcgttcaagcgttcttcttcggcgaaactttcacgacgtttgcgaagaaagtcggttacgggtctgtacaaaataagcgtaagaccgccgacaagtattacgagattcaatacatgcaagagtatttgcgtaatatctatgttaagtggtggcataacgttacctcttgcggtttacagtacgaatataacgagtatagatacgataagcgcgtatatcgcaagcgtttcgataaatacgagaccgagcatcattgccgaattaacgcgtcccgcaacttcgggttgacgagccatcgcgcccgtggcttttgcaatcgttatcgccattgcgattgcgcctgccgcaccgactgcggcgataagtatcgcagccgcaatggctttggaactctttacgctgtccgattcggtcttctcggcttccgcagaagcggaagccgaagcggtttccgttgcttcgccgtccgcataagcggtaacgctcagcgagaaaatcatactgaacgagagtaccaaaacaagcagtaaaataaactttttcatattcgattaccttcttttttgattttgtttttatatggtctcggctcgaccgcttcgccgtaaaatatcgaaacgagcgttgccaaaacgtaagtctgaataagtgcgtggagcagggtgaacagtacgcctacgagtacaggtactacgaaactcaatgcgtaatagtagtaaacgagttcgtttacgagtagtccgcttaaaagcgcgccgaacagtcggaaactcattgaaatcggaagggaaaagtctttaagaacgccgagcgttttacgcggaccgcgtatgattcccgcaaacagtattattaagtatgacgtaaagccaagcgcgattgccgcgttaatatcagctaacggcgcgggaagtaaaatcgtatttccgcttgtcgtcggaaactgtacgcccaagagttcaaacagcgtaccgaaaaaaacgtatgcgcccacgctgaaaatgtatgcaccgacaaaacgcggtttgtgacttgaatttttgtctgccatatccgagaaaaagccgaccatccactctattaccgattgaaatttatcaggcacgcgcttgaatttcggaattgcgaatacgcgcacgaaaaccgccgccgttaaaagcagagcggttacgatatatgcggaaattattgcggggtttacgagcagtccgaatacggatattttgttaatatcgtgtaaaactccgtcgcgcataacttctttgacgctttcggtatgcgaagtcggcgtccccgaaacgattattccgacaagaaggagcgcgattatcaaaagccatacgataacgaatatcttacgtctgctgatatgtttttcaggttctgtattcaaactattcacctataagcgttacgcggatgtgtccgcgcgtttcaataataatctttattatagcattaaatcaatataattcatagtttttttcgcatattaaaattatgtgccgtattatagaaaatcagccgtatttgttatggataaagtataaaagataaaatattgtaaaataaaaggcgaacaaatcaagttttcacattaaattaaaatttttcggaatatattaaaaaagtatttgacaaagtatgtcagttatattattatatatataactttttagataacttataccataccaaaatctaaaaggttactaaaacaagggagaaatcccgaaaagctctatcccttgatgtcaattcatcaagggatatctttttatcggaggaaaaaatgtacaaattaggacttgacatcggaatcaaatcggtaggatggagtgtgcttgattgttccgaaaacggtgaaccgacaaaaataattgcgctcggctcaagaatattcgatgcggctgaacagcctaagacgggagattctttggcggaaccgagacgtatggcaagaggaaacaggcgtcgtctcagaagaagagcggcaagacttatttatataagaaggctgtttgccgataacggaattgacatttttgataaaaacgacgacacgcaaatcaaagaaaagttaagaaacattgacgttttgagcaagagggtggaagcactcgataaatgtataagcgaagaagagtttgcaagggtactttattcgatagcaaggcacaggggtttcaagagtaacaaaaagaaaggcgcaaggaaagaagaagacggtaaactgcttgaagcgataaatgccaacaatgcggaaatgaaaaagctcaatctgagaacggtgggcgagtatctttataaagaatacggagaaaagggaaaagcggtacacaataaaggcgggcagtataatatgtgtgttgctcgcgacgacttggagcgggaagtagaattgcttttcgcaaaacaaaaggaattcgggaataagtttgcaacggatgacaatcttgaaaagtatttgacttatttcacaaaacagcgcacttttgacgaaggtcccggcgaaggcagtcagtattccggaagtcacgctgtcaggaaatgtacgttttataaagacgaagattgtgcggcgaaaggaacgtattcaaacgaattatccacggcttatcaaaagataaacaacttaaaaatcttagtggacggcgacagattcaatcttaatgaagaacaaaaggcggttattatcaataaagcgcacgagaaagagactttaacgtataaggacgtcagaaagttactcggatatgataaaaacgaacttgtgactttcagtgtgttgaattacagcgtacgtcccaagaagaaaaaggacggtacgattgaagaagtcgacccgtttaagtgtgaagacgcaaagtttatttcacttgcaaacagtaacaagataaggaaagcgttaccgaacgaattgaaagacgacaacgcgcttattgacgaaatagccgagatttgcactaaatatacaaatgaaaaccttttcaaagaagcgatagcaaacagtaaaattatcaataaccgtttaagcaatgaagtaatagataatcttttggaaatcgatatgaagggatacggacatctatctcttaaagcgttgagagaaatattgccgtatttgaaggacggggacgtatacagtgacgcttgcgataaagcaggacacaatcactcgcaattcaataacgagaaaggaaagtatctcggtaaaaatcaagaagtaagagaagcgatagacaaattgacgtcaccggttgtaaagcgcgcattgtcgcagacgataaaagtcgttgatgcgataatacgtgaatacggcagtccgtatgcggtcaatatcgaacttgcgcgagaaatggcaaagtcgcgtaaagaacgtgacgaaattaccaaaaacaacaacgaacgggctgcggataacgaaagaattaaagcgcaattaaaggagatgggcttaacggcaaattccactaacgttttgaaaaagaagttatacgaagagcaagggcaaaaatgtatgtacagcggaaaggatatcgtttttgaaagattaatgaaagacgataagtattgcgagatagaccatattataccgtacagcaggtcgtttgacgacagctttaataacaaagttcttgtttttgcaagtgaaaatcaaaacaagaaaaacgatataccgttcgagtattttgaaaggatagggcgagattggacggaattcgagtcgagagttaagactatatatcaaaaacgtaacgcaaaaaaactcgaattgttactcaaaaagaaattcgacgaagaaggctggaaaaatcgtgcgttaaacgatacgcgttatataacgaaaatgctttccaatctcgtgcgagattatttgatattcgacgaaaaagcgaagaaaaaatgcgtattaaccgttaacggaaaaataacggcgtacttgcgtagattttggggtattcaaaaaataagggaagacggagataaacatcacgcagtcgatgcggctgtcattgcttgtgtttccgacaagataattcaaaaagttaccgattataattacgtcaaagagtctcgtatgatgaacgatgggaaatacgtgcttgaagacggcgagattgcgtcggctgagtggtatgacaaaaagaataattttattttgccgtatccgtattccgtattcagagacgaacttgcggcaaggacgcttgacagcgtaaccgatatgaagaacagattgcgagaaatcggtatgagtgaagaatatatagaatcggcaaaaccttttatcgtcagccgtatgtcgcacagaaaggcgaaaggagttattcatgaggcgaccgtttggagttcaaagtacgttgataataagaacgctaaaatacataacggagaaagcattatagttaagcgtacaccgatagaaaatcttaaacttgacagcaacggagagataaagaattactttaagcccaatggagacatagcgctttataacgtgttgaaaacaagacttattgagtttaacggagacggaaagaaagcgttcgcaacacctatatataagccgtgtaataaagataaaaagccgaacgcaataagaacggttaaaacgtatgagaagtatttcggcggcggtatgaagatagagaagaacagcggaatagtcgctaacggctctatgatacgagtagacttgtattcaaaggacggcaagtattacggtgtacccgtatacgtagccgatctctataaaggagtattgcctaagagtgcagcaaccgctggcaaaccgagaagcgagtggagactcattgatgacacgtatactttcgagatgtcaatttacccgaacgatttattaagaatagaaagtaataaagagataaaaatgacaaaggaatatacggatgaattcagcccgaaagtaaacgaaataacctttatggataatatcgtatattacgttaaattcgggatatcaacggcatcgattacaatagaagatgttgcgggatgttatttagcgccaagcgtaggcatacaaaatctcaagaaaataaccaaatgcgagatagacgtactcggcaacgttgtggaaatcaagaacaagccgaagtcaccgcaaccgcttaaacttataacggagcagaaaagaagggagaaacgcaaacaaaacaaataatatactgagaggttaattatgggatatattaacgtttttctttcgaagccatgtcgaatttttgtaaaaaacaggcaactcgttgtagaaggcgaaacggataattcatttcctatcgaagaccttaattccgttttgattgaatcgggcgagtgtagtgtgacaagcacggcattgcgttcacttgccgacgcgggagtcgtcttattcgtatgcgacgaaaagcatctgcctaacggtgtgatgttaccgtttaatgcgtattatcgtccgttaaaaacgcttgaacttcaattatcaatctccaaacccaaacaaaaacaactgtggcaaagtatagttaaacaaaagataaacaatcaggctacgtgtcttgctttatgctgtaaagagcaagaatcaagatacttgtttgacttagtaaaaagggtaaacagcgacgacgcgaaaaacacggaagcaaccgcagcgaattattattttaagaaattattcggttcggattttgaaaggcgcaacgataactttattaattccgtgcttaattacggctatacgatagtaagagggcttattgcgcgtacacttgcggtgtacggttttgaaacaagtataggactgcaccatgttaatcaactcaacaatttcaatcttgcggacgatattattgagccgtacagacccgttgtagatttaatagcatacagtatgaccgaatacgacgaatttacgcctgaaataaagaagatactttttaatctaatcaatcaggacgttaagattaacggacaaattcatgcattgtcttatgcaacggaactgaccgtccaaagtctcaaagtatgttttgagaaggataattcggaaataatgcttcccgaacttttaccgctcggtacacatagatatgagtaagtttatgagactgatagttttctttgacttgcctgttatgactaagaaagacagatatcttgcaacttctttcagaaactttcttattaacgacggatattatatgttgcaatattcggtatatgcgcgaatttgcaacagcgtcgaaaatgccgaattgcattacgaaaggcttgcaatcgaagcaccgaaagacggatcgattagatgcatgatagttaccgaaaaacaatacgcaagtatgaaaatcataacgggaaaacgtgttgttaaagaaaaatcggtagagtgttttcaaatgagttttttataaaaaataaaaatttaacagtaaaaacgcgataggtgcgataaattttataaaaaataaaattgcaaaaacaaacaaaaagtccttgaagatgaataattttcaaggacttttcgcttcctattataccataccaaaatataaaagggaactaaaactttgagagtgcctctctgtctgcgcagtttattataccataccaaaatataaaagggaactaaaacccagacggctcaaaggttatgtttcctggcaattataccataccaaaatataaaagggaactaaaactacgcgtttttttagacggtttagacaaaaattataccataccaaaatataaaag

SEQ ID NO: 3520 - DNA, 23147 bp, synthetic construct
  misc_feature 1..23147: note = Synthetic
  source 1..23147: mol_type = other DNA
gggcgacggcggcgcgccggggggtggcgggacggccgccacggcggcggaggcgatggcggtggcgcgcctgatgctcggtcccacggggacggccgcggtggctgatgccgtcgacgccgtggtggtcgccggcggcagcctgcgcagcgtcgccgccaccgtgctggccgaaccgctgttccaggaccagttcgcgcccgcctgggcgctcgaccgcaagatcgacgtcatcacgctggaccacatgggcctgagcgccggcggcgccgcccatgccgaggccaacgcctggttcgcctgggcgctgaccgccggcgggatggcgaccgaccaggtgttcgtcgaggccgtcggctacctgctggacgacggccgccgcgatgccgccttcgatgccgccgcggccgccctgacggaggaggccgcgaccgcgctggccggcgtgttcacgctcgacggcgccgacaccgccaccctcgccgccctcgaccacgccctgctgtgaggccggccggacgattcggcccggggagcgcgtcccgacacaccccccgtcacaggtccaccgtgccgtcggggttggtcggcggccattcgggcggcggcggcggcgcgtcgtcgtcgcccaggaacccgtcgaagaagtcccgcagccgcttcgtctcgcgttcgatgaacggcttggcggcttccacgccggcgttggcctcgcaggtggcgcggtccagcgcgcacacgctcttgcagccggcgcgggcgtagtcgtcgtcgccgtatcgggccgcgcagcgcgcctcgcaggcctcgtgcccggcccggcacgccccggccgtctcgtccgcgtcctcgtcctcctgcggcgccgcctgtccgggtgcctcgtcaataccgccggggccgccggggccgccctcgcccgcgccgtcgccgtcgccgtcgccgtcgccgtggaagccctgcatgaagcggtccaccttgtcggccttgtcggccagccagggctccagccgcgccagaccgtcgcgggcctcgcaggccgcccgctcgaccgcgcagcgggcctcgcaggcggcggcggcggcgctgcccggctcggtgctctcgttgcaggccaggccgcactggcgggacagcgcggcgcagtaggccaggccgggggcgtcggcctcgtcctccgccgtcccggcggcgagaccgggcgccgtcgcgccgcccgccagcaggccgccgcacaccagcatcgccaggatgatcgcgcgcatcgcaactcctcctctccggcgggcccgaggcccgcacccgctctccatacccgaacagtgtgccctcattgcggcggcgcgccatacagcagccggcggccgccgcccagcagcgccagcccccccagcagggccgagccgagcaggctgatgccgtggaacaccaggccggtcgccagcgcggtggcctcgtccaggccggccgggatcagcgccagcacccaggccgcctcgaaggtgccggcgttggcgaaggtgttgaccggcagcaccgaggccagcgcggtggcgctgccgccggcgatcccgcccgccagcccgacaggcgtcgcggtggcgttggcgcacagccacgccatggcgaagatcaggccccagatgaccagcgtccaccccagaaggtgacccagacgggccggggtctgggccgccagcgcccccagcagggtggtccagagccgcgccagccgacccgtcgccgcccccggcggccgcagccgccgcaggcgctgggccagccagggggccagcagcagccccaccgccagcagggccagcagcgcggcggcgatggcgccaccctgcggcagcgcggcccgcgccgccggcagcaacgccagggccagcaacccggcccccagcaccacggccaggtcgagcagccgcagcaccagcagcagcgccgaaccggcggccagcggtgtgcccgcggcccggtgcagcagccagaccagcgacagttcaccgaggcgcatcggggcgaacgaggccagcatggaatgcagcgccgccacccgcgccatccgtcccagcggcggcggcgcggctgtggtcgtcgcggccgcgccggccaggtgcggcaccgccaccgccagccggcgcgctcggctgagcatcaccagcggatagagcgcgccggccagcagcaccggccccggctcggtggtcgccagcgccgtccccagcggggccagcgcgccgtccggcagcagccagagggcaaggccggcgcacagaccggcgcccagggcgagttgccaggccagggtgcgcagcaaaccgcgtcggcgcggggcggacgagtcggaggcggcggacgacatgaggacgcaggctctcccgggacgcgagggacggcgcggagcgggcgccgggtccggtgtagacgaccgtcgcgccgctgggaagggccccggcggcacccggcggcaggcgcctgtgggggtgcgatccacatggacgccgggcggccggcgtcctaaagttggcggggtccaggggtcgtttcgcccgaaggttcggcgcggggcgcgcatccggtcccaggatgcggagacgcggtgtgagaccaggaacgcacggaggcgcacaacagctcggcggctcgaccggcggtcgcggaccgcgcgggccgggccggcgggctcgccggtggcgggcgcgcccccgcggcgtcgtccgcgcgctcatgacgctggccgtcgcggccgccatggaggccggccccgccgccgccgcggagaccgccggcccagccccgcgcccgatcgtgatcgacggcgacacggtacagaccgagaccggcctgttcacgctgtcggggatcgacgcaccggaactggggcagcgctgccagcaggccgggcgctggatcgcctgcggtcagaacgcggccttcgcattgcaccgcagcctcgggttgtcgctggtgcccctggtgtgcacacccgccggcgcgccggatccggagaccggcgtggatcgcgccacctgcgccctgggggggcagaaggacatcgcgctggtgctgctgtcccaggggctggcgctggcgctggcggacgcaccgctgcgctaccgcgaggccgaggccggcgcccgcaccggcggtctcggcctgtggcggaccgacttcgtgcggccggcggactggcgccgcggcgcccgcctgcccgacgatcccgtgatcgacccgccgccgtgcccgatcaaggcaacggtcgacgccgacggccggcgggtgttcctggtgccgctcgacgccggctatgccgacctgcccgatggcgccgtcgaggcgcgctattgcagcgacgaggcggcgctggccgacggctggggtcgtccgtccctggacgcggcgagcccgcggccctgacctcaccacgcgtcggccggctcacgccgggtcgcggggggcgtcggccatgcgggcgcgcaggtcctgcaccgccgacagcgcgctcagttcatcgtcgatcaccgccatgctggccttcagccggtcgcgctcggcctgggtcgagcgccggcgcgcctcgcgcatcatgccggccagggcgaacaaccggtgggccacggcctcggcgtcgtccagcgcctccccggtgcccttgatgcggtccacgaggcgggcgatgtcggcggcggtggcggcgtgggtgaccaggatcgggcgcagatcgcggtacttgtccggatggtcctggaggaagcggcgggtctcgttgaggatcaccgagacgtggatcagcgcctccgaaaccggatggctgggccaggtcaccgcgacgcggtcgatcaggcgggcgcgctcccggaacgcggccagctcctcgcgcagcagttcgggatcgtagccgggcacctccagggcggcgtcggcggccgccgggtcgcgggcggcggcccgcgcctttggcccctcggggtcggacgcggggtccggctccgggcgcggcggcgggtccgcggccgcggcatcggcgaagctggcgtcgcccgcggcgcggcgacgccaggcgcggtcccaccacgctccgcgcccgcctgtggcatccgcgcggccggcgtcgacgcccgggtcggggcccggatcggtgcccggatcggtgccagaggcgaagggggcgccgtcgcgcacgaaccacagccacgcccgccccagcagcagcagcgtccccgccatcaggtccatcaggaacgggtcctgggccacggcccgccccccgccgaagcccccgccaaagcccccgccaaagcccgggccgaagccgggaccgaggttcggcatcaccgcccacaacagcgccatgatcgccgccatgacaccgtagccggcggccccgcgccagcggtcgggacgcggcaccggcaccatccagcgcggccgcagcagcgccagcagggcggccaggccgagcgcgccggcccaggcgccgaacagccccagcggcgccgccaccaagaccccgatggcgatcaggctggcgccgcgcacggccagggccaggcggcgctcgtcgtcgccgggcgcgggggtgccacggcccaggccaaccagggcgcggaacagggccgggccgccggccagggcggtgagggcggcgaagaacgcgatcatcggtctgtcatgtgacgtgtcggggggcagactaatagggttgggcggcgaagggaaccggcgagaccgggcggccagacccggcccccgaccgtcgccggcccctcatctggtcacgctggcatcgcagagcgatgccagagtcgcgccgcccggccgacggagaagtccgtccgtccgtccggcggccggtatcatgggtcggggggcgcggatctcggtccgcgaggatctggaggcgcgccaggcgccggcgcccaccgccggtgaacagccgccccccatatccctttgacccaacgcaaaaacccggccggagccgggtttggagagcgcgttttctagcaaaactggcggagcggtccgagcccggcggggccgcggcgaccgctttcctgcgcgcccgggtcgaggggcggacggtcacctgctatctcaccggtgcgcggtcgttcgcgcgcttacagccgattgcgacaaaccggaatcgcggcacgacttcggtttgtcgcgataatcggctgtaaaatcaataatatagagccgattcacgttcgaaatcggaccgcatctgcggttccgatttcgaacaatcggctctagtcggcgtctgccacctcgggggcgaggacatcgccgccccccctgatccgcgccggcctggccgccgcctgcggcgccagagcgggaggttggtaagagaccctggagcccccgggtctcgatctcggtccgctgccgtcgtactgccggacgtagggccgcgtctcggtgtcttcgccacgccggcggccgtcggcgcgccgcgttgcggaccgacccggtcgccgccgtcttccggcacacgcgggggcgggcgcggtcggtcgcgcgggtcggcacgcggccgaccgctcagaggtcgaggtactgcagttccgcggcgatccggtcgtcatagggatggcgctcccggatccggcgcgcgatcgcgaaccaagtgtcgcgagcacctagtctttcgcgaataaagagtacggcgcagcacgcgatccgaaacgcgatctccggctcgtcaatccaccgctcgatgatccgggccacgcggtgttccgtcgtcgtgagcgcggcgcgggcctcggccatccagtcctgcacggcttcgaggcatgcaccgcccgtgaccgtgatgagcatgttgagagcgccgccggcgaccgcaccggcaaccgtgctatccttgggccagcgcgccaggagcgcggcctgctgttgctccgccgcgacaacaaggctccacaatcgttcggcctccgccagcttggtcgcgtccaaggcccctttgccgcagtagtgaatcaggtttgtcgcgcaattggcgacagcctcggcgaccgccacgttgtcgggccagcgtgccaggagcgcgtcttgcctgtcgtgggccgcgacgacccagccccagaaccgatcggcctcctgcggcatggtcgtggccaaggccccttctccgaagcggttaatcaggttgttcgcgccctgggcgacctccacggcgaccgccgcgtcgtccggccagcgcgccaggagcgcgtcttgcctgtcgtgggccgcgacgacccagccccagaaccgctcggcctctgtcggcgtggtggcggcaacagtcccttggccgcagacggcaatcaggttggtcgcgccctgggcgacctccacggcgaccgctgcgtcgtccggccagcgggccaggagcccggtctgcctgtcgtatgccacaaagacccagccccagaaccgctcggccttctccggttcggcggaggcccgtgccccctcgccgcacgctgtgatcagcatcgtcgcgctacgagcgaccgcatgcgcgaccgtggcgtcatccggccagcgcgccaggagcaccgcctgtcggtcttgcgctgcgccaacgcgatcccatagtcggtcggcctccgcaggcgtggtcgcggccacggacccagggccgcagcggcaaatcaggttggtcgcgccccgggcgaccaacaccgcgagggcggcatcgtcgggccaacgcgccaggagcgccgcctgccagtcgtccgcctcacggacacggtcccacaaccgcttggcctgggcgggcgtcgtcgcggccagggccccgtcgccgtacgctgtgatgaggttgaatgcgccccgcgcgacctcgcgagcgaccgcggcgtcgtcgggccacccggcgtcgatctccgccaggcggcggcgggccgccgccagcgcggcccacaggcgttcggcgcgccccgggtcgggttcggacagcgcgccgtcaccgtacgcccagatcgcgttggtgtaatggccggcggccgcccgcgcgtcctcggcccgggccgacggccggcgcagcgcgcggctcaggcggtcgccgagggcggtctccagcgccgccggatcgatgtccgcgcgcgcgggcgcgtgctccgcgacatggcgcaaggcgcacagaagggcctggatccgtccgtgttccgccgccgggtcgtccggccggccggccagcgcgagcatgacctccgtgtgcaccgccagcatgtcccacagccggcccgccgccccgtgggcgtgctgttccgcggacagggtctcgatgtcgaccggcgcaagcgcatcatggccggtcgcccgcgcgtggacccgcgccaggtccagcatcgcccgggcgcgcgccatcgcggcgtcgtccccgggcgcgtcctccactggcgccgcggccaggtcgagcgccgcctcggcgtccggaccgtcgagccacagccgggcgaaccgatgcgccgccaccgccggggcggccgtgaaggcggcggcggcgctgtcccgggcggcctcggggtactcgatcaggcattggagcagcaccgcctgcgccaccgtctcggggcgcagcaccgggatctcccggcgcaggcggcgggcctcatgggtcgggaacagcgtctccagcagggtccgcgacgcatcgccgagggccgcgcgcacggccgtccgctcgaccggtcccgccagggcggccagcaccagcacccgcgcccgcaccggatcgtccggcgtcaccagggcctcggcgcgcgcccggaacaccgccgccgcgtcgcggtccgtcccggccagcgcaccggcgaccaccgacaggggccggcccccgctgcggtcgagcagggtgtgcagatcggcctcggccaggggggtcccctggacacgcgcggccagggccgcgaccgcctgtgtgcccaggtccgccaccggcagcgacgggtcggtcccgcccccgtgacaggccgccaggaccgccgtccagtgcggccgcaggtccgggctcagatccccaggaccaccgacctgcggacgcggccgcgtccgttcgacgaacaggacccgcacccggaccttgcgggtgctcgggttcgccgccagccgggccagcctcgcccagcgggccgggtgttcgccggcgtcgtccaggacgatcgcggtgtggcggcggaagcgccagcgcgccagcacgtccggatcgcgcaaggcctccgggcgcaggacgccggcatcccagcgccggccgcgctccagggtggcaagccggcgcagccattccagggcgaggcgcgacttgccgcagcccggcgggccgtgcagcgcccaccacgcaaggccggtgacatccccgcccgcgaaccgcatcagcggcgacaggtcgcggccgacgaacaggtcgggccgggcgtaggggctgaacacgtccgccctgtcccggaacagcgtccggtccaggaacggcggcgggtccggcagcagccggtcggtcgccgcgcgcaccggggcgaggccggcgcccgacacccccgcgaagagtccgacgccgcccaggaccgccgcccgccagtcggtggtgagggcctccaccaggggcggcgccagcaccactccgagccacttggtgagatcgagcgcgtcgatgagccggtcgatcatcgcctgcaacggggcgaggctggccaccacgactcccgcggcggccagccccagcccgggcagggcgcgtttgatgagggcgcggtgggagtctcgcatcggccgggtcgcacatcgctggcggtgggggcggagcaccgcccgcaatgacagcacagaaccgcccgcgccaccaccgccatcccgcccttgtgtggcgcgcctcacccctcgtacagcacgaacggcgcccagacggccgggtcgcgcgcggccgggttggcgctgccgatgtcgtgcacccgcttcgtccgctgcagcgcggcggccggcgacagggtcgggtcggccagccatgtctcgtagaaccgggccatgaacgttgccgtggccgcgtccccgatcggccacagggcgaccagcacggccttggccccggcgacgtagaacgcccgcggcagcccctccagcccctcggagtcgtcgaacaccccctggccggtgttgcaggcggacaggccggtcagcggcaccgcatcgccgtcggtcgccggggcggccgcggccggctcggtgtcgggtggcggaccgaagtccacgccgcccagcgcgaccagcccggtgccggtcgcggggcgctcccgggcgaccaggtcgcgcccggtctgcagcaggcggacgccggcaaaccgctccagcaggcggcggtcgcggtcgtcggtgagggcgccgaaggggacggcatgcagcgggccgtccggggcgatgaacagcgtgtccacggccgcgaggtggtccagaagcggcgcgatcaagccccgataccccgcgcgcagccgggattcgaccgcggccgcgccgggcgcgacggcggcgttggacagcgcccgccgcatctacgcccaggccctccgggtgacatcgggcttcgggtctccatgccccctcgcccagggtctcggcgcctcgtatgcggttcctgttcgtcgggccaggactttgcctccagcttccttcagaccccgcctcgcggggacgcccttgctgttcggctagcggttcccgtcaccagggcccgcaggggacttccacccccaaatcacccggaccgccaccacagcggtccaggcagcgccagtcacggcgctccgcgccctgcctggcgcacacacaagaaggggcctcccgtaggagacccccattttgtgccatttaggcttgttaacggatggaccccggttccctgtcggctaaaacggcaacgcaacccatccgaacgaaaaggtagcgtacgcgcgtcggcaatgcaatcatttatgttgcacttcttgccggaggtcacatgggtaaacgcttcgccttcgacatcgggacaaacagtctgggatgggcggtgctcgcgctagatgaccgtcagcagcccagcgacctgatcgacctcggcgtccgcgtgttcgacgatgggcgcgagccgcagaagaagacgtccctcaacgagggccgcaggctggcccggggcgcccgccgccggcgggaccggctgctccggcgcaaggccgatttcatggccgccttgatcgactccagcctcatgccggccgacgagacggcgcgcaaggccttggagtctttggacccttacgcgctgcggcggaaaggcctggaccaggccctgacggctcacgaactgggacgagccctgtttcacctgtcgcaacgtcggggcttccggtccaaccgcaaagccaaccctggcgaggacgaggaccagggcaggatccgcacggccatcgatgcaacccggcaagccatggaggcggagggcgcacgcacactcggtgaactgctcgactggcggcacgagagacgcgagtgggtgcgcgcccgcctccgcggcgagggggcgcgcgcagggtacgtgttctatgcgtcccgcgatctggtggctgaggagttcgatgccctctggcaggcacagggcgaccaactgaacctggacgagacgactcggctcaccctgcgcgatatcctgttgcggcagcgtgacctgcggcccccgatcgtggggttctgtaccctggagcatggagacccacgcgccccgtgggccctgccgctgacccagcggttccggattctgaaagaactggccaccctggaggtcggcgtacccgggcagccccgccgccgcctgacggtcgacgagcgcgaccggctgctggagcggctccggcgctcgaagacggtgacgttcgacagcatgcgaaggacgctgggcctcgatgccgaccaccgcttcaatctggaaagcgagaagcggaccggcctgtccggcgacgagacggcggcccggctggcgcacaagaccgccttcggcaaagcgtggcattcactgtcgctgaccgatcagacggccgtggtcgagcgcctgctcgcggaggcggacgaaccgacgctcgtcgcatggctgatagcgcaccacggcctcgaccaagcggccgcggtcagggtcgcgcgcaccgccttgccggctggacacagccggttcggccgcatcgtgctgtcggacctcgtgccggtgatgcaggccgaggccgaggccatcgtggacgcggaggggcatggctgcgccgctccgctgcacgagagcaccgcactggcgcgcctcggccgacaccattccgatctgagcgaccactccgcccgcccattcctgccctactacggcgaggttctgtcccggcatcttgccggcagcggcgacgcccgcgcccgcaaggaggatcgctggggccgtgtccccaatccgacggtccacatcggcctgaaccagctccgcacggtggttaacgccctgatcaaggcctacgggcggcccgaccagatcatcgtggagctggcgcgggagttgaagcagtccagacgggaccgcgacctggagacccggcgccagggggagaaccaggcgcggaatgaccggcaccgcagggaactggcggaactgggcctggaggacacgggcgagaaccgcctccggctgcgtctctgggaggaactgtcgcgcgaccccacccggcgctgctgcgtgtactcgggtcggccgatctcgcgggccctgctgttctcgcccgaggtggaggtcgagcacatcctgccgttccgtcgcaccctcgacaacggcgccgccaacaagacggtcagcctgcgcgaatggaaccgcctcaagggcaaccggtccccttgggaagccttccacggtcacccggactggtccgccatcctggcccgcgcccaggacctgccgggcaacaagcgctggcggttcgagcccgacgccatggaccgcttcgagggcgagcaggatttcctggcgcgccagctcaccgacacacaatacctcgcccgtcggacggcggaatacctgggctgcctgtatgcgaaagacgaaggggtccgggtctgggtgacgccaggacgattgaccgccatgctgcgcggaaaatggggactggacggcctgctttcggatcacaatcggaagacccgcaccgaccaccgccaccacgcgatcgacgcctttgtcgtcggctgtaccgaccgcggtcttctgaaccgcgtggcgcgcgcggccgacgaaacccgcccccgtctgatcgaggacatgcccgcaccctggccggcgttccgcgagtcccttcaggcccggttgtccaccgtcgtcgcctcgcacaagccggaccatggcacgcaggggcgcctgcacgaggacaccgcctatggacacgtgcgcgatccggcctcggaaggaggctgcaatctggtcttccgcaaaccggtcgccagcctgacgacgtccgaggtgggccggatccgggaccgcgccatccgcgcgaaggtgctggcctggctggaggaggccaaggccctgggcctctcgcacatgcaggcgatggcccgcttcccagaggagagtgtcacgcggtacggcgaggcgaaccctgtccggcgggtccggctgctgaaaaccgaagccgccgtgcattcgatcttggacaagtccggccacccatacaaggcgctgatcccggacaagaaccacaggatcgagatctatgaacgggctggccggtggcatggcgaaggggtcaccgtccttgcggccaaccaggccgagcctgccccgtggcggtcgcgccacccggacgcgcgcccggtcatggtgctgcacaagggcgatctgctcgagaccgaggtggagggcaggcgtgcgatcgttcgtgtggtgcggctggaggtctcggcgcgacgggttcgggtcgtcgggcacacggaagcgggggacttcggcgcccgggaccgggacccggaggacgacttcggctggcgcggctggcgcctgctgacgttcgcgcgcatgcagcagacggccacccgccgggtgcgtgtcgatccgatcggccggattcggcccgtccccccgcccctctgagccgcgccggggaccgcaggatggtcggccggattgtcgagatcgccgaggacgggcggcacctgagtctgcggcgcggcttcctcgtcgtcggcaccggacacgaggagatcggtcgggtcgccctcgacagcatcggggcggtgatcgtcaacgcccacgggacgacctggtcgaatgccctgatgatcgcgttgacgcgacggggtgttcccgtggtcctgtgcggaccgcaacatcggcccgaggcggtcctgtggccggtcgacggccaccacgttcaggcgcatcgcatgcggtgccaggccgaggcccgcctgccgctgcgcaaacgcctgtggcagcagctggtgcaagccaagatccggatgcaggggagcgttgtgggggccctcggcggaccggaggccgcctttgctcggctggcacgcaccgtgcggtccggtgatccggacaacgtggaagcccaggccgcgcggcgctactggcccttggtgatggggccggatttccgacgcgatcccgaggcccccggcgccaacgcgctcctcaactacggctacaccgttcttcgggccgcgaccgcccgctcggtcatgggcgccggtctccatcccaccctgggtctgcatcaccacaatcgcggcaatcccatgtgcctcgtggacgacgtcatggaaccgttccggccgttcgtggacctgacggtcaggacgctggtgcgggacggtctcgaggacctgacaccgccggtgaaacaggccctggtggcggtcaccaccctggatcttccggggccgaaggggacgagccccctggcgacggccctggacgccctgacccattccctggcaaccagcttcgaggctggctcggcggccctagacctaccgaccacgccgacggcgctcgaccttgtcggatgcgagcgggcgcaatgacccacctgtcgggatatcgcatgacatggatgatgatcctgttcgacctgccggttggcacgaaggcagaacgcaaacgcgcgaccacctttcggacctacctgctcgatgcggggttcgagatggtgcagttctcggtctacgcccggttctgcgcgactcgggagctggcggaagcgcagacccgggagatcgagcgcaacctgcccaaggcgggaaaggtctcgattctctacttcaccgacaagcaatacgaaacctgccgaacgtacaccggggtctcgcgccaaccccaggccggaaaaccggcccagctcgtgctgttctgaggggccgcgatcttgcatctgggggtgtccggcacaaaaaaacgccctgaacacagggcgctagggggacatgcagtttagccgacagggaaccggggtccagccgcaacccgctgaacgagcggccgttcctgaaccacagtttagccgacagggaaccggggtccagccgcaaccgccacggtctggcgggccctgcacgactaagtttagccgacagggaaccggggtccagccgcaaccctattatgaggactgcgacaatcctacctagtttagccgacagggaaccggggtccagccgcaaccattgttattacatacatgctctctctcccagtttagccgacagggaaccggggtccagccgcaaccagtcggccatcgatccgctgtcgcagacaagtttagccgacagggaaccggggtccagccgcaactgcgatgagttccttgacgtgggtcagcatagtttagccgacagggaaccggggtccagccgcaaccacggcgcgctgctgctgaccctggccgtgagtttagccgacagggaaccggggtcctgaggtgatcccgattgtttggacaggttcggtgggttcgtaagctctgaggggctccttggcgggttggtgggtgacggttcaggcggccaggcccgccgtctgcagggcggagcggcagcggagcccggaggacggcgggcctggccaatacacttcgtcgggcgttcgatatgccagcccctggtgtggacgccgggtgttgtaggtcttgatccacgcgccgattccggcccgggcctcggatccggtggcgtaggccttcaggtagacgtcctcgtacttcaggctgcgccacaggcgttcgacgaacacattgtccatgcagcgccccttgccgtccatgctgatgcgcacgccggcatcctggagaacgccggtgaagtccaggctggtgaactgactgccctggtcggtgttgaagatctcgggctttccgtaaatctccagtgcctctttcaaggcctcgacacagaagtcggcgtccatggtattggatagcttccaggacagaacctttcggctgtgccagtccatgatcgcgaccatgtacaggaaccctttcggcatcgggatatacgttatgtctgccgcccagacttggttcggccggtcgatggtcaggccgcgcagcaggtacgggtagacccggtgctccgggtgcggctcggtggtgcgcgggcggcggtagatcgcctccaggcccatcagccgcatcagccgggccacccgcttgcggcccaccgaccagccctggcgccgcaggacctccgccatgcggcggctgcccaggtagggcatctccagaaactggcggtcgatgtcggccatcaggtccaggtcttcctggtatttcgggctgttgtcgttgaccggcctgtagtacagggacgaccggctgatgccgaccaattggcactggcgggttcggctcaagtccttgtgggagggatcgatcatggctctgcgctcctcccgggtcagcgcttgagcctgacggccaaaaaatcgttctcgaccttcaggcgcccgatctgtttgtagagatcatccaccaggcgctcgttctctttcccgtcctggccgccacccttctcgaacgccgccgacgcctgatcggtcagcgtccgtttccactggttgatcagcgtctgatgaatttcatacttcgcgctcaattcggcgacggtcttctcaccccgcagggcctccagggccaccttggccttgaaggcagcgctgtggttgcggcgggtctgcttcggcatcgtgcgctctcctgtgtctccagggagctcacctcagagccaacccacctgtccagattcttgggaccacctcagtattcctgccgattttcgaggctgccgcacgcgaggagctgcttttacgtgcaggtccggcagccgcaccactctgcattgcagtgttggacattgctgtggggcgggacgacttcgctgacacttggcccaccgggaacgcggtcgcggagatcgacgtcatggccgtgcgcgcagacgcgcgtggccgcggtatcggcaaggcgcttctggcggcggcgggacggcttctggaagcacgcggcgtcagcgattgctgcgttggggcgattgccggaaatgcaggggccattcgcctttatgccagtgccggcttccgcccggcctgggccgagatggtgaggtggacgcccggctccaaacccaagtcaagcgggatggcgcaagcgaaaacccagtaactccgatgcgcggaatcggatccctattcggcttatgatggcgagcccgatttgcgcgggcattaccggcgctccggagcccactggagttgtgatcgtgatgacccatgctccgccggatctgttgcagcgacgcggctcggttccaagcgaattcaacgcctctcgcggagcgcctgccagcggcctggcgtcatgccgaaggcccgcaggaagtgccgcgtcatgtggctctggtcgctgaacccggcggcgagcgccgcatcggccaggctttcgcccgcaaggatccggcgcgcgatcgcaaagcggctgagaccgtatgcggccttgagggccgacatcgagagggcggagcggggcgcgtcgtcgagctcggccttgacgccacgcagggtctcgtcggcgatgggtgtcctgcgccgcggccggccggcaaggcgctccagagcaccggccagatcggcgagcgcgctgacgagggccatgtccgatggtgcatcggcccgcgccttgatcagggcgccgatcgcgtcgatcagcccggcatcggtcaggacggggctggcgaaaggcagcgggctcaacccgttggcttccgcgataagccgggacgcgatgtggatcgcgcggtagccatagccatcctccgttccgggccgtccgtcatgccgctcgtcgggatggaggatgaaggcctggccggcgagggcgtggcgctactcgccccggtagcggaagcgttgcacgccgtgcgatgtcgtcccgatgacatagttgtcatggccgtggggcctgtagccggttcttagccccgccgtctcgacgatctccagcccggccgcgatggggcgggaccggatcaggccgtcgtcgggacgggtcatggcgcacgatcgttcaagacagggcgacgcaatgcggcgatcgtggcccgatgatggaggatttgccgcatcttgcaaacgcgctcgccctgctctggctcgccgcgttcgcggcgatgctgctggcctcggtcgggctggcgctggtcgccgcttgagaatgtccacgcaacgaaccgccgactgtctcgcccggccgtcatcgggtcggcccgttcggcaaaggcggaaggcggcgcttcaccggcgaggactggatgaccgaagtgttggtcatcgcgtgcgggatgatccggtcgatgatccgctccatctcggcgacggaggcaagatgcgcgcgggccagaaagcaatcctcgcccgtcacccggtcgcactcggtgatttccgggatgccccggatgatctcgacgactttctccaactggccgggtacggggcggatgcgcagccagaccgagatcggcaggccgatggcgcccggtgcgatctcggcggtgtagccgccgatcacgccggcctcttccagccgccggacccgctcggcgacgctcggcgcggaaagccccaccgcgcgcgccaggtcggcggtggtggtgcgggcgttttcgacaagcagggtcaggatcttctggtcgatcgcgtcgagtggaccgttttgatatctaaggcgcttcatggtttttgcctttgattaattcgattcaagctcatcatagcatcgttcgatactgtgaaaaggtacggtcgcccttcatactcgatggaatgaaaggctcgcgagcggtatccgcgctgtcaatgtcccccgggctcgaccgcgccgccaatgcggtgccgccgcacgcatggttcggcgtcagcgcggtctcgcgctatctcggtcctgctttcgccgtgcttctgttccccgtcgtcggcgtgctcggcatcgcctggttccggatcgcgaccgcggcgcttgtcctcgcgcctctgacccggccatggcggaccctgcgcgacgcggacggacgcacgcggctcctgctgctcggtctcggcgtctgcctcgccgctatgaacaccgccttctatcttgcgctcgaccggctgcccatgagcctcgttgcggcgatcgagttcctcggaacgctcatcgtcgcgctttacggcctcagaaccgggcggaaccttctggcgctcgcacttgccgcgctcggcatcgtcctgctgatcgacgtcgcatgggcggccgacccgctcggcctgttctgggcggcgctgaacgccgcccttttcaccggctatatcgtcctcgggcacagagcggccgaaacgggcgcgggcggcggcatcgagcggctcggcgcggccatggcgatcgccttcgtccttctgatgccgatcggttttctggaagctgcccgcgccttcggcatgccgttgatcgtcctggccgggatcggcgtcacctcgtccgtcatcccctatgtttgcgaccagctcgccatggcgcggctgccgcgcgcctccttcgccctgcttctggcgctctttctcggcgaggagatcacgacgaccgcgctcgcctcagccgtcatcgtcttcgcggcgatgatggtgtgcctgaaggctcgggtccggagagggccatgagcgggcgagagacaacggcagcggccgggcgcgaccggagcacgagggccctgtcatgaagctcacctttgtcggatccggagatgccttcggcagcggcggccgcttccagacctgtttccatgtcgagacggcggcaggcagctttctcatcgattgcggcgcatcgtcgatgatcgcgctcaagcgcgccggcatcgaccgcaacgcgatcgggacgatcttcatcacccatttccacggcgatcatttcggcggcattccctatttcatcctggatgcgcagttcttttcgaagcggagggagccgctgacgatcgtcgggccgccgggcctcaaggcctgggtcgagcgggtcatggagacgacctttcccggctcgttcggggcgcggcgcgcgttcgggatcgacctgatcgagatcgcacccggacaagagacggcattcggcggcatcgtcgcgcgggccgagctcgtccgccacggccggccggaggggccgttcctggcctaccggttcgcggtgggcgaccgcgtgctcgcctatacgggcgataccgagtggacggaggccctcatcgaaatcggccgggaggccgaccttctgatcgccgaggcctataccttcgacaagaaggtgccgctgcatctcgatctcaggacgctggaggacaacctgccgcgaatcgcgccgaagtgcttgatcctgacgcatatgagcgaggacatgctcgcccgtctggccgatctgccatatgagacagccgaggatgggaagacgatcgtcctgtgatcgtgtggacggtcggttgccctgagcatgcaaggagcgtgcatggcggaaacgaagacgcgaggcgcctggctctatcggcgatgggccgggctcgaactcggccggcccgatggcggggcacggggcatcggccgcgcgcatttccatgacgaggtgcagatcgccgtcgtcacgcgcggctgccggtcgttcgaggtcgcgggggcgcccgtcgacgtgccggccggcgcgatgctggtcgtgccggcccgcgtcgcccatcgcgatcgcggcggccgtgccggagagacgggggactgggcgggcttcaacctctatcttccgacgggcgccatcggcgcggaacccgaggatgtcctcgtcgcccccctcccggacgggctgatcgggtgcgccggcgggcccggtcgcgccatcgatgcttcgggcctcctcgcgcacgccatggcaaacggtcgcataggcctgcgccagccggcgtgcggcgcgccggattccgggacggaggccgcgcgctcggccgcctggcatatccgccggaccaagcgcgccacggggatcacgccctatgcggccgaggtcacggcgcgggcgaaccgcgcccgccggatgctgtgcgcgggccatgcgccggccgatgttgccgccgccctcggctttgccgatcaggcccacctgacgcgccagttccgcctctgcttcggcacgacgcccgccgcctatcggcgcgccatggtcgcctgagactccgaccgcaccccgtaccccgtcactttcgttcaagacagccgctcttcgttcggcccatcgatcggtcccgaaaggaggccgtgcgtggacctgtcgatcgttctcatgctttttgctgcgggcctgctcgggggtggcgccaacgccattgccgggggcgggacgttcttcaccttcccggcgctgatcgcctcggggctcgatccgctcgtcgccaatgcgtcgaacgcggtggcgatctatcccggccatgccgccgccgtgcccgcctatcgcgcggaactgcgcgcaagcggccgggcgctgatcgggcgctgtctcgtggtgggcgtcggtggcctcgctggggcgctgctcctgctcggcaccgggcgcgcgctgtttgaggggctggtgccgtggcttctcttgttcgcgaccgtgctcttcgcctgtgccggccggctccagagccttgcccgggaccttcacgaccggcccgcgcgggggcttctcgtcgagttcgtcttcgcggtctatggcggctatttcggcgccgggctcgggatcctgctgatggcggcgctgacgattgtcggcgtgcgcgacatgcagatggccaacgcccagaagaacctgctcgccaccctcgtcacgacgctttccgtcgtcaccttttccgccgccgggatcgttgcctggccgcagaccctcgccgtgcttgcgggggcccttgcgggcggctatttcggcgcccgcgcggcccgccacattccggcgcacgcgctcaaaacggtggtggtgctgaccggcctcgggctcagcgtgttctatttcgcggcctgagcggctgtgcggcgcgtggtccgcgtcagcagcaccatggcgccgaccagcagggccgcgccgatcaggccgagggcgccgagccgctcgtcgaacatgagccaggccagaagcgtcgccgtcagcggctcggtcagcgcggcgatactggcgaccgtcgcgccggtccgcttcatgccggcaaagaagacgacataggcaaagcccgtcggcaccagcccgatatagagcagcagccacagcccctccgccgggaccgatgcgggcagatggatcagggcaacgggcagcaacatcagcgcgccggcgccgaggccgatgccgatcagcgtgaacgggtgatggcgcggcgccagcacgcggctgaacagggtgaagaccgcgaaactgacggccgagccgagcgcccagccggtgccggcaaggacggccgcctgcgtaaccccgacatcggacggcacgccgaccagcatcgcggtgccggcgatgccgatcgcgagcgcgccgatcaccggcgcggtcagccgctcgcccagaaaaaggccggcaagcagcgccaccatcagcggcgcggtgcagatcgtcacgagggttgcgatggcgaccccggtggtcgccacggcggtgaagtagaacagctgatagagcgccatcgagacgccgatcatgacgatcgcgcccagttcccggccggcgaaggcgaaggtgcgccggccgacggtggcaagcgacaggatcaggagcagcggcgaggcgagcgccagccgcacgaagccgacgaagaccggcgagatctcggtggtgccgtagagcagcttcgaggcgacgccgaccgtgccccacagcgcggccgccaccgcgaccaacagcacggcgccgagagcagggacggacgggacgtgctcggtgcggctgggtgaactcatcgacagtgcgagcgccatgcaccgctgatcctcgccgaggacctgctcgctgccgcgcaaggtggcagagacttggcgcctgcgccgacaccgcgcgaagcgtgaagaggcagggccgttacgccgccgttgagagcagataatgatgacggcgagaattcggtcttcttattttccatagctggcagcatgaagacaaaccggcgtttcttaaagaggcaagccgacacgctggatatcacaagccttcctatcgaaggataaacccatgaattgccttattattgcaacccgtattccgtgcggtgcatgtcgcgcgctgcaagggcttgcggtcgtggacaagcggcaaggattgggctgtggcggtgtgtcatgcctgggctattgcggctgaatccccttcatggggagcgtgggcaaggcacgttccgacgagcgcggttcgtcaggtaaagcccgaccaggatcgcgccggcgccgatcgcaaagcccggcgtcagcctctcgccgaggatcgcccaggcgctgagaacgccgaacagcggcgccaggaagctcatcgccgagacctgcgaggccggatgaagctggatcagcc

SEQ ID NO: 3521 - DNA, 23066 bp, synthetic construct
  source 1..23066: mol_type = other DNA
  misc_feature 1..23066: note = Synthetic
caattgcgcaccttcgctggatagcataacaaccgcagttgcaccgggactcagctcctgagaggcaagaatagtcctgcgcttattcttgtcggcaatcgagcgttggacgtaggcatcgagcttttcgttgagatcgttgtccgggcctggcacgctatacggcagaggacgcatctgcgtgcgatgaaacaggttgccacgaatgaaatccagcgcaatccctcccggacggcgcggaatttcggaaaatccgtgactccgttccgataagccaaccgtgagggggtgacgaaaatcttctacaatccaacaggtacaaaagctcggatggtgccaattgcgacttgacgttcacggcaacgcgatttggaaattcgcctgtgactacaaattcgatccgcacgcctgtctctgcgtcacgcagatttctacttcccggagatgcttgaacatagccgcgtcctatcaacccctcatgtagctttgctaaaccctcatttgataccaaaaggtcaatgtctttagtaaaacgccttacaccatgcaggatgagagcataccctccagcgaggctgtatggtacgtttaatttgtccaggcgttttgctagtcgttcgtaagttctttttaaccttccctgcccctcgtacaatcgatctgcctcatctaacacaacatcgaaggatacctcaagttcgctttcatagttatgcattttatttttttgacatagccttcattgtccaattatttagtcctgttttcaacctctaaattgtcggcagggcagggaactagagggataaaaagtggtttataaaatccaaacaacatggaaactgttccattcataaaacaggggctgaaaggcatcgtcatttaatcacaaatcaaggtttgaccccatgactgcccccccatgacccatgaccttcatgcttacttacgcgcaagcaagacgcgtgcgctaccattatggtaggacatgcgtccccgcttgtcatataattttaccttattcatccgcccgtattgtcataatgacaaattatcgtgtttaaaaaactttcgtatgtcacatcacaacaggctgtcaaataatttacttattccgtaatcatgtaaaattcagggaagggccaaactgtaaattaagagccattggttgcagctacaatgctttctagaatctctagttctttattgtattctggtttgttgtcatggtaaagtatagaggtcaaatactaccgcttccaaatcatgcaatcgggatacccagagagagtctgccatgatagagttgttaagaaaaaggcgaagtatcagggtctatgaagacaggaaaatagaaccggaaaaaattgaaattttaaaagaggcgctattgcgatcgccgtcatcaagaaatattaacccatgggagtttattttcgttgatgacaaagaattgctaatcgattctgatcacacgatactaaattacccgtcttagatctatggataagaagcaggataaaaataaaaaaccagaggtgtggcaacggcatcgtatcgagaaaggaccccatcttgagattttgcaagcgcgcttcgattggctgaaacaccccggaagtcaaaaagagatgaaacggctggtgcttgaagcaaatgactgggttaacattgtcgctactacgccagataatgaaatcgtggttgtccggcaataccggtttggcaccgaaaaaataacaaccgaaatacccggcggcatggttgaccacggtgaggattccagggctgcggcaatccgggaactgaaggaagaaaccggttataccagcgtcaattggatttatcttggttctgtcgaaccaaatccggcaattttgaataacgtgtgccattcctggcatgcaaaagatgccgttcaaacaggagaaatgaaccccgacgagggtgaagatattgttgttgccacgctaacgctcgatgaagtgcggtacgaaattcaggctggcaatttccgtcattcactggcgctcctggcgcttacaaaggtttttgacgtatggaaagggtaaccctgcagcagggaagaatcgttcgcccgttttgggtgtgagcgtgtttatgacaattatggcaaatgcttcgcccctgctttaaggtacaaggaatttcaattacccctcccccataatccccccgtttacggggggaaacaggggggaagcgctggggtttatccccagcaattggccgaccacaagggatcggcgctacgtctcaaaagataaattcaaagaaaaaagtcgttggtttttgtcttttaaaacccggcctaattcaagagcattgatgggaaataattgttgaaagaatttttaaggcgatttgtaatgctaccaatcttctttttctgcgccgggacatctgcttcccggttgtatgcgcaggattttttcgctattaccgactttagcgaggatgaattggctaagggtgaacctgtgggatggaagacccacaaaggcatttgcagagagatcaggcacagaatcattcctcgtattgtggaaatagaaaatagaaagtcactttatgtaaatgcccatgataacggcgcaattcttttcaaacccgtgcatcgtaatccgaaagaatatccctttttgagctggcattggaaggtatctaacattatgccagagagcagggaaaaagagattggcggcgatgattaccctgccgctgtgtgtgtggtctatggcaagacggttttctccataccataccggtaccggatattaatctacgtatacggaaacaacctgccggccggagagcggttttcaaatccctgtgaggcaagggcaagaatgattgtcgtgcagagtggcgaaaaagacaccggtaaatggcttacctctaaggtaaaccattatgaggattatgtgcgcgaatttaatcaggaaccaccggaaattatttatgtgggaattcagaccaacgccgaccgtactcacggcaaggtagaagcatggtattcagagatcctcctgagtaaaaactgatacctaaaggggtaattatgcagcactacttcataacaagcaaagtgtgtgtcctattcatcggtatgatgtgcgtaatcggctgtggaaatactaacgtcagaaaaattgataacaaattaaccgacaccaaaaaacccggcgcaaaagacactgccggcaatcagcccgagctttactatgaaaccggcatggcttcattcatttcagatgaatatgatgggaaaatgactgcaagtggggttcgttacgacaggaacaaactgaccgctgcccatccgtcgttgccatttggaacaaagatatttattaccaatctggggaataaaaaaaaggtagaagtgattgttatagaccgctttcagggtatcacagaccggattgtaaatgtttcgtaccgggccggcatggatttggatttgatagaaagcggaattgcaaaagtaggcataacaatcattgaaaagtctgaacagaattaaattaggccttcggcgacttatttaaagagaacatcgaaccgcagaacaaggaatatcgaatcgtgaagtaaaaatacttcatcattcaacattccttgttcgatattcgatatttggcgtattgcttttcaatggagaacgaagaagctcttcgctctgcaacaactttgaaattcctgtacatttaattaaaaagaggtgtgttctctatcgccctggttaaccgaaccggaaatacctatgaatcataatcaatatatccaaccccttctcattgccctgcatgccgcaaaacgcgccggtgaagccatccttgaggtttataactcagactttgccgttgagcataaggatgacaaatctcccctgaccttagcagataaacgttcccacgaaattatcctgaacgaactgcagcaaccacgaaccgcaaataacaaagaaaacaccctgaataacccgctactacccgtactcagcgaagaaggaaaagctattccttatgacgaacgaaaaaggtgggagtatttctggctcgttgaccctcttgacgggacaaaggagtttatcaagaggaacggcgagttcacagtaaacattgcgctcatccacaaagatcagcccgtcctcggttgtatctctataccggtacaagacactttctactttgctgccgtaaacctgggcgcttatgtgctcgtaaatagtaggatcgtgactggtgacctcacgataaaaaaactccttgatgcctcacagaaactaccgttaaacgccggtgccagaaaatctggttcgcatgacaaccagaacgtcacaaagaaacaaccctcacttaccgttgttggcagccgttcgcatgcaacacaggaactgtcagagtttgtagataaaataaaagaaacgtacggggaggtagaattcatttctgccgggagttccttgaaattttgcctcgtggcagaaggcaaggcagacttctatccgagatttgggccaacgatggagtgggatactgcggcaggacaggcaatagtcgagcaatcaggagggagggttgtagatatccccgctaaaggaccattgaagtataataaaaacaatctggttaatccctttttcctggtcagcgggcaaggattccagtcttctctgattgagccctgatcatgatacccttgcgtggctccaccacaactaaatcccccttgttggtaggacaagcgtccccgcttgtcattatgatgtcaaccgggacggttgacctgcctcattggcgaagggggttgtaaaaaaacttgctaaaaaaagaggtttttacagggtaatactatagtaaacgcaaaaggaaagttgtcattacgagggcgctggcccgaagcaatctctatcgtgggattgcttcgcggagtttacactgagcaaagcgaatgtgctcgcaatgaccagtacgtgtcaacttatttcatgcgtttactatataagtgcgtaaaacctgcattttgtgaagagagttcaattctgttattcccggccgcgtgttgcaagagggacatcacgggaagaattcagggcgtgataccgatgggtacagaaaggaaatatttggaagattcgagtaatacttgtataatgccggttttcatttttattcgtacagcgtaataatgaataataacctttagaccaacgaaggaaggagagataccatgcaatatgaacatcacgacctggttcatgaattccctgaatatcgtgaaaaaattcatactcttaagatgaccaatagtcactttaaaaggctctttgacaattaccataaacttgataaggagatttaccgggttgaaaatgatattgaacccgcctcagacacaaagctggaagaccttaaaaaacgcaggcttgctttaaaggacgagctttaccatatactaaggcagaacacgcactaaaaatggaggtgacaaaaaaatatggcatgcttcaaccatcggccagcgcacgaaggcagttcgggcggtgttctttatcgatccaaatagcaagatcagggcgctcatttactatcctatccgctttcaaatgggcgcaacttccaggaaatcaaacggcttttgatcgctctgcagactgctgacgcaaacaaggttgctacgcctgctgactggcagccgggcgatgatgtgattataccgcctccgggttcctgcagtgttgccaaagagcgtatggggcaaaaagacaaggatgtaaaatgttccgactgagcgtctttccttgcgaacccctagcctcaccattgtttagccccggtccgcgtcggtcttttctgaaggccagtagtaggcgtccggcgtattccgggcgccgaaaatggctgtgccgatgcgcaccatatttgcgccctcttcaatggcaatctggtaatcgcctgacatgcccatggaaaggtatttcatctgtacccgatcgatggcttctttgataagcgtgtcgtgtatttccttcaataccttgaagcatttgcgaatttttacctcgtctttggtaaagagaccaatggtcatgagccccaggatcttgagcgtatcatatttggcggtctgtttgattaaaggaattgcttcttccggtgcgacgccatatttgctttcctcgtgtgatgtattgacctggaccaaaatatccagggaacggccttcctgctggagtcgctggtccaatttctcaacgagagacagccggtccacggaatggatcatgtctgcaaatttcaggacgtccttgactttgttcgtctgaaggtgtccgataaagtgccattccgccccttctccttttagtacttcgtatttttttaatgcctcctgcaccttgttttccccgataatatgccctccggcatggatggcttcacggatccgttccgtctctaccgtcttggtggccattaccaggataatatctttggggtttttgcctgcctttgaggctgaggcagcgatatttcgccgtacgtgttccaggttttctttaatcgtcatggattctcctgaaatatgtggaaaatagtattcttgaacaatatcatatccgtcacgaataatcaaaaaataaagtcgaaaaggcattgtatccttgaagaggagtgaagatgtcaaatgcgaaagatacccgtcaacagccagcggcctttcttgtatgcgagtcggatcgttccgtataggagctttataaaatctctgttgcatttggtgttcaaacggtgtaccttgaagtacgggaattttaattgccgtttccgctttagaaagaggaaacacaccccaagccccaatggtaggtcaaccgtcccggttgacatcataatgacaagcggagacgcttgtcctgccaatgaggggagattaaagtcgctgacaaaggcggactaattcaatgtacaggaatttcaattaccccccccataatccccccgtttacggggggaaacaggggggaaagtagccgaaggcctaattaaatgtttaggaatttcaaagctgcggttgtagagcgacgaggctcgtcgctctacattgaaaaagttaccaaagacataatttatcagagcagcacgatgacaccataagcacagcagatgatctaccaaccatttttcaggaaggaacgtttatgagcaatatacaacgcagtttcattgcagatacggtgctggaatttgtgcctcgcttcttccgtctcatcgtagtggtatttcctggagtcttggcgtttggctgctttacctgcggttcgtccccactcttttcaggagacaggatatactgccaggctacgggttccgtgccttatctttcccaggccgaagttaaccatccgcaacccgctgctgatgcaccgatcgtcgtaaccggcctggcttcacaaataacctataattctgcaacaatccagggaacggtaaatgcacaggggttatcaacgaccgtatggcttcaataccggattgtcaatggcccatcgaagagcaccggcgcaacgcaaaccgtgattggaacaagcggcaccgagataagcatcaggatcattgaactgcttccgggcgcaacctattattatcgcctcgtgggaaagaacgacgcgggcacgtcgtatggaaaggagatgtcattcacaaccgtcgacatcaattcatcaattgcagcagaaacaaccccacccatgggcgctatcagtattaacgatggcgatcattgcaccaattccttaacggttgccgtgaacctttctgccactgataataccggggtaacgggttattatctctcggcaagcgctacgccaccttctcaatattccaccggctggacgtcaataccgtcaaccatggagtatctggatgaagtctcatgcaccttagataacggcgacggcgacaccaccatgtatgtctggtataaggacgcttccggaaacatatcggataccgccagcgacaccatcgttgtagatacaacgcccccggtaatcacgattcaggatccaaccgctgatcaaacctatacgactaccagcgaaaccgtgagcatcggcgggaatgcgtcggacgagataaatgaaataagcagcgtcgtgtggacgaataacaggggaatgggcaacacagaaaggaatgtggtcaactgggttattcctcatgttgcactggtgaagggggataatgtaataaccgtaaaagctgccgatcgtatgggcaatacgggaatagcaacgataacaataacctataccacgggcaacaacgcgcccgtcgtaaaaacaggatttgcagcgcgtataactacggatttggctactttgagcggaacggtgcatgccatgggattagcgacaacgacgtggttccagtatggtacgagcagtgggcattacagcagcatgtcgcctgtccaggatatggaagagatcgatcatgataaaccggtaggtaaccgcataagcggattggaggcaggcacgacatattattaccgcctggttgctcaaaacagtgcaggggctgcttctggaggcgaaatgacatttacaacgctacccctgaaaggcaggatttttggaaaagtcatacgccttcagaagggagaaccgctagaatctgcgaaattacggctcaaaggaataaaggcgcggaagaaggggtttcatgtgattttttctgatgcacacggacttttcacctgtgataatttagatgcagacacgtatgatattaccgtaacaaaagcggattgtaagacggttacccagacggtagaactgaaagaaggcgaggaaaagaagattgaaatcgccttgccaggcacagatgaaggcaaagaagatgcaaacattcccaaaaccgatcaacagaaggcgaactaacggtttaaggaatttcaattaccccccataatcctcccgtttacggggggaaagaggggggaagttcgccgaatgcctgattcacacctatttcagagacttcttcctccactcatcatatctcttcttcatttgattgatatgtcccggtatatgctgctcgtatacttccagccaatcatccagggtaacggttttgttctcctgagaaccaaccgactttaaccaaaccggttcaggcaacgtcttaataaggttgtacgaagacagacgaagcctcctgaataattccaatgccgcctcagtgctttggtcctgataatgaaatgccgcagaccatttgtcctgatcataggctgcaatagatttcccgggttcagcaatcaattttctgcatttgacataggcattcgcctcgctgtcggcaatatgaatgataatttcgtggatgctccagcggtcaggcaaaggtttaaatgaccacatctccctgggaaattgttttaaagcctcagtaagctggacgtaccccttgccatacgattcgattttttgcatccgttcttcttttgtcattaccatctcccttatagtattactctgtaaaaacttctttttttagaaagtttttccacaaccctatttaccccttatcaggaggtacagtatgtttatgagagaaagattgcttcgctttgcgcgcaatgacaacatacagtatatcatcaaaggcatggccagtgtcattgcgagggtcttttctgaagcaatctcccgctttcacaacggagaattgtttgcggcttcgctgcgctaggttgttttattgccaagaaatacagtattgatattttctccaaaaagtctatgataatcataaaaaaagcccctcgtttccgagaggcttggtaggtttaccccttatttaggggctatcctgcgaagttttcttcttattgtagaaagcagcgcaggcatttgtgtggtacaatgtttgctattaaaacataatccaggaaaaagtcaatggaaaaatgggaggaaataatggagaaaatacctaattatacccttggcattgacatgggaaccaattccatcggttgggcggtagttgggcatgatgataatttaaagccaactggtttgattgcatgcggcacgcgtatatttcaggaggccgtagatcctaagtcaagaatcccaaagaatcaggcacgtcgcgccgcacgtgctgcacgcaggcttgtggtaaggcgtaagatgaggctcagtagtgtgctcaatattttattaaaaaccggcttgcttccaaacaacgtcgacgagcgggagaaattattcgccgacaataaatctttcgacccttaccagctcaggaaaaaggcgctgtataataagcttacaccttatgaatttggacgtgtgttatatcaccttgcccataggcgtggttttcaaagcaatagaaaggtgtcatccaaagacgatggtgaggtaaaaatctccatcaattctctgcatcaggagataaagaatgctgattgtcgctcactgggggaatacctcgcaagccagccaaccaagcgtaaccgctatacagaccgctctatgtatcaggaagaatttgaactggtttggcaggaacagcaaaaacattatcccgatttgctaaatcagacacttaaggtatccattcacaaggccatcttctttcaacgtccactcaaagttcaaaaatatctggtaggcaaatgcaccttagagccgttaaaaaagagagcaagtcgggcattgcttgaagtgcaacgattcagaatactgcaggacctgaataatcttactatcaagaatccagttacccgtgaataccgcattcccacaaacaatgaacggggaaaactcctggagctattggaaagacagaagaccttaagctggaacaaggcgcgcaccgcgcttagactacacaaaggagagatttttaatctcgaagaaggaaaaaagaaagaacttatcggcagtcgtacggctttcgcattgcgctccatattgaaaaaacattgggatgaaatgaagctggcaaagcaaaacgaccttattaccgacatgcttaccattgataacgagcgaggctttctaaaccgtatgaagtccgaatggggtttcgactcagaaactgctgaggaactggctaaaacagaactggagccaggttatgcacgactctctctcaaggccatacggaaaatcattccgcatcttgagcaaggaatgccttatgataaggcgtgcaatgccgcaggctataaccacagcatgcttaataagcaggccgcaggagaaaaacttggagcgccgccttatctgcgaaatccggtggtgcaaaaggcattgtatgagacacgaaaggtcgtcaacgcaattatccaccgttacggcaaacccacagtcattcgcatagaaatggcgcgagatatgaagctgacccggcggcaaaaggaagaatggcaaaaaaagcaaaaggaaaatgaaaaaatcaatgataaagcaagggatattttacaaaacgagtttgagattcaaaacccaaccagggcagatattcagaaatataatatgtggatagaatgcagcatgacatgcccttacaccggcgctattatcaatcgcgaaaagttgttttcaccggaggtggacgttgagcatatcctgccgtacagccgctcgcttgatgattcgtatatgaacaaaacgctgtgcatggcatatgaaaaccgtgccaccaaacacaatagaacgccttacgaagcctaccataccgatgcacaaaagtaccccgccattctccagcggattaaaacacttccctggccaaagaggcgtcgctttgagcaaaaagagattgacaccgataaatttgtcgagcgtcaattaaacgatacgcgttatatctgtgttgaggtaaaaaaatacttacaacaaatcggtgtgagaattgagatcagcaaaggtgaagcaaccgccgctctgcgccaccgttggaatcttagcaggattttgtctgaggatggctccctggagaaaaatcgcgccgatcaccggcatcacgctattgacgctatcattattgccctgacgtccacaagcttgtttcagaaactttcgagtctctctgcacaaagtggtgtagccctgagtgaaagcggttttcatcttgagaaaccatggtcatcgttctatgaagacgtggataaaaaagtcaggcatataatcgtatctcatgcgccgagccacaagataagtggcgctctgcatgaagggactgcgtacgggtttagtgagcatgaagaatgctttgtgtatcgtaagcctttgggtgtggatataactttagctcaaatactaaaaattcgtgacaagtatgtcaaagaacttgttatcgcacgacttgagaaatttgagccagaaattagaaaggctattgatgaagcaatacctaaaaagtcgcgatacaaaattacggataaacaagcaaaagacttgataaaaaaagcctttggcaactcagaatatccattgttgcataagaatggtaaaacgcccattaagagtgttagaattgtggataacactttgaaatccaacatgcttgcagttaaaaatgaatctggacaagcatataaatactatccgtttggaaacaatcatcacatagaaattattaagcatacaaaaaccggaaagcgtgacggcattgttgtaacaacggcagaagctgcacgacgcgcccgcaacaacaaaattccgatagtgcaaaaattacccccatgggaaaaagaaggaacaatatttgatgaatgctgggaatttgttatgagccttgccatcaatgacatgttgatgcttgacaaggataatattagacaatatttcagggtgcaaaaaatttcttcaaatacacagattttttatttaagccatgccgcggctacacttgatgaatcaaccagcaaaatgccgaatgcttttgaataccgcaaagtaatagttgatgttttaggtaatattatagcctgtaaaaatgattaaacgaatcgttgaaatcagcaatcctgcgcggctttccctgaaaaatcggcaaatggtggttgaacgcgaagggtttgactcagctacagttcctgtagaggatatgggcgttcttattttagaccatcctcagatcactcatacccaagggcttcttgcggcttgtgctgaaaataatgtcgcgttgttagtctgcagtgagaaacatctgccgtgcgctatcctcttaccgctggaaggaaacagcctccacagcaggactatcgcgcagcaggcgcaggttaccgaacccacccgcaagcgtctgtggcaggcaatcgtacaggcaaagattcgtgagcaggcaaaggtattgctcaaggccacaggtgacggcaacccactcccggcttatgccaagagggtcaaaagcggggacactgaaaatgttgaggctcaggcatcccgcatctactggcaaaggctctatggcccggcattccgccgtgactttgatgcgcctggcattaatcgtcttcttaactatgggtatgcagtgatacgcgcgtcagttgcccgcgcaattgtcagtacgggccttcatccctccctgggactgcaccaccacaaccagtataacagcttttgccttgccgatgatctggttgaaccgctgcgtcctgcggttgatatgaaggtatatgaactgtggaaaagacatcagggcgaaccggcgctgacaccggaaaacaaacgggcgttgttagaaaccttgagcgcagattgtgtcatgaatggccaacggctccctttcatgacctcgttacatcattacgccgcaagtgtgcgaaaggtaatctgcggcgagcataagcgtgtggagatacctagattatgagctttggaggttatcggagtatgtggataatcgtcatgttcgatttacccactgatacgaagcatgcgcgaaaggcttatcatgaatttcgggaggaattattgaatgacggttttactatgctgcaattttccgtttacgcacgccacaccccaagcgaggaaaatgccgcggttcacgaaaaccgggtaaaggcatctctgccggaagacggagaagtaaggctgttaaaaatcacagacaagcaatttgaacgtatgaaggttttcaatggaaaaacgcgaaaggcaacagaaaaggcgcccaaacaactcagttttttctgaatcgttcgggcacatcacaaggaaatacaacaggttacggagagggattgtaccacacaaatgcctgtccgcaagccacaacttcaaatactgtagctgcaaatgatctcgaattgtaccacacaaatgcctgtccgcaagccacaacctacggactcagacacaaaatcagttatagtattgtaccacacaaatgcctgtccgcaagccacaacaagaagtgggtaaataccagacttgccgaaaattgtaccacacaaatgcctgtccgcaagccacaaccaaaggcacgagtcgtatagagcaggaatacattgtaccacacaaatgcctgtccgcaagccacaaccattcgccgcaaggtaaatccgttcttctcattgtaccacacaaatgcctgtccgcaagccacaaccccgaatcagcccgattgttgcggctgaacaattgtaccacacaaatgcctgtccgcaagccacaactagtttcttgcagcaacacatgggttacgaattgtaccacacaaatgcctgtccgcaagccacaactcaagcgtcttgcgggtatcgttaacacacttaatgattaattctactcgttgactcatggatatttttgtgttaaaattttcgcatggatgccattttaggttttattgcttttttgctgacacttcattcacacctgcaatgcaaacgcgcatttggcaaatgtgctttgctggatcacaaaccacagccaaagcctgatatatccttttccgcaaaaaatttatacaaagaaccgccagtgatagcgctcatcgtcctggtaatttttattacccttactcaattctttgcaacttcttaattcgagcacgtagcgcatactcgccctaaagctcctttccaatagtttctgcactcagccaggtctttccccttacaatattcgccgatcgatttcggatttcaaattctctaccctgccgacacctgacccctgatccctaatctccagaaacgccagcacggcctcacggaacgttatgttacgaatgcaagccctgagatagggttcgcattcggcaagggtgtatccccagaggatggcgtcccgtctggagatgtctccatgggagatgatgacgcacatatcttcgatccaatctccacaggtttcatgtcccgtggttcgggtttctgttttggcgtcagttttcccatgatccccgacagtccgctcaaaagtgagattgtaccacacaaatgcctgcccgcaagccacaacccaaataaatattttcgcaacattttagtattttggaaaatgtagcgccgatcccttccccgatactattcgaggacaagcgtggtcggctccattcgttagcaatattggcgggggataaaccacccgcgctacgtattccgtttcttgtggatcacctacaatggaaggatttttcaaaaagctaaattgttacatgttttcaaagaagagtttgtgaatgtaggtgctggagatacaaacggtctgcgggaaaaatggtaaagacttacaggtaatttggttgagactgtgctgcgctatggtataataaatgacatttacgtaccggacaattatctgctaaacatgcacttatggggaggaagaggcacatgaaggcaattttgtcgttcgttggagtggcaatgctctttggtgtttttagtggtgtaatacaggctcaaaaactcgataaaggagtaggcccgtacggggaattctggaaaccaatccccacccagcggtactgggcgcctgactacttttattcaccgccggaagaaccaaaaggggtctatgctgcggatgagtgcacactctgtcataaggcgttaaatccggggttggtcaaggcatgggcagaaagcagccatgcgaatctggataagctgctggactaccagaaagagaaattggccgaaatagaaaaaaccctggggaggaaactcacgaaggtgggatgtatcgattgccatggcaaggtgggagcggagaagctggatcatggaaaagagctcgttatgcctagttccgccatgtgcggtgaatgtcataaacaagaataccaggagtttgaatcagagaagcaatacggtattcctgactggaaaccaggcagagaaagccatgcaaaggcttatgatgccaacctggacgtggatgtctgggcagcggtagataagaatattgttcagggctgcgatatgtgccacagcatccagcacaagtgcgatagctgtcatacccggcacgccttcaaggcctcagaggctaggaggccggaggcatgccaaacatgtcataacggacctgaccaccctgatattgaatattaccgggactccaagcacggctcgatctattttattgaaggacatacctgggattggagcaaacaactcaaggacgcaaattatatctctcccacctgtcaatcctgccatatgtattataaagggcagtattcccataatatggtcaggaaggccattatgggcgagggagatgtcttgttttatgacaatgtcttgaagggggtcaagccaacagattatatcaaaaacagcaaggagttaatggcacggcgtgaggcgtggattgaagtctgtgtaaagtgtcattctccgcgattttcccgtgattaccttacctctatggataatgcctcggattccgttttccaatacgtgagcgatgcctatgccaccattaaatctctttatgaagagggcgtactctatcctatgcctgaaaacaggccaaaagcccctgcctccgttacggaaaagtatcccgatctcctgggcggtttttacggggagttttgggcgaagaacggaaatccaagcaggattgaaaaggacttcctgtatatgtgggaaaacgatgcctttctggtcagaaagggtctggcgcatatgaatcccaacggctttacttatctctcgtggtcaaatttgctcaagaaatacgtagatatacagagcgaggcaaataccctgcggcgattagctgcgctggaaaagaagagagtacgggcgcgactaaaaccgaaaagcaaatagtgtctttcaaaatatatttttacattttcggcaaaaaacgtagcgccgatcccttgtggtcggcctgtggcgggggataaaccacccgcgctacgcattccgactcgttcgggttaggtatgaaaggcgcctttgcttcgaagtgatgatatggaaaattttacccaatggcatctcagtttcgctggcatagaaaacgtctggttgcgtgcgctggtcctgtttctggcgattacggcactgtacttttcctggcacggcatcaaggctattccttcacgtaataaacggatattgctttttgcgctccgttttctggcaatggcgctttttgttatgcttctgcttcagccgcaactggagcagaaggaggtcctgaagttaaagaacaaggtcgtgtgtctcttggacaattcggagagcatgacgctcaaaggaggagataccgggattacccggtttcagctcgtcaataatttttttcatgacaacgcctcgtttattgaagaattggagaataattttgatgttgattacctatccttttctgatgccctgaaagaggtttcgcatgacgatgtcgaaaagggttttgcgcttgatggtacgaacaccgatatcgtccaaaccctgaagctcctgaaaaaacgctatgaagatacatcggtcaagggatatttcgttttttctgacggcgctgacacggtagaacttccttcaagtctggataaaattgaaatcattgcaaatcttaccaaagacctgtcatctccattttttactttttctccggccggcaatatggaggccagagatattgccatcagcaaagtttcttatgacggttttacttttgtgcgaagtccatggaaggcggatgttgttatcaaagttcatggatataaagacctcaagctcccggttaccctaaaacaaggcaatgacattatttcctcgaaggtctttgatgcggggaatgaaagcgaacttcatgtcgacctgtcattcacaccccttacgacaggcacctttctctatacagtctctttccccgcccagcctcatgaagcaattaccgaaaacaatcaggtcagttttctcgtaaaggtggtgcgcgataaaatccggattatgcatgtctgcgggcggccatcgtgggatgagcgctttttgaggcgggtattgaaaagtgatcccaatatcgatctcatatccttctttattctgcggacaccaacggatgtctccgaggcaaggaatgacgagctcagcctcattccttttcctgtagacgagttatttacacaggagctcaatagttttgatctggttatctttcagaactttgactatcggccgtatgacgcggcagtcttccggttttcacactacctgtcgaatctccggaaatttgtgacggaacaaggcggtggttttatgatgattggcggtgatatctcgttttcacaaggagggtatgacggtacccctattgatgaaattcttcccgtaagcctcaacagcgggaaagacaccatcgacacagcacgattaaaggcaatgctgacccctgatggcctgaaacatccggtgactgcgcttgatgtcaatccggacagaaataccgctatctggaaagaccttccggaactggatggatgcaatgtgaccacggaagtgaagccggattccctctccctggcgatctatccgacaaagggaaacccgccgctggtttccgtccgggataccggccggggcagatgtatggctataacaactgattctttatggcgatggaatttcgtgtccatgggaagaggcggcagcaacagacattacataaaattttggcagaattccataaagtggctcatcaaagaccccaccttaaaccccatccatgttatcgtaaacaaggaaacgtttttaccggatgaagaagtgcccatcagaatcgatgccgtgggcggtaattaccaacccctggacggtgtgcaattagacataagcatcaccaacgaattttccgggaaaagtatattctcaggaaaaggtgttacgggcgctgatggtcagtatcggtttgtcatcaaagataatacggaaggttactatattattaaagtggcaggaaagaaagaacaggacgaagttgggcaggattatgccgtttttaatatcgcgttaaaaaatagggaatttaaagatacttctatcagaagggatatccttgccagaatagccgaggtttctggcggaaaatattttgaacttcccataaaaaatatcgggaagaaattaacgattgaaaatcccgcggttgtaaaacttgtcggcaaacggcaaatttctttgtgggataatggttacctctttatggcaatactggcaatcgcttctgtcgaatggtgggtaagaaaacggagtggattaagttgaggcaagaaaacgttgttgaggcaaaaaacacttgcaagaaaggatgtaatgtagtatatatatatttttcgattcgataccatatcaggacgctattaccttttaccgaagaggttttgtttgataatagcgattgacggccccgctggttccggaaaaagcaccattgccaggatgctggcaaagcggctgggctttaaatatctcgacacaggagctatgtatcgggcgctcacgtggaaagcattgcagcacggagtagacctgaaagacgcaaatgccttatgccagcttatggatcaaactgctatcgagctccggagcacgggcgacggtttgcaaatctgtatcgatggggctaacgtaacggaaaagatccgattgccctcggttacaaacaacgttcattttatatcgaatacacctagtgtcaggcaacgcatggtaaaactccagcgaacacttgcctctgaagggaatattatagcagagggaagggatatgggcaccgttgttttcccgcatgcagaaaagaaatttttcctggatgctgagattgaagagcgcgccagaagacggcatggtgagatgaatttgccggagaacgaaatttcctataccgatgtcataaaggatatagaaatacgcgataagcgggacacgaccagggataattcgcccctcaggaagagcgaggacgcaatttacctcaatacgacaaaaatgctggttgaagaagtgatcagccggatactcaaagaacttgagtctgttataaaaaaataggcttgtgagaagcgtataactgtaatctattttataaaccttttatttttttcatttttatttcggagaaatcgttaaattatggatcgggatattttaaaagagtataatgtgaatttagccgatattgagcgggaggtcgaagcaatcgttggaagcgaggataccaaaaaacagatagaatccacctactatgattctattcagaattttgaggtaggctcggttctcaaggggcgcatcctcagtgctcttggtgataatattgtcatagactgtggatataaatccgagggtatgatacccaaatttgaatttgacgatccatctgaaataaagataggtgaagatgtagaggttttattagaagcggtagaagacgattcgggacttattaaattatccaaacggaaagcagaccgtattcgtggctgggaaagggttattgcaaagtataaagagggcgatattatcaccggccgggttacaagaaaaattaaaggcgggctgctcgtagatatgggcgtaccgatctttttaccggcatcccagatcgatgtaaaaccgccgggagacatttctcaatacattgggcaggaagttacctgccgaatactgaaaatcgatgaagcgcgacaaaatattgttgtttccagaagaaagcttatcgaggaagaccgtgacaaaaagaaacaaggcttgatgtcggagattgttgttgggcagatcagaaaaggagtggtaaaaaatatcgctgactttggtgcgtttattgatttgggtggcctggacggacttctccacattaccgatatgagttggggaaggataagtcatccctcggaaatgcttgccattgacgatgaaatcgaggtgatgatccttggcattgataaagaaaaggaaaaggttgctcttggattgaaacaaaagtctcaaaatccatggttactcattgaggaaaaatatcctgtaggctctaaggtaaagggtcaggtcgttaatatcatgtcgtatggcgcatttgtaaaactggaaaccggcatcgagggccttgtgcatatttcagaaatgtcctggacccgccgcattaatcatccatcggaaatggtggcaatcggagatatggttgagattatcgtcctcaaaatagacaaagagaaagaggaaatctccctgagtatgaaacagacggaagtgaatccctggacggttattgaagaaaaatatccggcaggaacaaagattaagggtcgcgttcgtaatctgaccaattatggcgcattcattgagattgaagaaggggtggacggattgctccatatatccgacatgtcatgggcaaagaaagtaggtcatccgtcggaaattgttaaaaagggagacaaaattgaagcggtggtgctttctgtcgaccgggaaaaaaagagagttgcgctaggtctgaaacaactctccgatgacccctgggtaaaagagattcctgagaaattcaaggtaggtgacattatcaccggcaaagttacgaaactcaccaattttggcgcgtttcttgagctggggaaagggatcgaagggttgttgcatatctcggaattgtctagcgaaaaggttaataatcccgctgatattgtcaatattggtgatgacctggaagtgagggtcatccgcattgaacctgaggcaagaaagatcgggctcagtctgaaaaaaatgtctgatgcagaaggaaaaggcgacgtgacagcggcttcaaagggagattctcaaaggcagtcagatggtgaagctgcggctcctgaggagcagaattcggacgctgcaaagatctcgtgacatcaccagagaaaaagaaggaggcatcctacggagtctgctttacaaacatacctgaaagaaattaaccaaattccgttattgtctccggaagaagaaaaagaaataacaagaagggtggcagagggagatgaaaaggcgcgggagaaactgatacgttctaacctgcgcctggttattagtattgcgaaagagtatatcaaccgggggctttccttcctcgatctgattgaagaggggaacctggggctgatacgcgcagttcagggatttgatccttcaacgggatataaattcagcacgtatgcaacatggtggattaagcaggcaatccgaagggctttgaccgataaggcaaaaatgatccgcataccctcctacatgtctgaaaaaatatcccggctcaaaaccacttctacgcatttgttcgacaaacttgaaaggacgccgacctataacgagattgcggaagagatggatattactgcaaaaaaggttgaatcaatcgagcatgcaacacgctcaaccgtgaccctcaacagagcaggtgttaccggctcagatcttatctgggcattgagtaatgttttgcccgatgaaaggacacccgcgcctgaagaggaagtcgaggaaat

SEQ ID NO: 3522 - DNA, 22940 bp, synthetic construct
  source 1..22940: mol_type = other DNA
  misc_feature 1..22940: note = Synthetic
aatctaaaacctgacgaaatagatttgtcgaaaccccatgtgataagatttaaagtcgaaagaggacaggggctgaccaccggttttaaagatttaataagaaaccagtttataagttttaataataatgaaatagacgattttgtccttgtccgcgaagacgggattccaacctataactttgccgtcgttatcgatgacgcgcttatggaaataacacacataatcagaggggacgaccatgtcagcaataccccgaaacagataatgctgtacggcgcgctcggctttaaagcgccggagtttgcccatgtatcgatgatacttgggcaggacggaaaaaggttatccaaaaggcatggggcgacctccgttaatcagtataaaaaagaagggtttttgcccgaagccctggttaattatttaatcaggcttgggtggtcgcacggaaacgatgaaatattcacgatggatgaaataataagatattttgatttaaaaaatataagcaagtccgccgcaatatttaataccgaaaaacttttatggttaaattcccattatattaaatccaaagacccgtttaatattataaatctgctgaacgatataagggatgtttcggaaaagcctatagcagccgacattcaaaccgtttcgctgatagattcccttaagtccagagttaagacgcttgtagagtttaaggctaaattaaatttttttataagcgaagagccgggatacaaaacagagcttttaaccgaatttaattttaacgaaggggatttattctttctgaaggagtttaaagcgtttatcgccggtttgcccgatataatatttaattataaagaaggcggtttaagcgacaaagccggaatccttaattttataaaaaactccgtagaaagggtaaagcaggagtttaataattttttatccaaaaataattggactatgaaagaaaaagccatgattataagattagctttaaccggcgaaaaggtcagtccgccgatattcgagattatattcgcgcttgggaaaattagatgcgtcaaaaggattagcgaattttatgaatttattaatcatgcaaagcctgcaagggcatagcgggttccgatttatgaattaaatttgcgttttattcttgcaatagttaatattaaactgtataagtaataatatggctttgcaaatatgcggtatagatgaagcggggaggggatgtttagccggtcccgtcgtatcggccgcaataatcatcgataaaaataaaattccatcgggcgccaaagattctaagcaattgacggaaggaaagagaaaagaattttacgcggatattttggcaaacgccgcgtcttattcggtcggtgttgcatccaatatcgaaatagacgagatgaatatcctgaacgcggcaatgttatctatggaaagggcgttttacggattaaccgttaagccggatatcgttattatagacggtccagtcattccaaaaaatttattaaaagttgacggcttaaaagttattccggttatcaaggcggatgaaaggattaaaatagtttcttgcgcctccattattgctaaggtttttagggacgaattaatgatttctttagataataagtaccctgaatacggcttcaaaaaccataagggttatgccaccaaagagcataaaaaaaatttatcgaaatacggtttcagcgaaatgcacagaaaaacatttaaattttaaaatttttagatattttagatattatactctcatatatgtacagtaaaaataagaacaagtctttaaataaggctaaaggagatgcgggggaaaaaattgcggccgagtttttagaaaaaatcggttataaaattataaaaaccaatttcaggagcgggcataaggaaatagatattattgccgaaagcgaaaacggggttttaaattttatcgaggttaaatcgcggtttgaaaatagattcgggaaacctgtcgaggcgtttgataacaataaaaagaataagataattggaatttccctgttttttatgagcaaatttaatatcggcaaaaaatctgtaaattacggcttgatttcgattgagtttatagaacggggttcggtgaaactgatatactttgaaaatgcgtgcgattaatatactgcttgcgcaggtaaatcctcatgtaggggatttaaagaaaaacatagaaaagcaccttaagttcattgaaacggcaaaggaagagggggcggagtttgttatttttccggagctttctttaaccggctattttttaaaggacagcatttacgatgtaggcgtaaatttaaacggcgaagaggcatttatattcgaaccgctttataaagcaagtttagattcgggtatatccgttatcgccggatttgtagaaaaagacgacagctataatttttataactcgtctttttgtatttcaaagggcaaaatcataaatgttcacagaaaggtttatcttcctacttacggaatgttcgaagaattaagatattttaaaccgggaggcgggtttaatattttcgatatggcaggcgttaaggcttccattttaacctgcgaagacgcatggcatctttcctcgtcttatatagcggttaataaaggagcggagattatcgttgtcaattcggcatctcccgcaagaggaattgccgaagggcttgataaattcagttccataaatatgtgggaagaattgctttccgtcatcgccttttattacaggagttatgtaatatatgtcaacagggtaggatttgaggacgggataggtttttcgggcggctcctgtatattcggacctacgggcgaaatggacgcacgcatagattatcttgaagaaggatacttaaaggttgagataaatttagatcttttaaataatgaaagatttaaaacccctctcataagagacgaaaatttaaatttaacattaaaagagcttgagggtattataaattctaaataatttatatgaaaaaagaccttccaaaaatagatgggcataattttcctatcatttttaagcatcttacctattttataaaggatgaggttttaaaaacggggataaataaggttgtattggggctttcgggcggcatcgattctgccgcagcctgctatcttgcttccagcgcccttgggaaaagcaatgttaccgccttgcttatgccatacaaaagcagcgctaagtcaagtttgggagatgccatgaaggtggttgaggcgcttggtattccttattatataatcgatattacaaaacagatagacgattattttcaggcagaaaaagacggcacccgggttaatgatattaaagttagaatgggaaataaaatgtcaagggaaaggatgtccattttatatgactattcgtataaacttaagtctttggttcttggaacaagcaataaatcggagcttctattaggttacggcacaatttacggggatatggcatcagctttaaatcctatcggggatatttataagacccagatatatcagcttgccaaactgctggatattccggacagcataatgacaaaaccgccttcggcagatttatggctggggcagtcggatgaatcggagttaggttttacttatgaagcagccgacagcataatgtatcttttgatagataaaatgtataaacccgaggtaatcgtttccctcggttataattcagggcttgtggacgccgtttataatagaataaaaaaatcgcagtataaaaggcgtatgcctttaatagttaaagtttccgaacgcacgataaatatagactttaggtatttaagggactggtcgtaaaatgcccgcgctatatattatcgcaaccccgataggcaatctcgaagacattaccgtaagggcgcttaaagtaatgaggcaggtagattttatagcctgcgaggacacaagaaaaacaagaatattaacctcgcgttatcatataaaaacccgtttaattccttatcatgaatataataaaaagcgggcggcggacggcattgtcgcgaatataataaaagggaaagatgcagccttggtgagcgaggcgggaacccccttaatatcggacccgggttcgtatttagtgagattatgcatagaaaaggggattagaataattccgattcccggcccgtcaagtattttaagcgcaatttccgcgagcggtctcgatgtctccgaatttacatttataggatttttgcccaagaaagcgggcaaacgaaaaaaacttttaaccaaacttaaagaggaaaagagagtttttattgttttcgaaccggcaagaagcgtcgaaaaattactcgaagatattttggatttatttggcaatgcgagaatttgctatgctaaagagctaaccaaggtttatgaatttgtaaaaacccaagatttaaaagcattaatggacgagatcaaaaacaagcccgagcttttaaaaggggaaattaccttggttatagagccgccgcttttgagcgcaagcccgcacgcaacaggtttcgacggagtttattaacttttatatatcgcatctttaagcgagggatgccgaaagtttacctgataaccttaaaatccttaaagtttgacaggctttcctgttcgtaaagtttaacttctttaactttcgaagacggcggacctatatgaaccgttgcaaccatttcttttatcctgttttcctcgccttcgaaaaatgcctccacatggccgtcatgggtgtttttgacatagccttttatgccgatcctatctgcctcgagtttggtgaaatttctaaaattaaccccctgaacaatgccttttattatgaccctgtatgattttgccgtcatctttgctatgtataaacctgtatttttctcaatccgtatgttttttgatatgggacagtttgtgaattttttcttccagcgtttttatctgttcttttaattctttaatttccgagctgcgggcaatatcagccttgctcatggcttttttaatggattcatcgactaaagcggaaagtttggctttgttcgaatcatacactgttttcatttttttagaaaaatcttcggcctcttttttcccgaagttttgattgacgataaattcatcgagtatcttttgaaatctgtcttccgtagtcgtaagaaccgaaccgataaattcggcaaatttatcaagcggcgttttgggattttccatttaaagcctcctttttaaaatatttaattgatataatatgaatgtatatagtacatagtatatagtacgattataccattaatatttaaaaagttttaccgattaattaattattattaatcatgtcgagcctttctattttagtttccttgccttttttctttctcaaataataaagcttagcccttctaacctttccgcgataaagaagttcgatcttgtcgattaaaggcgagttgactaaaaaagtcttttctacgcctacgccgtaagaattttttctcacggtgaacgaggaacggaggccgcttccttttcttgcgataacaaccccttcaaacacttgaattctttccttatcaccctctttaatcttttggtaaaccttaaccgtatcacccgatttaaaaacggggacgccggtttttagggacgaattctcaattttttcaacgatattcatttaaggctccttattttattaattttattttatttcaaaaataagcattttaatataaaatccgtgaataatcaacgggtttttttatccgccttacggttaactaaatcaggcctattttccatggtctttttaaacgcgttatctaatctccaatcgttaattagtttatggtttccgccgagcaaaacctcaggaacggtaagattgtttacagccctaggttttgtatattgcggatattcaagtccggacttatattcttccgaaaagctttcttcggtaagagattcaaaatttcccaaaaaattttcaaaatacctgcaaacagcttcaattaaaacaatggatgcaatctctccgcctgataatataaaatcgccgatggatatttccaatgcggatgttaattccgcaacccttgcatctattccctcgtaccttccgcatatcactatcatatgattgtagcttgaaatttcctttgcggcttttgaattaaggagttttcccgatgcggacattataacggtaattaaattattttcgccggcagtcggatattttaattcatattcggcttttgcagattcataggcttccaaaataggataagccattaagagttgtcccgctcccccgccataaattttatcgtcaacccttttatgtttatctttagaaaaatccctcgggttgataatgttaatctccataatgccgttttttatagctctgctaatcaatccggtattaataaatgaggtaaagtatccgggcattatcgagattatatcgattacccttttagtccggcatgtttgaacatcaagttttttattcattttgctcagatttttttagattttataattttcttcgttttttacgacaaccttattattatcgtaatctaccctgaaaatattttcatccgtcattggaattagatatgttccttcggcagattttatttctattatgtcggtgtcgccctgataaacctccgcaacggttccgatattttcatttttactgttatagcagtttaaattaatcaggtcggaaattaaatattcattcttatcaagcgttatatcggttttttttataaaaacccgcttttttttaaaacttaaagcatcgtctattgaatgcgaaccgtaaagttttataaggaagcccttatttacgggtctgattttttcaaccttaagccgctcgtaagcattgtctctttgaataaataaaggtatgccgggcgaaaatgctcctgtatcagggttatatggtataaataaaagttctccgtttattccgtgcggtttagcaaattctccgacaccgatataatcgttcatttcccctgttttttcaataaagacataaccgtatcgcttggtttagcgccgaggcttatccatttgtcgaacttatccctgtcaaccttaaattgtaaggtattcgagcagggattatatgtacccagtatttctatgaattttttttgaacggctttttcacccgaagccgccacaatcctgtaaaatggttttttgtgagaacctgttcttgcaagtctgatttttaccgccacttgaaatctcctttgttttgttaaatgttaaaagttttaataatttactatcgataattactattattaatgcaattaaatgaaaaattaaagattattgaacatatttttgataccgccgatatttttcaaatttttaagcgaaccgaatttcccgcccttgagcgatttcatcattttttttacttcttcgaatttatttataaatatatttacatcgttgaccgaagtaccgcttcccgcggaaattctctttctgcgtccgccgttgagtattgcggggctaaggcgttccttttccgtcattgagtttatgatagcgtttatttttttaaattctttttcggcggcttcagggttgaacttgtcctttattttggaaaaaccgggtatcatcgaggcaatctgaccgatgccgcctatcttagaaaccatttttagctgttcggcaaaatctttaaccgtaaaatcttttttattaaggctttcttctatggcttttgccgatttttcgtccacggcgttctgggctttttcgatgaggctcataacatcgcccatgccgagtatcctgtcggctatcctttctccgtaaaagggttcgaaatcgcttaatttctcgccgacgcctataaattttatcggtttatccacggtttttttgatggaaagagcggcgccgcctctggaatcgccgtcaaccttggtaagaacaaccccggttatacctaccgcctcgttaaatgtttttgcaaccgtaacggcgctctgaccaagcatagaatcggcgacgaaaagtatttcattagggttaaatttgcttttgatggtttttaattcttccatcaaaggctcgtcgatttcaaggcgtcccgccgtgtctattatcagtgtatcgtaagcatgcttttcggcgatttctaaggcgtttttgactatttcttcgggtttctgcgtaatcccgccgtctttttcaggggtttcgtaaaccggaatgtttatacttgcgccgatttttttaagctgaagaacggcggcaggcctatagacatccgctggaacaagataaacgctccgctttaacccccgcaaatagagggcaagttttccggcggtcgtagtcttacccgaaccctgaagtccggcgagcataatgactacaggcggcttagctttaatattaaggggttcgtggccgccgagaaggcttgtcagctcgtcgtgtataattttaattatctgctgggacggcgtaaggctgtccataaccttttcgccgacagccttgttcttgaccgattcgataaattccttgactatgaggtagtttacatcggcttcgagcagggacagcctgacctctttgagagcgtcctcgatatttttctcggaaagcttcccatacccgcgaaggtttttaaatatcttttctaattttgagctaagtccgtcaaacatggtatatactgaacaagatttatttttagcagtttaaatttaagtgattaaaatgtttttttgttgtaaaatttttattttattagtttttgaaatttttgtcaattagttttcaagccccaaatccataaatctggatctgggcaagctttgaagctttgaaatgcgaataaagggggaattaattaaccgttaatccataaggcaagtttgcgtcttatccttttaatcctttcgttgtctatttgacctattttgcctaaaaagatagatttgttgactaccgcgagccttaatattcgaataacgctcggttgttttaagcctgatatcgcaaagtcggaatcttccaaaccaataagttcgtctaattccggaatcagtgtatgaatttgcgaggatatcatgcatattagataatcgttaagattattcggcagtttgcgcaagataagagcaggtcttagctttccttgtttttgatcggtttgcggaaaattaaataaggttatctgaccttctaatatcacgaaaaggattcctttatatcgctcaaggaataaagagaactttcggcttccattcctttcattgccgacgaaagagaaaaatcgttccactccgaggcggcggttgttgactgtagatattccataaagtcgagaacctcgacttgttttgattcaggcagcgatttgacggcttcaattattttttctgataaatccataataagctttttttctgtttagtataatttattatcttttaaaaattgattctatgcaatatttatacagctatttcataaaatagtcaagttgatataggagcaaatgggtagcgaattgggagtatttgatatgtagggatagctaattttaatagagctgggaggggtatcaactctttgaatttatcaaaattatggaatatttttattgattttttatttatattataataataacattatattgtattattataattatataatagcgcaaaaaagccccttgttatagcaagaggcttaaaggttaccccattggggcatatcctgcgaagttaaacttcttattgtaaaaagcagcgcaggcatttgtctggtataatataactttatattaataaaatttaatattgatgtcaatataaatatggaataataatgaatattggattttaggagggtgataatgagcaaatacactcttggtcttgatatgggagcaaattctcttggatgggctataattggtaatagcaaagatgaacagcctacagagatagttgattgtggcactcgcatttttcaagaggcgttggacgcgaaaacaaaagtatctaaaaatcaggcgcgaagaactgcaagggcgatgcgcaggcaagttgcgagacataagatgcgcagaaatgcggcattaaggtatttgacaaataataatcttttgccggccgatcaggtcgaactaaaaaaaattttaaccgacaataaaagatttgatccttatcagcttaggaagaaagcgttagatgaaaaacttcaactgtgtgaaattggccgcataatatatcatcttgcccagaggcggggtttccaaagcaatagaaaggtttcatcccctgatgacggcattataataaaatccattagcgaactaaaaaaagaaattgaaaattccaacagtcgaacgttaggcgaatatcttgctaatcagcaaaaaaaaagggggctttatacggatagggatatgtataaagaagaatttgaaaagatatgggaaaaccagcaaaattattatccggatgttcttacccccgcctataaagttatacttcataaattaatattttttcagcgtccattaaaattgcaaaaatatttaatcggcaaatgctcattcgagccctcaagaaagcgggtttccaaagccctgcttgaatatcaacgctttagaattcttcaagatataaataatcttaaaatcaaagacacgaaaacccgcgattaccgttctcttgatagcgatgagtataaaaaacttatagatgttttagaaaggcaaaaaaccataagctggaataaagcgcgaactattttaggccttcatggcggggaaatatttaaccttgaggagggcggaaaaagagaacttattggaaaccgaacagcttatgccgttcgttctaaaataggagataaatgggatggtttgccggagaaagaacaaaaagaacttataaccgatattcttacaattaatgacgaaaatggacttttaaatcgtatgaaacaacattggggttttgatgaaaaaactgccgaagctatcgcaaaaatagaacttgaatccggatatgcgagtttatctttgaaagccataaataaaatacttccttatcttggaaaaagtatgcgttatgatgaagcatgtattaaagccggttataaccatagcaatatcgataacgcaaaaaaaatcgttgacgaacttaaagagcctccatatttacgtaacccattagtacaaaaagctctgtatgaagttagaaaagttgtaaatgctatcattaggaaacatggaaagccttctcgtattacgatagaaatggcccgtaaaatgaaactttcaaaaaaacaaaaagaaaaattatctttgaacatgagagatagggaaaagaaaaataattcaataaaagcaattttgcaaaatgattttggaattcaaaatccttataaggaggatatacagaagtatcaattatgggaagaatgcggagctgtgtgtccatatacaggggatagcatttcacgggaaatgctcttttcgcaagaagtcgatattgagcatatattgccttatagcaagtcgcttgatgattcctattggaacaaaacactttgcatagcaaaagagaaccgccaaataaaacacaataaatctccttatgaggcttattctgccgactcgaagaaatatgaggaaatattaaaaagagtagaaaaattgccatggaataaaagaaaaaaatttgaacaaaaaaatatcgataccgataaatttatagaacggcaactaaacgatacacgctatatctcaacagaggtaaagaaatatttatttcaattaggtactcctgtaaatgtaactaaaggagaagcgacatctgtgcttcgtcatcgctggaaactaaatatgatactcagcgtggacggcaataaaaaaaatcgagaagatcataggcatcatactattgatgcaatagtcattgcattaacatcaagaagcttgtttcaaaaactttctaaactttctgcagaaagtggtaaatcgttaagcgaacacgggtttaatatagacgccccttggcattcattttataaagatgttgatgaaaaaattcaaaatattatagtttcgcattctcccactcggaaaataacgggtgcatttcatgaagaaaccgcatacggatataacgagaaagaagattattttgtatatcggaagccgctttccggaatcacaaaagcacaagttgaaaaaataattgataaaaaagttagacaattagtagaggagcggattaacaattttaatggcgattttaaaaaggcgttaagcaatagtagtgatcctttatttcacgttgatggaaaaactaatattaggtcagtgcgaatagcttctaattttaataggaattcggtatatggaatacgtgataatgccgaaggggagtataaattttataaatacggcaataaccaccatgttgagattatagaggatatgcaaacaaaaaaaagaaagggtatttttgttaccgcaatggaggctgcaagaagagcaagaattgataaaacaagtattgttaatcgtaatcatggggataaatataaatttatagcctctttagctataaatgatttagtcgaaatcgatatgcaggatgaaaaacgttattatagagtgcaaatgcttgacggctcaaatcaacgaataaccctccgtttacataccgcggcaactttggatgataaaaagacaatgctggtaggttcagctaatagattgttgtttaaaaaaattatggttgatacattaggatgcattacttattgcaatgattaagagaattatagaagtgggtaatgctgcccatctggcattaaagaataatcagttggttgtaagacgcaatggatttgaaccggaaaccattccagtagaggatttaggcgtcttaatcttagaccatcctgctattagttacacgcaagcgcttttgaccgcatgttccgacaataatgttgcggtcttgatatgcaatgagaaacacttgcctaatgctatttgtttgcctctcaccggaaatagtttgcatactaagatattaaacaggcaaattcaaattgccgaacctgtcaggaaacgtttatggcaagagattatcagagcaaaaattttggggcaggcaaaagttttggataaagtcataaacgaagatcatcttttaaatatatatgccgaaaaggttaaaagcggcgattccgaaaatatggaggctcaggcatctaggatttattggccaaaattatttggaggtaattttcggcgaaatcctgatgaatccggtattaatactttgcttaactacggttattctataattcgtgcagccgtggcaagagcaattgttggagcaggccttcatccttccttgggcattcatcatcataatcaatataataatttctgtctcgccgatgatctgatggaacctatccgaccggcggttgatatcaaagtatttgaattattaaaattatcgtcggatgagttaaaattaacatccggcaataaacttattatcttaaatattttaaataatagttgttgtataggtggcactaatttaccgttaatgtcatcactgcattattactctgcaagcattaaaagggtattatgcggggaagacaagaaaccggagatcccttcgatatgagttttggagggtatcgtagtatgtggataattacgatgtttgatctgccgacagacactaaagaggcgcggaaatcctatagcgattttcgtagatttttactggatgacggttttattatgatgcaattctcggtttatggaagacattgttcaagtgaagaaaatgctgttgttcatgaaaaacgggtaaaattatccctacctgacgatggtgaagtgcggatattaataataacggataaacaattcgaaaggatgaaaattttctttggaaaaatacgaaaacctacagaaaaatcacccgaacaaatcagttttttctgatctgcttcgggtgatttaccaataaatacaacttgttaccaaagttgcattataccaaacaaatgcctgaccgcaaatcacaacactatctcggaaattgaaaataaagccgcattataccaaacaaatgcctgaccgcaaatcacaacggaaatgttgtaagaacgcttttcagatatattataccaaacaaatgcctgaccgcaaatcacaacgatgatttttgttgtaaacttctgatttttattataccaaacaaatgcctgaccgcaaatcacaacggtaagtattctggcaatatatgattctaattataccaaacaaatgcctgaccgcaaatcacaacgatgacaaaatgtttaaaaagataattaaaattataccaaacaaatgcctgaccgcaaatcacaacttaggtctcgtagtgttatattttcttttattataccaaacaaatgcctgaccgcaaatcacaactgtattctttactggcttcttcttttttgaattataccaaacaaatgcctgaccgcaaatcacaacagtttttgcgaacagaattttttaatatcaattataccaaacaaatgcctgaccgcaaatcacaactgttctttctcatcataagttttacattcattataccaaacaaatgcctgaccgcaaatcacaacacattcgctttacgagtctggcgtttaaaaattataccaaacaaatgcctgaccgcaaatcacaactcagttcgttaggttctgcatttacaaacgattataccaaacaaatgcctgaccgcaaatcacaaccggggcgaggaggctttaaatggaaattaaattataccaaacaaatgcctgaccgcaaatcacaactgatcatagttgatacaattaatatttacttatatccagccacaactccgagaacgcaggtattaaaaagatttgccttaattgaattataatacgataaagacatcatattatgagattctacatagttttttaagatagaaacgacatggctgcacctttcattgcttaccattccggtatgatattttgtgcgcaatttaccccagttgtaacctaaatcgtaagatgctttatataaatattttaccgtattttcttgcttattcgaaatatttcccgcataagccttcgccgaaaaaataaataccaaagaaagaacgattaagaaaaaaattgattttctcataatacctctgtataacttatagtttaattataccaaacaaatgcctgaccgcaaatcacaacgaaattatccaaagttttttctgtagttaatggcttccgaaagcgtgtctttatcgacatattcaaggtcggagcctatcggtattccccttgccagagcggttatatggacattgtaaggggataatattttttgaatataaaccatggtggcttcgccgttagaattggggtttaatgcaaggattatttcctcgaagccgccctgctccaccctgagcgcaagttctttaagttttatatccgaaggggttattccctccaaaggatttattaagccgtggaggacatgataaaagccgttaaagttgccgcttttttcgaatacatatattatttcaggattttccacgacgcataataatttagagttccttgaggtatttttgcatatagggcaaaaatcttctccgctcagattaaaacaatttttgcaaagtttgatattttgttttgcatcttttattgcatttgcaaggctatatgctaccgattcattttgggataatatgtaaaatgcaagccttcttgcggatctttcgcctattccgggaagttttttaaaggcggacacaatatctctaatataatcggattgattaatcgacataagtcttggatataatttagataaaaattgtttttttaatttattaaaaaaggccgggtaaattaagtccgcccgttaatttggacatttcattcgtaaccatatcttttgatttatttagggcttcgttaatagaggcgactataaggtcttgaagcatttcggcatcgtcgggattaataacggctttatctatcgttatggatataagttcctgttttccgttcacttttgccgtaaccataccgccgccggaactggattcgacaattttagaaccgagttcttcctgcattttaagcatatccgattgaaacttttgagcctgctttaacattcctgccatatttttggacattttaacattcctccggatttctatttgcgtttatattatattattctataattttttttaaaaaataacaaggaggtttcacttttttaggttactttttagtcttatctatcctttcgatatctttcccgaaaatgtcttttatgctttccatgattatgctttcttcgggtttttcagcttcgtcggctttaatgccgtcatctattaaagcgttagtttcctgcttaccattttcttgagctaatttttcatcgattttatcgaagtgggcaaagaattcgtctgatcccccgtgcgtattattaccgtcattcggcgctgttttaacttgtctgtccgtttgcgcatttgcgggagcggcgattttcggcagcggctgacgaagtgcaaaggatgagtcaaatgcgggcggaggcggtgtcagagtctcatcgtttaaattaaacttgccggttttatcctctatttttggattttctgcctgatttgttttaagcgatataaatttatcgattttatttatgagttccgttacattatgtttcgatggaatatttataagcctgaaaagagtaagttcaagcattaatgaaggggaagagattttttgatatttggcgtccgagttgagtaatatatctatcatgtctagaagttcctcctggtgtttttgtccggcaaggggaattaaagcatttatttcttcatccgtcatatcgttaatcatatctttatattttaattttattattaaaatatttctgatgtagaatgcaagctgttttataaactgccttatatctgccccggagtcgtgtatttcttttgccagcctgatggaagcttcataatccttcttaaaaattgcgccgataagatcaacgattgctgctttaacggttaatccaagaacgggcgatatatcttcttttatatcctttccgaagtacgatataatagtgtcaaaggttgtgagagagtccctaacggatccgtcggccaaagaggccataatcattaagttttcatcggtaacggaaatgtcttccgcagccgcaatctcttttaatttacggtaaattatatcggtcggtattcttttgaagttaaacctctggcacctcgataaaatagtttcggggactttgtgcaattcggttgttgcaaaaataaatttagcgtgggcgggaggctcttcgagcgtctttaaaagagcattaaaggcgctgttagaaagcatgtgaacctcgtcgatgatgtaaattttatatttaaaactctgcggcagatatattatgttttcttttaaatcccttattgcgtcaacgcccgtattcgatgccccgtcgatttctatgacatctaccgaactgccgttttggatctggacgcaggcggaacaaacgccgcacggatttatcgtagggccgttttcgcagttaatcgattttgcaagtattcttgcgatagatgttttgccgacccctctcgtacccgaaaatatgtaggcatgggcaatcctgtcgtggataacggcatttttaagcgtttggacaatgctatcctgtcccgctatttcatcgaaaatttttggcctgtattttctggcaagcacctgatacatattttataattataacatataataatacaagttttgcatccaaatcccgatttagaaatttattttctggattcccgctttcgcgggaatgacacccaaagggtgaaactttaaatcactgcattgtcattcccgcgaaagcgggaatccagaattacttaatattggaatatcttaaatattttctaaatcgggatttgggttgcaagttatgattgatttttataaaaaaaattgctaaacttaataatctatgcaaaaatccgaagaaaattttaataatttcaaagattttccgaaaaattacgactatcaggcggtcgaaaaaaagatagcgcagtattgggaagataacgatacatatagttttgatttctttgataccgaaaaggaaattttttcggccgatacgcctccgccttatgtttcatccgcccatctccatgtcgggcatgtaatgagttattcccaggccgagtttatcgtcaggtacaaaagaatgaaagggtttaatgtgttttatccgatgggtttcgacgataacggccttcctactgagcggtatgtcgaaaaaaagtataaaataaacaagtctaagataacgagggaagagtttatagacctttgcttaaaagagacgaagattggcatcgagacatataaagccttatggaaatccgcaggaataagcgtcgattaccggctgtcatactctacgatagatgaaagatgcaggaaaacatcccaaaaatcatttattgatctttaccataagaagctgatggaaagaaggaacgagcctattttatggtgccctcaatgcagaacctcgcttgcacaggcggatattataatagaagaattaaacggtattttgtacgacatagaatttaaatcatcatcgggccagggtcttataatatccacaacccgccccgaattactaggggcatgcgttgcgatttatgccaaccctcttgacgacagatacagatttttaaacgggcaaagcgttaaaacccctctatataataaagatgttccggttaaatatgacgaaaccgtcgatataaattatggaacaggtttgatgatggtttgcacctggggcgatgccgaagatgttagaaaatggaaggagcataaacttgacacggctataattatagataaagcgggaagattaaacgaggcggccggggcttatagcggattaaccgcaagggatgcaaaaagagcaatagtagatgacctcaagaaattatcgtttataaaaggggaaaaaccgcttttgcataatgtcggcgttcatgacaggtgtgaaactcccgtcgaatttattcgcgagctccaatggtttataaaaattttagataataaagataaattcttagaggctgcaagtgaaataaagtggtaccccgattttatgaaaccgagatacgacgaatgggttaataatttaaaatgggactggaatatatcgaggcaaagattttacggcgtgccttttcctgtctggtattgcgcaaattgcggcgaagtaatccttgcaaaagaggacgaactgcccgtggaccctgccgtagcccatcctaacattattaaatgccctaaatgcgggggagaaaaatttgacccggagacggatgttatggacacatggatgacatcgtcgatgacccccctgattaacgccttatgggcatatgattcccgcaccgccgataaaaaaaaacttttagataggatttacccgatgagcctgcggccgcaggctcaggaaattattcgaacatggttattttataccgtcgtaaaatctatttatcatacgggtaatattccgtttaaaaatgttatgataagcggatggggacttgataaaaacggcaaaaagatgtctaaaagcttaggtaattttgtaggacccgaagaaataataaataaatattcagcggatgccttaaggtactgggcttcaaaggcaaatctggggcaggatttaaggtttaacgaagaagatgccgtgaacggcagaaggcttttaattaaattatggaatgcggcaaggtttttaatcacaaatgtcaacgaaggatttaatccgtatgagaaagacatatcggagcttgaattgggcgaagtcgataaatgggttattacggaattcgaaaacactttaaagatatgcgggaactatatggaatcttacgaatactcctcaagtttaaaggcaatggtcgatttcttttataatgtatattgcgataattatctcgaaattataaaaaatgttttttgggacgaggaagaagaaaattttgacagaaaagataaggctttaaatgttatgtattttgtttcattcaatatgataaaaatatttgctccattttttccgtttattacggaagaattatatctgtcgttttataaaaattttgaaacggccggcagtattcatttgtcaaattggcccgattacagaaaagaacttaacttcgaatcttccataaaaatcgctaaaattttgttgaatattatagaggcttcaagaaaattaagaacaagtttaaatcttcatcaaaatcataagattgacaaacttttagttaaaacgctgaacaacgattatataagcatcttaaacagcgtaaacagcgatataaaatctgccgcacgggcgaaaagaatgatattttccgacgaagcggattttaagaccgcggatgataacctgtttataaagatagaaaaatgaacattgacattttaatattttattaataatatagcatatatttttaaaaattggtttaattcagattaataaaaggagatttatatggcaaatccaaagaaaagacactcaaaatgcagaagggataaaaggagaactcatgacagccttgaggcaactaattattcaaagtgcccgaattgcggggagcccgtgcttccgcatagaatgtgcgctaattgcaaaacatacaggggacgggttataattgcggcaaccgaatcaaaagcctgattacacaaattatataaaagagttaacgggcgttaaaattttacctacgaatggggaaattataaatgattagaatagctctggacggctttggctcagataaggcgccggaacccgaggttttaggggcaatagccgccgtagagtcggatgagggattagagataatactcacaggggatgaggccgcattagagagtgcttttaaaaaacacgggcatatgtcatcaagggttaagataaagcatgcttctgagcggattacaatgaaggattctccgtcttctatcgtaaggaataaaaaaaactcttctttgcgcgttgcttacgaacttgtaaagaataaagaggcggatgtcgttatcagcgcgggtaatagcggggcatcattggctatcgctatgtttgtttttaagcggatcaaggggatagacaggcctgcgatagctaccattatgccggcaatcggcggctataccgttttgatagacgcgggagcgaatgtcgatgtcaaaccccatcatcttgctcaatttgcaataatgggcgccgaatatgccgcttttatgaaggatataaaaaatccgaagataggactattaagcaatggggaagaggaatccaagggcaacgatcttacaagggaggcttataagattataaaaaataccgatttaaatttttacggctatgtcgaaggcagagagatatttaacggaaaagtcgatgtagttgtttgtgacggatttacgggcaatgttattttaaaagcatctgagacgctggccgaaacaatatttaatcttttaagagacgaagtggacaaaagccttatggcgaaattagggttttttcttgctaaaaaatcattaaaaaattttaaaaaacttgttgaccacaacgaatacggcggggcgccgcttctcggggttaacggagcggcatttatcgcccacggcggggcaagcccaaaagcaatcgctagcgccattttcgttgccaagcactttgtcgaaaaagggataactttaaatatcagccataaaatcgaagccaatgccgaaagcggttatttatcctaataaaatataaatttttgatagcgaaggtttaaaaaattgatatattcacagattacaggaatcggttcgtatgttccggaaaaagtgcttaccaatgaagaactttgcagtattgtcgatacatcggacgagtggattacctcaaggaccggcattaaagaaagacggatcgccgaagccggcttaacgacatcggatatagccgccaatgccgcaaggcgggcaattaagcgctcgggggtgagcccgatggacatagagcttatcatagtcggaacaattacgccggatatgatatttccgtccaccgcctgcatcgttcaagaaaaattagggctgaaaaatgcggctgcttttgatgtaagcgcagggtgcagcggctttatctattctttatccattgcagacagctttattaaatcgggcagatataaaaatgcattagttatcggcgccgatttactttcgagaattaccgattataccgacaggtcaacctgcgtattattcggcgatggaggaggggcggcggtgttatccgcaaataccgaaaatacaaggggtatcttatcgacccacatacattcggagggagggcacgataatatacttaaacttcccgcaggaggctctttaatgcccgcaaccgctcagacggtaaataatcttgaccattatataaaaatgaagggttccgagctttttaaatatgcggtaaaatatctcaaagatgttgccgaagaggccattaaatttaacggccttaagccggaagatatcgatttgtttgttccccatca

SEQ ID NO: 3523 - DNA, 14268 bp, synthetic construct
  source 1..14268: mol_type = other DNA
  misc_feature 1..14268: note = Synthetic
ataggccactccgaaggatagcgcctgcagccagtgaaaaacccgcgtgggtacgtcccatactaaaatgcgtcggaccatgatgcgacttccttatctgggtatttttacattgtcttcgctgaaatcaccgctgtccgccgtggtatggcaggccccgcaattggcgcggctcttgaccctggggtctttccagtggcgcgccgccacttcgctgtgctcggacttgaaccggcgggtttcggtgatgcgcagcaacggcttgtccgataatttatgtttcccggtatcggcatttttttccagaaatgctgttatctcatcggcggatgctgcatccagactcgcatcgctgccgaaatgcctggccagccccgacatgatagcgcgccaggattcggcaggaagcaggccgggcggataggcgacgtggcaggcgccgcattcgcttttccatgtggcattgttgacgttgaatttgtagtcgtcatcatcgtcatcggcgtaggcaacagacgttgcggccgccatcaacagcattgcaacagagaatatccgggcgaaattcgtaaaatcgagcgccaaggcgttcccctagtttttgggtacggtgagcaggtaagcgagcacgtctcccttttcctggggagtgcattcccgatccagcacatcattgcagttgcgcttgaaccacttcgccacttttttcatgtcggtgaatctttccggattggcggccggggcaagcggcttgatgagcttgtcggtctcggcatgcttgccctgcgcggcgggattatcggtatggcacgaggaacaactcaaatcgtggctgtgtttggtcttgaagaaactttctccgtgtgtcgccgagaacccctgaaaacccggcgtggccgatgcctccgtttttagagccgccagcacttcgaccggggtttcagcgtacgccggattcaccaacagcccggcagccgtaatgaccaaaccaaatacagaaattgcgcgcagcatccatgtctcctcgaaaatcgaagtgacgttgagtagcttgtgaatgggaagttcagcatcaaatataaacttatcgcgcacacaatcaagcagatttgtgctaagccctgaacagccccgcccggcaccccgtgtgccaagcatagccatcctctcggcaatttcaagcccgtatttgcacgggaaaggcttaaagccgcttgagcatcacaatgccaatggtagaatccacccccatatgctcaacgaccgtgcacaaatcctgctcaggaccctggtggagcgctatatcagcgaaggccagccggtcggatcgcgcgcgctgctccagtattccggcctggagctcagcccggcaaccatccgcaacgtgatgtccgagctggaagaaatcggcctggtcagcagcccgcacacttccgcgggccgcattccgacccgcatggcataccgtttgttcatcgacacgatgctggtcatcaagccgctggacaacgcgcgcgtgcagcagatggaacacaagctgcagccggacaacccgtctcggctgatcgcccaggcatccaacctgctttccgaactgacccacttcgccggcgtggtcgccacggggaaacgcagcgcaattacggtgcgccagatcgaattcctgcgcctgggtgaaaagcgcgtgctgctgatcatcgtgatgccggacggcgaggtggaaaaccgcgtgctgttgctggagcgcgactacacccaatcgcaactcaccgaggcgggcaatttcctcaaccagaactacatcggctgcagcttctcgcagatacgcgaccggctgcgcggcgagctgcagcaactgcaccaggacatgagcgcactgatggcagcggcactggccgccggcgatgcggctgaagcgaaacaatcgggggactatgtcatcagcggcgagcacaacctgctgcatgtggccgacctgtccaccgacatgaaccgcctgcgcggcctgttcaacctgttcgagaaaaaaaccgaactgctgcaactgctggatgccgggggccgcgggcagggcatccacatcttcgtcggcagcgaatccggactggcctcgctggacgaatgcagcgtggtcaccgcgccctactccgccaacggaaaagtcgtgggcacactcgccgtggtcggcccgaagcgcatggactacgagcgcgtgatccctatcgtcgacatcaccgcgcgcctgctcggcaatgcgctttcgcagaactaaagctgacaaaatctactcctgaggatattcatgaactaccagactgagcccgcattcgcgcacggcactcctgtcaagaccggcattctgctgatcaatttaggcacgcccgatgcgccgactgcacaggccgtgcgcccttacctgaaggaattcctcagcgacccgcgcgtgatcgaaatcccccgggcgatctggtggctgatcctgaacggcatcatcctcaacacccgcccgaaaaaatccgccgcaaaatacgccacggtgtggtcgccggagggttcgccattgcgcgtgcataccgcaaagcagactacactgctgcaaggttatctgggccagcgcatcaggtcgcctttcgtcgtggactatgcgatgcgctacggcagcccctcgatcgccagcgtgctgggcaaactcagggaacagaactgccagcgcatcctggtcgtgcccatgtacccgcaatatgccgccagcagcagcggcacagcggttgacggcgtgctgcgtgaattgctgcaaatgcgcaacatgccggcgctgcgcaccatcaagaatttccacgatcatcccggctacatcaagtcgctggcgaacaacatcagcgaatactggatgaagaacggccgcccggaaaaactggtgatgagcttccacggcctgccgcaattctcgctggacaagggcgacccctaccactgcgaatgccacaagaccgggcgcctgctggcgcaggaactcggactgcaagccgggcaatacctggtcagcttccagtcgcgcttcggcagggccgagtggctcaagccctacaccaccgcgacgctcaaggaactgggcaagcaaaagaccaaacgcgtcgacgtggtctgccccggcttcgtcgccgactgcctggaaacactggaagagatcgcgatggaaggcaaggaagatttccagcacgcgggcggcggcgaataccactacatcccctgcctcaacgaacgcaacgactggatgcacgcactgaccgacctggtgatggacaatctgcacggctggctgattgaaccgaatgcggcagaactggagcaaggcaggctgagggcgctggagatgggagcaaagaaataaaaggcaggttgggttgagcataacgatacccaatattcaaaaacaacttcaacaccgccgggctacccccggcggtgttgattttgaggatttatttacaataaccatgtacgcccccaaacatttcgaagaaccccgtatcgatgtcatgcacgagctgatgcgtgcgcggccgctggcgactctggtcacgctgacttccggcgggctcaatgcaaatcacattccgatgcacctgtcggatgcgcctgcaccgttcggcaccctgcgcggccatgttgcgcgcgcgaatccgctgtggagcgattacgcaaaggacgttgaggtgctggcgatattccacggcccggacagctatatcacaccgagctggtatgccaccaagcaggagaccggcaaggtcgtgcccacctggaattacgccgtcgttcatgcctatggcactttgcgtatcatcgatgatcccgtatggatacgcgcccagctcgaagcgctcaccgcacacaacgaagcgggctttgcccacccctggtcagtagcggacgcgccgcacgattacaccgaaaaactgatcgggaccattgtcggattcgagatcgtcatcaccaggctgacgggcaaatggaaagtgagccagaaccagcctgcgcaaaatcaggcgggcgtcatcgagggactaaacaacagcggactccccgatgcaaaagagatggcggcgctggttgcagcgagcatgaagaatgcccgctaagaaatcgtccctgccgactgtggaaaatcctgtcggtgtgttcgattccggcgtcggcggattgtcggtgctgcgcgagatccgccgcgagttgccgggcgaacatctgctgtatgtggccgattcagcccatgcgccgtatggcgacaaacccgccgagttgatcgaggcgagggcgatcgcgatcatcgagttcctggtcagccagcgcgtcaaggctatcgtcgtggcctgcaacacggcaaccggggtggcgattcaaatgctgcgcgcaaaattttcgctgccgataattgcgatggagccggcggtcaaaccggcagtgacacacaccaaatccggggtgatagctgtactggccaccagccggacaatcgccagcgacaacttcgcaaaactgcacgaacgcttcggcgccaatgtgaaaatcctgatgcaggcgtgccccggcctggtcgaacaagtggaagccggcgacctgtccggtaaaaaaacccgctcattgatcgagcaatatatagccccgttgctggcgcagggtgccgacaccctcgtgcttgggtgcactcactatcccttcctcgctgccttgatccgggagatcgcagggcctgaggtcgccatcatcgacccgtccgccgcgattgctcgcgagctgcgccgccgcctggaaagcaccggcctgctgtcaaccggaacccatactggtacggagcaattctggagcagcgcccagtcggacaccacccgcgcggtgatctcacaattatggcaggccgatgttgacctgctgtatttgccgcatgttccggccataccgtcggactgaaactgccagccgctgttttccctaaatcttctagccggccgccggatcaccagtattctgcgccacggaaccccataccccggtgtgtccgtcacgcataaatatgccttgaatttttagttttcaggaccatattggatcaagccagcagtggtttttggaatactggtcagtctttaccaattcaacttttattatggagggttatcatgaacttggttaaatgggatccattcctggagttggaggatgtttccaaacacttgaatcgaatcttcggacgtactccggcgcgcatcgagccggatcgcgagttattgaccatggccgactggacgcccagcatcgacatcaccgaaaccgacatggcatacatgatcaagggtgaaatccccggcgtgagcagggaaaatgtcaaagtcacgatagaagacggcatgatcgcgataagcggcgagcgcaagcaggagaaagaagagaaggacaagaagttccaccgcatcgagcgctcctacggcagcttcatgcgcagcttccggttgccggacaatgtcgatgaatccgcggtcaaagccgaattcaaggacggcatgatcaacgtcacgctgccgaaatccggcaagaccaaagccaaattgatcaatgttgcggtaagctgaaaaccagcccaaaccagcggccccgcatttctgagtctgagcgtaagtgaaatacggggatccgcagttacagggcaatgggagccgctaaccccagacgtgccgccaaggaacgccaatggccgaagtgaacaatttatttgcgttatttgcgacgtgtcgtgacttcgttaatcgtcgctatggcgggttgacaacccttctgccggttcccccgtttccgggtctatccaagtagagatgccgatttcatcttccgcgtcttccagcgactcgccctcttcaaagccgctgtcgttctggctttccatgtcctgaacggcttccaccctggtcgggaaaggaccgtacattttttcggtcagcatatcctgccagtaaaagccatccggccgttcaagcacccgcgcctgatcgttgtcggctgagccaggtacaactggtgtatgagtggtcattggttacctccaactgttgcctgccattcggttgccgttaaccagcgactgggttggcgtagtgtgccaatccagtcagacggcgatgcaaagcctttggcgcccgaacagaatggctaaaaatttaatcagcgccggcatacaggcaagcttgttatacgctctttcaaagcttgatgaaatgttcacggtaatgtttcatctcgctgatcgattcgtagatgtcggccagggcctggtgtttgccgtgctttttaaccccctgcgccatgtccggcttccagcgcttggccagctccttgagcgtgctgacgtcgagattgcggtaatgaaaataatcttcaagcttgggcatccagcgcgccaggaagcgtctgtcctggcagatcgagttgccgcacatcggcgaggtgcgcaccggcacatattccttgagaaattcgatcatctgttcctcgaccgtcgcctcatccagcgtggatgcctttaccttttcgatcaggccggatttggcgtgggtggatttgttccatgcatccatgccatccagcacgctgtccggctgatgcagcaccagcaccggcgcttcggcgatcgtttccagattattgtcggtgatcaccagcgcaatttcaatcacccggtctgtgtccgggaccagcccggtcatctccatgtctatccagataaggtagttttggttttgtgccataattcgcgcatccgacaattgaacagtaaggcgtatattgtgtcacaaccgcgcctgttacaaacactgaatatgactccgccatgactgccacgcaattcacatttatttttatcgccgccctggctctgacgacactggccaagctgtggctggcacgacgccatttggcccacattgcagcacaccgaaccgcagtgccggaagcgttccatgaaaaagtccggctgggcgatcatcaaaaggcagccgactacacgtctgccaaaacgcgcttcgacatgctgggagcgctgtttgatgcggccctgctgctggcgtttaccgtggcgggaggcattcaatacattgccggaatggtttcctccagaccggacggctggttcggcacgccgatcatgcagggcatggccaccctcgttgcagtgctggtgatttattccttgctggaagcgccattcaatatttatcgcactttcgtcatcgaagcgcgcttcggcttcaacaagataaccttcaagctgtacctgctggacgcactgaaaggcatattgataggtgctgtcctcggcctgccattgctgttcggcgtgttgtggctgatggagcgcatgggaagttactggtggctgtatgtgtggctggtgtgggtggtgttcaatctgctgatcctgtttatctatccctcattcatcgccccgctgttcaacaaattctcgccactgcaggacgaagcgatgaaatcgcgcatcgaagccctgctgaccaagtgcggctttaccgcacaaggcctgttcgtgatggacggctccaagcgcagctcgcacggcaatgcctacttcaccggcttcggcaaaaccaagcggattgtttttttcgacaccctgctggaacgcttgagcatcaatgaagtcgaggcggtgctggcgcacgaactcggccacttcaaacgccgccatgtggtgaagcgcatagccgcaacctttgcgctgagtctgggattcctgtggctgctcggcctgctgatgcaaaccacctggttctatcaaggcctgggcgtcagtacaccatcgaccgcactcgcgttgctgctgttcttcatggtgctgccggtattcagcttcctgctgagcccgatcatgtcggcctattcgcgcaagcatgagttcgaagcggatgcctatgccgccgggcagaccgatgccgccgacctggtcaacgcgctggtcaaactttaccaggacaacgcggcgacgctgacgccggacccgctgtattcgaagttttacgacacgcatccgccggccatggtgcgcatctctcacctgcaagccctgcaagcctgatcaagagggagcttttatgaagtcggcactgaaactgatcgctgctctggtttgcgtggcgattaacctgccgggcactgcagcagccgcatcggcccggcccgttacgaaaggcaatgcatgacatgaaatccacaagcgatctaaccagcaggcgatgcaagccctgcgcacccggcacccccccgttatccaactccgaagcggacagtttgatgaaccaactcgagggttggcaacgttacgatcacctcatcaacaggacctaccgcttcaagaattactacgagaccatcgcgttcgtcaatgcggtcgcatggctatcgcacagcgaggaccatcacccggagctggccgtttcctataacaaatgccaggttgaatacagcacccattcgattcacggcctgtccgaaaacgacttcatctgcgctgcaaaagtaaacgcgctgttcaagatttgaaaacaccaatctgccacagagtacacagagatcacagagaaaatgtgcactactgtttctctctctgtgtcctctgtgatctctgtggcttgaattgtggtttttagcttgaatccaaccatcaaaggtcaaatcgttgccgcattcggccgccagtatctggttcgccttgccgacggcagcgagatagcctgtttgacgcgcgggaaaaaaagcgaggtggcgtgcggcgatctggtggaaatccagcgcacagcagacgcatcgacagaaaacggaaccggtgcgcaaggagtgatcgaacgcatctcgccgcgccgttcgcttctgcatcgctccgttgccttccgcgaaaaactcatcgcggccaacgtcacgcaaatcatcgtggtggtcgcagcggagccctctttcagcgacgagttgctggcacgttgcctggtcgcggctttcgatcaaaagctcgaagtgctgatcgtgctgaacaaatgcgacctgcctgccgccgcagacgccgcccgcaaacggctctccacctataccgccatcggctaccgcgtgctggaactcagtgccaaaaatcctaccagcccctccacgctagaaaatacggaacaacctgcccctcgtaaactggagggacgattgcctcctccccctgccaaggaaaagattgcgggggtggtggagggggtggactcgctgcgcccgctcctgcacggccacaccagcgtgctggtcggacaatccggcatgggtaaatccacgctgatcaatgcgctactgccggacgcacaagccgccacgcgcgaaatttccaccgtgctggattccggcaagcacaccaccacccatgcacgtctatatcgtatcgatgagtccagtggcctgatcgactgccccggcgtgcaagccttcggcctgcatcacctgagctttggcggaatagaacagggttttgtggaatttgcgcaatatctggggcaatgccgcttccgcgactgccgccacgcgcatgaaccgggctgcgcattacgcaacgctgttgcggagggaaagatagccgcgcgcagattggaactgttccggcagatcgccggaaagtaaaaagcccctcgcttgcgcgagaggctcatggtttaccccttggggttatcctgcgaagattctcactgagagtttcctcttattgtgaaaagcaaggcgggcatcggtcagttacaatacgggacgaagtatagttggctgcgctacaaattacaacaaatgtgaatcaagcacatatcagcagcccttcctgaactaggaagatcgaggagagttaaaggttagggagcgtcaagatcgcaccttggattttgcttgctcaactgtcattcacaaagggggcatgatgggcaatttcactttaggactggatttaggcaccaactcaatcggctgggcactgattgatttcgacgataaccagcagccccaaaatctcattgcctgcggttctcgcatttttcaggaagcagtcgaggcaaaaaccggcacaccgaaaaatcatgcccgccgcgctgcgcgagcagcccgcaagctagtggcgcggcgcaagcagcggcgcaccaaactgcttaacctccttgtttgtcatgacctgttgccgcaggatgaagcggaacgcaacgcattgctgctggacaatcaagccaacaatccctaccaattgcgcaagcgcgggctggatgaaaaactggaaccgttcgcctttggccgcgcgctttaccacctcgcccaccggcgcggattccagagtaaccgcaaggccgcatcggatgaggatggcaaagtcaaaactgccatctcggctttgcgcgccgaaatgcaaggccatactctcggcgcatttttggccgatcaacccacccagcgcagacgctataccgaccgcgccatgtacgcggaagaattcgagcaactgtggagcaagcagacaatcttcgcacctgagcaactgacgcaggcgctcaaggttgaaatcaaaaacagcattttctttcagcgcccgctcaagtcgcaaaaacatctggtcggtaaatgtacttttgaacctacgcgcaagcgtgccgccaaagccatcttgctggcgcaacactttcgtattctgcaagacgtgaaccatctcgccgtgaagaatcccatcacgcgcgaattccgccctctcacacaggatgagcgcaacaaactcgccgaagcgctcgacaaacaaaaaggcatgaattggagcgcggtacgcaaagttattggctggaacaagaaagacagcctgcacgaaggcgaaaccttcaatctggaggaaggcaaaaaagacaaactgatcggcaaccgcaccgcctgcgatctgcgcggcgcgctgggtgatcgctgggatgcgttcaccgcaccgcagcaagatgacttggtgaccgacctgctcaccattgataaccccgatggttttctcaaacgcatgaaaacccattggggctttgacgatgcaacagccgaagctctcgccaccacagaactggaacccggctatgcgcggctatcctccaaagcaatgcgcgccattttgccgcatctcgaacaaggcatgatctacagcgacgcctgcaaagcggccggctacgaccacagcaacccgaaccagagaaccattaccgacaagctcggcctgccctccaacgtgcgcaacccggtggtgcagaaggcactgttcgagacgcgcaaggtggtcaacgccatcgtgcgcaagtatggcaagccagccgtcattcgcgtggaaatggcgcgcgacatgaaactctccaaacgccagaaggaagaattgcaaaaggagcagaacaaacagaagaaggccaacgagcttgccgaaggaatcctgcgcaaagaattcggcattcagcaacccgcccgcaccgacatccagaaatacaacctatggctggagtgcaaggaagtctgcccctataccggcacggtcatctcgcgcgaaatgctctattcgccggaagtggatgtcgagcacatcctgccatacagccgttcgctggatgactcgtacatgaataagacgctgtgcatggcaacctataaccgccaaacaaagctcaacaacacgccttatgaaataggccaaggcgatccggtagcttatgcggaaatttttcagcgcatcaaaacgctccccttccccaagcgccgccgcttcgagcaaaaggaaatcgaaacggataaattcatcgaacgacaattgaacgacacgcgctacatctgcgttgaggtgcgggacttcctgcaacaactcggcgcacccgtggaagtcagcaagggcgaagccaccgcgaaattgcgtggccgctggaagctgaataccctcctctctcccggcggtggtaacgaaaaaaaccgcgctgaccaccgccaccacgcgatagatgccgtggtcatcgcgctgaccaaccgcagcctgttccacaaactgtcgcgcctgtccgcgcaaagcatatcgttcgacaaaagccgcttcgacgtgccgccgccgtgggatgatttctacgacgatgtgtacgaaaaaatagacaaggtgatcgtctctcacgcccctacgcgcaagattagcggcgcgctgcatgaagccacggcatatggccatttcaaagaagagattgccgatcctaaaacggggaaattcagcatcgaagatcgttttgtttatcgcaagccgctaactacactcactgcaaatgaagtcggcaaaatacgcgatgccaaagtacgcgagctggtagaagcacgattggcacagttcggcaataacagcaaagctgccttcggtgacccaaacgaaccgctgctacacgcagatggcaaaacgcctatccgcacgataagacttactaccaatttcaacaagaccactacccacgcaattcaaaaaggccaagaccgcgattacaaatttttcaaatacggcaacaaccatcacgtcgaaattatcgagcatgttgaaactggcaaacgcaaaggcattttcgttacggcaatggaggcggcacggcgggcgcgcggcgtagccaacaccgagaagagcaacatcgttcagcgcaatcatggtgacgggtggaaattcgtgatgtcgttggcagtcaatgacatggtacgcactgaagatacccaggcaatctatcgagtacaaaaactggatggatcgaacaaccgattcaccttgcgctcacataacgcggcaacgctggatgataagcaaacaggagttgataaaacaccgaacctgtttaagggaacaaagataatcgttgacccactaggcaacctcacccaatgcaatgattaagcgcatcgtcgaaatcagcaatcccacctacctacatctgcgcaaccggcagatggtgattgagcgcgagggcgtggaagctggcagcgttccggtgggggacttgggtgtgctgatcctcgaccatcccggcatcacccacacgcaagccctgctcacggcctgctttgagaacaacgtggtggtgctgatatgcgacagcaagcatctgccgagcgccattctgctgccgctggacgggcacacgctgcacagcaagacattggggcagcagattgccgcgaccgaacccacctgcaaacggctgtggcagcacgtcgtgcaagccaagatacgcgaacaggcgaaggtgctgcattccgcgaccggcaatgacaatccgttgcgcgcctacgcggcaaaagtgaaaagtggtgacccggaaaatatcgaggcgcaggcggcacgtatttactggcagcgtctgttcggcccggagttccgccgcaaccctgatacacccggcatcaacgctatgctcaactacggctacgcggtgatgcgcggtgcggtagcgcgcgcggtggtgggcgcggggctgcatccggcgctgggtgtgcatcaccgcaaccagtacaacagcttcgcactggcggacgacttgatggaaccgttgcgcccgctggtggacatcaaggtgtacgaagtgtgcgagctgatgccggatacgcccgaactcacgccggcaaacaaacgctccctgctggaaattctcggctgggattgcagcataggcgaacgcaaatttccgctgatggtcgcgctgcaccaatacgccgccagcgtgcgcaaagtgttggcaggagaagaaaaggaagtggagattccagtgttatgagtttcggaggatttcgcagcatgtggatcatcgccatgtttgacctgcccactgacaccaaggccgcgcgccgcgcctatcacgacttccgcgaatccctgctcaataatggtttcaccatgatgcagttttccgtgtacgggcggcattgtcccagcgaagaaaatgccgatgtccacgagaaccggataaaatcgttcctgccgaatgacggcgaagtgcgcgtgctcaccgtgacggacaaacagttcgagcgcatgaaagttttttacggcaaggtgcgcaaagccacggaggcagcaccagaacaaatcagcttcttttgacgaaaaactttgtatgatcgagaaaattcaaacgcaaaaatgcaaaaccagaacgaaaaagcccgttctggttt

SEQ ID NO: 3524 - DNA, 13581 bp, synthetic construct
  misc_feature 1..13581: note = Synthetic
  source 1..13581: mol_type = other DNA
aacgatctgacagaaccacaccaagagtgccgcgaacgcgatcgaacgagtcatgccagatcgtatggacgtcatcatgctcctctctttccgttcgagcagggctcagggcacctgcagttgtaatgtcgggcggatgtccaccacctttcccagcgactccggcccatagtggggattctctgcaatctcgtggacgctgcggcgaccaagcggggcggtgaagccgaagtccacagcagtcgtgcccttttcagtgaccgtgattttcttctgcaacatggtcccgacccccggatgccaggccatgagggtgtattcaccaggcggcacatcggtcagggtaaagctgccatcttctccggtcagggcgtagtacgggttgtcgacagcaaagccccaactttccatataggcgtggaaaccgcattgcatcacgaacatccgccgtcccttggtcatgcgaatcaattccttgaccggttctcccgccaggtgctcatgactctccgcattgaccaggcgcttatggtgcggattcatgggcaacggagtgttgaacaggacgcggggccccaactgcgacgtctcgtaggcctggatgtcgtgcatgacggggtccatgttcatgaccaccacctcggacccgtccttcaccacggtcacgaagggcagaaaccggcaatcacgggcttcgatggtcagaggttcgaacttgaacggttttcccttcttggcgtcggtcaggaccacaacggcatccttcagcccgctgcgggaattgagcgaaaattcgtcgagaatccgccaacccgtccccgtcgaaatgcgaccgcaatacaccgggtcggggtaggtaatcaggttatatcctttcggggtgggcttccctcccgtcatcgtgacgattccggtgatcgttccgccgtctgaaaccgtgatttcctcataagcccacgatgcagtcccccagacggtaagtgtgcagaacatgacaaggccggccaatcgcatgtcattcctccgataatgtgcaggtgatcaattacgacctgatgggcaactgcgcccgaaatgcattgttttgatcatacacaatcccctgcgcataacaaaaggggggagcctgaaaaggctccccccttcactctcaccgatcgagagtggtcgtcggcttactgcgcagcgacaggaatcgcttgcaccgtcggctgctcgaccgcagcactcttggttccggcaccggtaccggccaagggcagcaaccgcgtatcaccggacggcaacacacggacatagccccactgaccggactgcgagtacggcaaccgctggttgctgtacacatagtcacccgggagacggtagatgccacccgcggacgggatgaacgcatccaacacctcggaaccagagtactccaccacgctgatctggtccgcgccgcgcatgaacggctcgatcggccactcgtgcttctcgacgctgaacatgccgttctgctcgttgctcacacccagtacgtgaatgcgcaccggatcgcctgcatgcgcctcgataatcggggttgcaggatcctcaggcttgtccgccttgcaaggctggaacaccttgccgagcgagcaaccctgctcttcacggtacttgtacggctccgaccgatagttgacgccggtcagacccgccacgttctgcacgtacggcatgaagctcgtgccgatgatgttgtcttcgtcttggaagaacaacgccacgtcacggtagttggcgcgcgtttcattgcccggaatggaccggtcgatgatcacgtccgccgcccatgcattcttcgtggacaggtcggctccggtcttcggatcgcggtacttcgatcccttcggaccgaccacgatggcgccgaacaacccgttccgcggattggtcatgacattgccccaatcccacaccagcgacgtggtttcgccgttgaagggatccgcgtagtaggtgtagtcgcgctcaccgcccggcgccacggcctggtcgccgggattgttccccacgttcgcgcccatggaatccttcggatcgaaggccaggccgatcgcggagaaggacgccttgctgtccttcatcttgttcttcaagtgcaccttgacgcagtcaccggcattcacacgcaacgtcaacggcatcggctgtgcgccgctcgccaccttcgctgtgtcctcctccaaggcatagatcttggcctcgggattgttcgtgagaatcttgcgctcaaagtccacttcgatttcatccggcgccttcgcgttgaacttcataccagggaagtccatggcgacgacgttgaagtgcttcaccggagcatcaccaggacacaccggcaaggccttcggcatttcacccttgttggagaagcccgcgggcagcttcttcagatctgcttgctccttgtcgtacacgcggatgatgccccagccgccctcggaaaacttcgaggaccggccgttgaagtggatgtagtcaccggccaggtgccggctgccacccgcttcgggcaccacaaggtcataacgctccgcaatgccgatatggatcgagttcttccgattggcatccggggcataccgctcggtccagaacgtgtggccggacagcgtccagaccatcgactcgttcatgagcgtgtgcaagagacggaacaccatcgtgtcgccgacataggcacgcagcgtcggcgtatacgggtcgccatggatctggctgttgaagacctgtgacacgtcaggattggtcgccaaccgttgagcgatcggcgccgccctgaagttcaagccgctgcccgtggtgtgggtaccaccgttcaggaacggcatcggcgtcatgtagatcttctccggcatggcaaaggacacggtcttacctgcctcgagcgccacttcgatcggctgcccgggaggattgcccgccgtcacgatgttgacggtatggggcacggtgtcatgcacctgcaccatcaactcacggaagctgttgttcacgccatggcccaccggctcactggtatgaatgtccgcgatcggtccgctccacaccaacttcccggtcttcgggtcatgataggtcgacccgaccggctcggcgatgaaggtcccgaatccaccgtgcggccaggtggtcgcaccgaacgcatggtcatgccagaacacggtgcccacgtccgcatcgacccagaaccgctgccgcacgaactcgacggtcacgatgtcgttgaccgggtgatcgtgcttcaggcccttggccaacgtgatcgtgttcccgttgatggccttgatgcgggaaatttcattgcccttcacgttgtcggcgcccacgaggagcagcgtgccgacatggaactgcttggcattcttcaccgtaatcgtcgtcgcgcccttcttggcggcggcggtgaacacggtgttcatcggaaccggcaaccccttcggattcttcttctccagcatcgtgaacggacgcaccgactgttcataggagaagccggtgatcacgccgtccgacgcctggttgtcgaactgcaggaagtgccagtgcgtgttgatcttcgacgactggaagttggtgtagtcgtcgtcatcccactcgctcgtcaacgtccaatccacgcaatcgtagatgttgccgcggacgaccagcgggtacttcaagtcatcgttcttgcgaatctccgcttcctcttcatggagcacgaagatcaatccgttcggatcgaccaccggcggctccttgcccgtcttcttggcgatcgtgatcgggagcttgatgaagtggacattgtagtttttccgtccggcattggccggacagagactccagttgccgttttcaccgggcaacgcctgatccacgctctcctcgccgttcgcatcccggcggatcatttccaaccagggcgcgccgacatggttcggcgcaaacatcacgcgcttgccgaagtgcggcgtcaagtgcggccacgccacctttccggtcaacggctcgaacgtgatcggatgccgcttgcccgggtgggtggacttgtacttcgggttgtcgatcgtgctctcgggctcgctcatggcgcgggtgccttcccaagcccaatccaacacggtggcatcgtacgaaatgatctgacccttttcgtcgttcttgtggcccggcttgcccatggtgggcaactgcatctccacccaatccttgatggtgatggtggcaggattggacttccaatcgctcttgcccttctcgacgatcttgaaggacttgccgaaccaatcgacggtctggccgaccaacttgtccgacgtgatcggagccttgatgcgccccttccggtccggcaactcgcgcagatccggcatcacatcgttccgcagatcaccctgctgcagggtgttgtacacgcgccagtagccccacatgcccgccacgtaatggtgcgccacgtggcaatggaagaggaagtcaccggccagctgctgacagagaccggaaccgcactccgtctcgaggtccaacgcttccgacggcccgatcacttccacgtccacacggtccgtcttggcgcgaatgaccgggtacttcaccggcccgttggcgctggtcgtccacagattcatgtcgtcgatggcacgtgggctgcgcggccagcggatggtgccgccatgcggatggtggctgtgaaacacttcggatccgccatggaccaggcggaacttcgccgggtcgcccatgtaggagcgcggaatcgtcggggacgggtcaccgaaggtgtacgagctgtaccccatcgactcgtcctcgaagccgaagtattcgtgctgcacgtgcatgttgttgatgccgaacggctcgctgcgatagttgatcgcacggccacccggacgataggcgtccgtcaatggatcgcgctgcggcaggaagtcgcccttcttgttcaccgggcggaaggcttcgtcgccgacttcgtgatagtacagcacgaattcgcggaagtccggaccggtgccgttcttgatgatcacctgccagccgctcgtggccggggtcgcatcgcccgttcccaacggctccagatattcagagccgcgcggttcgaccacgaaggacccgaagagccccatcaccgtgagttcgcggtcgttggcgaaggtatggaactgccgcaccccttcctgcgtgctcgggtggatgtaccactcgaattcgccgctcttgtccttggccacaatgctgtcgggattggtcgtggtggccgacgcgccggtcgcactcaccaccatgctggaaccgtggatgtggaggctgacgtcctcgccgccttctaacttgttggtcagcttgatcttgacgcagtcgccctggttgccgcggatcgtcagcggctggatccactgggcctgcacgccgggaatcaccgcgcccgggtcaaagccttccttctcacgggcgtcccggttcttggtctcttccgcgcgcacctggtcgagattctcgtccagcgtgtacatgtagccgggatagaagtcgagccactgattcagggtgatctcgacgttgatcgccgacacgttgtactgcttcaccggcgccgtggcggggcacttccccaccccgttcagcgacacgggctcgatgcgcggatcggacatcaggagcatgtcctgaccgcccgcgccatactggtgcatcatggtctgggtattgaacatacccgtgttgacttgttgcacctgcgggtcatggctcaggtgctccatgatgcgctgatgctgctgttcgaccatcgcggaccgctcgggcttgccgcccatcgcatcctcgatgatcgtctgccccttcagctgttccgcccacgacgggagttgatgggacatcgccgtctgttgcggcgctgcatgggccgcatgcggctgagattcagccgatgcggccagcggcaggcacaccaacgcaccgccagcaatgacgctgagcgcgcgtgatgtgacacgtgtcaaccaatgacaatccatggaccggcctccttggatagagttgagaaaggaacggatgaaaactgttgtgagcctgttacaggcaggacatagaaaacctcagcacaggtggaacatgttcggacgatgctcctacgtcatggcgtacgtaggctacggccttgaaaaaactcgggcggaagagtactgaagtccagggtctctgtcaacccctttggacaccctttcatcggatcttcatgcatcgttcatgatcagcgtctcagaataatccatcggccacgcgagacgtccgattcgcagcggttcagccccagccgagtgcgcgacggccgccgctccattgtctctgttctgccacttagggcataatcgacccatgatcttgaaacgctggctcgttggcctgcctctcaagacgaagcaagccgcgcatgaacgcctgtccaagcgccttgccctcgccgtcttttcttcggacgccctttcttccgtggcttacgcgacggaggaaatcctcctggtgttgatcctcgccgggacggccatggtgggctactcgattccgctcagcctgtcgatcatcggactgttggccattctcaccatgtcgtaccgccagattatctttgagtatccggagggcggcggagcctacattgtcggaaaatcgaacctgggcgaatggcccggcttggtagccgccgccgcgctcatgatcgactatgtcttaaccgtcgcggtcagcgtggcggcagggatggcggcgattacgtctgccgtgccgtcgcttctcccccatcgggaagcactctgcctggccgccatcctgctcgtgctgatcgtcaacctgcgcggagtccgagaatccgggcaattcttcgccgtgccgacctatgtcttcatcgccgccatcaccgccatgctgggtgtcggcatcctccagattctgctcggatacgccacgcgcaccgaaccaccgccgagcctggccgccgcggaacccctcaccctcttcctcctgttgcgcgccttctcgtccggttgtacggccctcacgggagtcgaggtcatttccaacggcgtctccgccttcaagaaacccgaacccaaaaacgccgcgctcaccatgatcggcatggcggcgatcctcggcaccctcttcatcggtatcagcagcctggcctactattacgggatcgtgccgaaaccggacgagaccgtcgtctcgcaaatcgccagggccacgttcggcaccggggcggtgtactacctggtgcaggcctccacgatgctcattttgatcttggccgccaacagcagcttcaacggctttccccgcctggcctcgatcttggcgcgcgaccgctacatgccgcaccaaatgtcgatgatgggagaccgcctcgtcttctcgaacggcgtgatcattctgggcgtcttctcttgcctgctgatcattctcttcaagggggacacccacgcgctgatccccctctatgcggtcggcgtgtttctctccttcaccatctcgcaagccgggatggtgaaacgctggctcgtcaagaagggcccccattgggagaaaaagcttctggtcaacgggatcggcgccgtcacgaccgccatcgccaccgtaatcatcgccagcaccaagttcacgcatggcgcatggatcgtcatcgttctgattccgttgctcatcatgatgtttcgcgcgatccgttcccattacaaagccgtggccgaacaggtggcgctcgcgcgggggcaccgtccccccctgccgcggcgcaacatcgtcgtgctgcccatcagcggggtgaatcgcgcggtgatccgggcggtggattatgcgcgcagccgttccggcgacatccgggccgtgctcgtcgacgtcgacccggaagaaacggcgcgaaccgaaatccagtgggcccaatggggctgcggcgtccccattaccgtcctgccttcgccctaccgctccgtcctcagctcgctgctggaacacatcgaagaactgttgcagaaggatcaggaatgttgggtcaccgtcgtgattcccgaaatcctcccggcccgctggtggcagaacatccttcacaatcaacgggcgctgatgctgaagggcgccctcctgttcaaggaccgcgtcattctcaccgacgtccccttccatttgacgaggtaaccatgcagacctccacacctaccccctcccgaatttggatcggcgcggcgctctccttgtggatgggcgggttgctcgtcggcctgacggccggagaagcccacgcgtttcgcatcgtctcgcccgccgacggatcgacattggcctccgggcagtcggtgtcggcggaaatcgaggctggtcaggaagccgggctggtcgaggtccggtattactggtaccaggaccagatggacgcgctcgtggagcagagagaggaacgcacaaccaaatcgtcgcagggcgggatggcgaccgagaagtattggcagaaggacagcatcacaggggcgccggtcgtggcattacccgcactgacctcaacggtggatcaccagccgccctatggcggcacattaccgatcccggcagaatcgattggacggatgcggcttctggccgtcgccgacatctcacaagggcggttgggccgcaagaccatgttcgacgaagtcttcgtcacagtccaacccaaggcggagttgttgtcgatcgatttcgaaaccgagaaacccttacaactcggacgcgccgggcaatcctcagcctatggccacgtcgactcgctaggcaaggtcttcgaactgccggtagtcggggaattcgccgacggcatcgcacggcccctctcctcccccagtaccggcaccatctatcaatccggcgacgagcaggtgctgaaggtactgcccgagggcctgctccagatcaccggcaacggcaaaaccaccttgaccgtgaccaatcgcgggaaacaggcgacgctcgacattcgcgtggaggtgaaccccgagcccaatgagattccgattgcggacgccggtacggccaagaccgtgaaggccggaacgaaagtccgattgaacgggttgcagagccgcgatccggaaggcgaggccctattctacgcctggagccaggtgcgaggcagcaaagtggcgatgctcgacgtcaacatgcccgaaccctccttcaccgccccctatgtgtcggagaaacggaccttccgcttcaaactgcgcgtcacggacaagaaaggcgcggacagcgtcccggcctatgtggacgtgaccgtcgagccgtaagggcctcctcctcaaacactcccgccgtaatcgacgctccccttgcgtgagccgcctcgtttacccctcgcaactattcactggattagcgtccgacaccaagcaaaaaatatggcggacagtgacctcggatgtcacgcggccatggtagcctctcgcaacccatgaggacttgccggcagcaaacccggcaaccaggcctaggaaggaggatgccatgccgacagccgatgaacgactacgacgcgagacctttatgcgagatgtaggccgagcgttgcgatgtgcggcaaaggtggctcgtcaaatagcccgggtgcaccgcactccgctgtatgtgtggaaaaacggcaaggttgtagccccaaaaccctgatttggagaacgaagggcggcctgttttacggtcactcatggatcaagatacgagtcagaaccagatcatatttttcaaacaggggttgcgtatacgtcactcacccaaaataaaaacgcccctccttgtgggagaggcgtgaaggtttacctccgaagaggctatcctgcgaagcttccactcaaggaagactccttgttatgagaagcaatgcaggcatcggtcagctacaacggcgctgaccctatcaaagttgttatgacgttgcaagagggaggaagcgatggcgcagacacttggcctagacctgggaacaaattccatcgggtgggcgcttatcgaccatgatgcagaagaccggccagttcgagtagaagcctgcggagtccgcatctttcaggaggctgtggatgctgtaagaggaaaacccaagaaccaagccagacgtgcggcgcgcatggcccgccgattggtctcccgccgtcgtcgccgccgggaaaagctactcagactgctgctcagcaacggcctcctcccgccagattggctcgacagaacgagtgcggaatcacactacaacgcattaggcaacccctacgaactcaggcggaaagggctagaccagcctctgattccttatgaatttggccgggtcctcattcatctctgccatcgaagaggatttgagagcaaccgcaaatccaaaccaaaagaagagggagagatcaaacaggccatctcccagcttcagcaagcaattcagaatgcgggatgtcgcacactgggcgaattcctcgcaggtcagcagaagaaacgcgagcggcataccggaagagaaatgtaccggcaagaattcgaactgctctgggagtcgcaaagccgatttcatccaacgatcttgacgagggatttcaaggtcgtcgtccacaacatcatttttcatcagcgcccgttgaaagtaaaaagtggatcggtaggccggtgcacgttcgagccgcggcgatttcgagcgtcccgtgcctggcctgacgctcagaggttccgactcttgcaggatctgaatcaccttcagatcaaatcgccaacaactcgcgagtatcgacacctgtcttcaggagaacgagacaagttactgcgtctcttggaacagcaaaaaaccgtgagttggaagaaagcgagaagaacactcgggcttcatgagggcgagctgttcaatctggaagaagggaaaaaggaagagctgctcggagaccaaacatcctatgcgttgaggaaggttcttggcgagaaatggaatgaactctctaaagagcagcgcgatctattggtgtgcgatttgctgaccattgaaaatgaggccggcttgttgaatcggctgcacacttggtggggtctcgagaaagagttggccgagaacctggcccaaatagaattggaggacggctactttcgactctccctaaaagccatcagaaaggttcttccgcatttggagcaaggactgacctacgacaaggcctgtgctgcggcaggctacgtccatactggcagcgggggtggcaccggagctgccaagcttggcaatccaccgcaactccgaaatcccgttgtacaaaaggccctgtatgaggcgaggaaagtggtcaataccgtcatcaggcaatatgggaaaccgtcggtcatacgggttgagatggctcgagacatgaaactgagcaaggcccagaagatagccctcgcaaaacaggctaagcaaaacgaaagtctgaacaagcaggcagaggaagcgctgcgtgccagaggcattcagcagccatcacgtgacgacaaggtgaaataccggctatggaaagaagctggcggtgtttgtctctatacagggcagccgattggcgaagcgatgttgttctctcaggatgtggatattgagcacatcctgccctacagtcggacgctcgacgattcctatatgaacaaaacgctctgtctggctcgcgaaaaccggacgatcaaacataataggtcgccatatgaggcatattcttccagccctgaaaagtacgcggatatcctccagcgaattcgtgctttgccctgttttccctggtcgaagcggaggcgatttgaacagaaggaaatcgacacagagggcttcatcactcgacagctcaatgacacgcgctacatctgccgggaagtcaaagattatctggccactctcggcgtgaccgtcgaggtgtccaaaggcgaagcgacagcctggctcagacatacttgggggctcaatcgcatattggcgggagacggagcaatagagaagaatcgaaacgaccatcgacaccatgcagtcgatgccgtcgtgattgccctaacgagtcggcgtctgtttcaacatctttcgaagctatcggctcagcagcatggtccggcgtctcttcgccgtctccccatcggtgaaccctggccggatttttatcccacagtcaacgacaagattcaaagcattgttgtctcgcacgccccggtgcataaaatccgcgatgcattccacgaggatacggcctatggctacaacgcggcgacaaggagttttgtctaccgagtgccgctggacagtggcttcaaggaaaccgccattccgcagatcagggatgcagcagtgagggagctggtaacggcgagactggacgagactggaggggatatcaagcgtgcgttcggcgatccgaccaatccactccggcatgtcgatggtgtcactccaattcgttcggtccgaatcaaagcaagggtgagtcgagagacggtagctccggttcgagatcgtaacggagcagaatacaagttctttaaatatggcaataaccatcatgtagaaattatcgagcaccaggcaacaggcaagaggcagggaatcttcgtcacgacgatggaggcggctcgacgggcgagaattgcaaaactgccgatcgttcaacggcagcctccctgggcggacggaggcaagacttacggggagggttggtcctttgtaatgtctctctacatcaatgatctggcaaagattgaaaatcctggaggcgttaagctcatgcgggtccaaaaactcgatgggtctaacgggagagtgtatttcagggaccatgcagatgccaggacggaacgggattccgagtaccagaagtcggttctttcattgagatgcagcaagattcaggtgaatgcgcttggagacgtctcacccgctcatgattaagcgaattgtggagataggcaatcctgctcgcttatcgctgtccaatcagcagttggtgattgaacggcaagggcaaggaaccgcgaccgttccggtggaagacctgggcctgctgatcttagatcaccagggaattgcctatacgcaggctgtcatgtccgcctgctggaagcataacgtgcatgtgctgctgtgtgacgacaagcatctgcctggtgcggtgttgttgccgctcgatggtcatagcctacaaagcagaacgatggcgcaacaaatcaagatttcagaacccgtccgcaagcgactctggcaggccattgttcgtgccaaaatcaccggacaggcaaggacgctgcaatccaccaaaggctcggcagggccgttgctcgcgatggcagcgaaggttcggagtggtgatccctcgaatgtggaagcccaagcggcacggttttattggcaacagttgtttggagaggattttcgccgggggaacgatgaggagcatcttaatgggttgctcaactatggatacgccatcgtacgaacagcctgtgctcgggcattagtcggtgccggcttgcacccgtcgtttggactgcaccatcaca

SEQ ID NO: 3525 - DNA, 7106 bp, synthetic construct
  misc_feature 1..7106: note = Synthetic
  source 1..7106: mol_type = other DNA
ttcagtgagcgaaagaaatctcgctcagaaacagaagcaaaaccggggcagcgccgttccgctgcatgtgaccggctaccctcttaaactcggcttaatattgtcttgactgaggggtccactttagctaacccattttagggattggcagaaaaaagcaattctggatatcacgaaagatatggtgagtaaaaaacatgctgagctaggagaaaggagtgaagctcaagccaatttggcaatgcgattcctgcgcgccatattcaattttgcagccactcagtatgaggatagccgggggcaatcgctgattttagaaaatccggtcagacggctttcgcaaacccgcgcatggtatcgcgtagaacgtcgccagaccctcatcaagccgcatgaactcgccccgtggcttcaagctgtgaccaacctgaaaaatgatcacacaagcaaacaccgtgaaacaatccgggattatctgcttctggtgctttttaccggattacggaaggaagaggctgcgcgcatgacttgggctagtatcgatctgcaagctaagactctaacggtaatcgacaccaagaataatctggatcatacattgccgttatccccttttctctattatcttttgcagcgaagaaaaaatagcgcgatgaatgaatatgtttttcctggagcgggtggaacggggcatatcattgaacagcgcaagcagatgacaagggttattcaggaatcagggggttcatttacgattcacgatttacgccggacctttatcaccgtcgcagagagtctggatattccagcgtatgcaccgaaacgtctggttaatcacaaaatgggcaacgacgttactgccggttacatcattagtgacgtagagcgattgagagaaccaatgcagaaaattaccgaccatctcctcaagtacgtcggtatcaatccagttgctgaaaacgcctagttacccccaaaatctctaccacctaatttgacatagtacggcaatgccgtatgatatcctatgctcaccgttgcagaaactgaagtcttcagccgctatgccagtgattattggacagaagacgagcgtgagatatttaccgcctggattgcagaacactacaacgccggtgatgtcgtgcgcggctctggcggttgccgcaaagtacgttggacacgcaaaggaatcggtaaaagcggtggtgtgcgcgtgatctattacaacatgcttgaagatgaaacaatctggctactgttgatttatgcaaaaaacgagcaagagaatattcctgcacatatattgagagcaattaaggaagagataacatgcccatgaccgaaacagaactgaaaaaacgtgacgcacagcgcgacctcggcgttgagttgctggagtcggtgcgccagatgacagccagaaaaggccgtgttgtcatgtcagccgtcatatccgcacgaaaaaaatccgggctgtcgcaaactgagtttgccaagctgcttggcgtgtctgtgcgaaccctgcaagattgggaacaagggcgacgccagcctagcggcgcagccaagactctaatcgctatcgccgaacgcagacccgaagttcttagagaagcggcagcgtagttactaaagcagtgaattaacgatatgccacccacatcactaggtgacgtagaacgcttgcgttaccccatacaaaatctccaacacactgtttagaagtgctcgtcaaatcgaggagaccccctatcttgaggttcatggctgggcggaccctgtagcagataccgttacaggaattctggcacattttgcagatgagtattggtggcgtcgaacactgcgtaaagtcgatgccagacactcgaacatggcgccatccgcctgggactggtccatcgccgcaaaggtaaatacgctagtgacgagacgctacaaagaaaaacagaaataaaaccgccgcaaccggaccatccttgaatactgcaccgacatgagcgagctggggcaggaatacatcctccagcaattagcctatctccgtatccaatccgaagattccccgggggaattgatgacccgtattgtattgccgggtttgatgcggtggctcagccgctggaacatgcgggcgttttctataccgttagccgttgaatacatcgaggtgttctacaatcgtattcgacgttatgcaaaaatcggcaattaggtacccgctggttttgctaacttttttacgccagtagacaacaatctgcaccataatgcagatgaccttcccgtccactaaaccggactccgctcagcaatttcaatggagtcttctcaatcaccctactatgtgaaataaataagcccctcgtttgcacgagaggcttagggtttacccccgaaggggttatcctgcgaagattctcactgagagtttcctcttattgtgaaaagcaaggcgggcatcggtcagttacaatacgagctgaagtatagttggcggcgctacgaattgcaacaaatgtggattaacaacatatcagcagccattcctgactgcgaaaaatcgaggaaagttaaggttggggagtgtcgaggacgcacctttgattctgcttactcaacggttattcactaaggggacatgatgggaaatttcactttaggattagatttaggcaccaattcaatcggctgggcatcgattgactttgacgataaccagcagccgcaaaatctcatctcctgcggttctcgcatttttcaggaagcggtcgaagcaaaaaccggcacaccaaagaatcacgcccgccgcgccgcacgcgcggctcgaaagttggtggcgcggcgcaaacagcggcgcactaaactgctaaaccttctcattcgtcatggcctatttccgcaagatgaagtcgaacgcaacgcattgctgctggacaaccaagccaacaatccctaccaactgcgcaagcgcggactggatcaaaagctggagccgtttgcctttggccgcgccctctaccaccttgcccaccggcggggcttccagagcaatcgaaaggccgcatctgatgaagacggtaagatcaaaaccgccatttctaccttacgcgccgaaatgcaaggccgtactcttggagcatttctggctgatcaacccactcagcgcaggcgttacactgaccgcgccatgtacgtggaagaattcgagcaattgtggcgcacgcaggcttcctttgcacaggagaaactgacgcaagcactcaaggttgccattcacaacagcattttctttcagcgtcctctcaggtcgcaaaaacatttggttggcaaatgcaccttcgagtcgacacgcaagcgcgccgccaaagctatcctgctgacgcaacgatttcgcatcctgcaagacgtgaatcatctcgccgttaaagatcccattacccgcgatttccgtccgctcacgcaggacgagcgcagcaagctcgccgaaacactcgataaacaaaaaagtatgacttggggagcggtgcgcaaagtgctgggctggaacaaaaaggacagcctacacgagggtgagactttcaatctagaggaagggaagaaagacaaactgcacggtaaccgtaccgcctgtgacttacgcagtgtcttggatgatcgctgggatgcgctcaccgcacagcagcgggatgatctcatcattgacttgctcaccatagacaacgagcaaggcttcctcaaccggatgatgaaccattggggttttgacgacgcgactgctgaatctctcgccaagatcgaactggagcccggctatgcccacctttctgctaaggctatgcgcgccatcctgccgcacctcgaacaaggcatgatttatagcgatgcctgtaaagcggcgggctacgaccatagcaatccaaaccagcgaaccattactgacaaactcggactgccttccaacgtgcgcaacccggtggtgcaaaaggcactgttcgaaacgcgcaaagtggtcaacgccattgtgcgcaagtatggcaagcccgccatcatccgtgtggaaatggcgcgcgacatgaaactctccaaacgccaaaaagaagaactgcagaaagaacagaataaacagaagaagaccaacgaccttgctgctgaaatcctacgcaaggaatttggcattcaacaacccactcgcgctgacattcagaaatacaacctatggctggaatgcaaggaagtctgtctctataccggcactacgatttcacgcgagatgctgttctcaccggaagtggatgtcgaacatattctgccgtacaagcgttcgttagacgattcatatatgaacaaaacactgtgcattgcaacgttcaatcggcaggtgaaaatcgacaatacgccttatgaaatagggcagggcgatccagtagcctacgccgagatttttcaacgcatcaagacactccctttcccaaagcgccgtcgctttgagcaaaaagaaatcgaaacggataagttcatcgaaaggcaattgaacgacacgcgctacatctgcgttgaggtacgaaacttcctgcaacaactcggggcccccgtggaagtcagcaagggtgaggccaccgcgaaattgcgtggtcgctggaaattaaacaccctcctctccccagatggcagcaacgaaaagaaccgcgccgaccaccgccaccatgcgatagatgccgtagttatcgcgctgaccaaccgtagcctgttccacaaactgtcgcgcctgtccgcgcaaagtatttcgctcgacaaaagccgcttcgacataccgccaccatgggatggcttctatgatgacatatacgagaagatagacaatataattgtctctcacgcccctgcgcgcaaaatcagcggagcactgcacgaggatactgcttatggccatttcaaagaagagcttgttgatccaaaaactggaaaaatcagcatcgaagatcgctttgtttatcgcaaaccgctggcgacgcttactgcaaacgagatcagcaagatacgcgacgccaaggtacgcgaactggtggaagcccggttggcgcaattcggcggaaacagtaaaacagcctttggtgaccctaacaatctgctgctacatgcagacggcaagacaccgatccgcacagtgcgactggtaactaacttcaaaaagaacactactcacgcgatacggaagggccaaggcctcgactacaaattcttaaaatatggtaacaaccatcacgtcgagatcatcgagcacatggaaacccgtaagcgcaagggcatcttcgttacggcaatggaggccgcacgccgtgcgcgtggtgctggcaataccgagaagagcgacattgtgcagcgcgatcatggcgaggactggcggtttgtgatgtcactatcaataaacgatttggtttctattcaaaatgctgatcaggcgcgaattatgcgggtgcaactttttgatgcgtctaatgggaatatcatttttagagatcaaagatccgccacactagacgacaaattattccgttaccaaacaaaagcacatttgcttgaatgccagaaaatagctgctgatccactcggcaaccttaccccatgcaatgattaagcgtatcgtcgagatcagcaaccctgcctatctgcatctgcgcaaccgtcagatggtgattgagcgtgaggacgtggcggtaggcaccgtaccggtggaggatttgggtgtgctaatcctcgaccatcccggcattactcacacgcaagctttgctcacggcctgcttcgaaaacaatgtggtggtgctggtgtgcgacagcaagcatttaccgagcgccattctgctgccattggatggacacacgctgcacagcaaaacattgggacaacagatcgccgctaccgaacctacctgcaaacggctatggcagcacgttgtgcaagccaagatacgtgaacaggcgaaggtgctgcattccgcaaccggcaatgacactccgctgcgcgcttatgcggcaaaagtgaaaagcggtgacccggaaaacatcgaggcgcaggctgcgcgtatttactggcagcggctgttcggtccagagttccgccgcaatgccgatacgcccggcatcaacgccatgctcaactacggctacgcagtgatgcgcggcgcagtggcgcgcgcagttgtaggcgcgggactacatccggcgctgggcgtacatcaccgtaatcagtacaacagcttcgcactggcggatgacctgatggagccgttgcgcccgctggtggatatcaaggtgtatgaggtgtgccagctattaccggacacacccaaactcacaccggagaacaaacgcgccttgctggaaattctcggttggggttgcaacataggcgaacgcaaatttcccctgatgattgcgttgtatcaatacgccgccagcgtacgcaaagtgctagctggcgaacaaaaggaagtggagattccggtgttatgagtttcggaggatttcgcagcatgtggatcatcgccatgtttgacctgcccactgataccaaggctgcacgccgcgcctatcacgacttccgcgaatctctgctcaataacggcttcaccatgatgcagttttccgtgtacgggcgacactgccccagcgaagaaaatgccgatattcacgagaaccggataaaatcatttctgccaaatgatggtgaggtacgtgtgctaaccgtaacagacaaacaattcgagcgcatgaaagtgttttacggaaaaacccgtaaggcaacggaaactgccccagaacaaatcagctttttttgatcaataaaaattgccacagacccaaaataaagcagtaaaacccagcgagttttttcgctgggttttactgcttttcaatgctcgctcaacgtgttgcggctgacagattgtaactgaccgatgcccgcccgcaattcacaacctatcgagcagtatggtagtagtcatacagattgtaactgaccgatgcccgcccgcaattcacaactccattcgaccgaatacagtaataacgccgaattgtaactgaccgatgcccgcc

SEQ ID NO: 3526 - DNA, 23357 bp, synthetic construct
  source 1..23357: mol_type = other DNA
  misc_feature 1..23357: note = Synthetic
tgccagcaaccgagttcaatactgcgctaaccatgcttgaactgactggcgctatccgctcgctcggcgccaaccagtggacgcttgtctaattaatattgtttaagcttttcgcaaatttgtcattttcatcgtataattgtaaacttatagatattatgcctattaagtgccgcgaaaagattccaagattcaatcctaggactgatatccccaccattcccaacgccatgagtgttgctggcgcggttctagcctggcgcggcgccaaacgcattgataccgctgctggtatcgcacaggttgccgctggccggttcattgacgttctagacggcatcgtcgcccgcaaaacagggcagacaagcaatttcggcgcgttgctggatgctgggctagacaaagctgtcactgccatcatcctttataagataaaaagtaaaaaacctcgcaccaacggaaataatcgccgccatcacagcttttaatggaatcaacgccgttgccagcgccaaaacgatagttgaagctggcgatgaaaccgtacgcccggaaatctctggcaaattggcgctagcgctcgaaaccagctcattgctagcccacctattcggtagccgtctcgaaaccaccggccagagccagctcgccagagttgctcgcggtatcggcaatttagcgttcactgtatcgctgccgttcgcagttaaatcaacgctttcgtacattgaacgcgcccggcaatcaaaacaccgaaatgataaataaacaagcaaaactggcgatttgcggcctgaagaggatttttggctattttgttgcaaaaaatagtaaattattgcgaaactattgacaccaccgtccatatgtgatacatatatatcagctttttgctcaaagtttcgtaaaaagggcaagaagcagcccttttgctttgagtgaaggtgatttctgggaggaaatcatgaagtttctcgctcggctctttgccgagatcatcatgatgatcttcgtgatcattatggccacgagagtgcttagcactgatcaccccggcgtcgccgggatgatccttgtcgccatctatgtggtcatcctggccctcagggcgaccatacaaagggagatgatcaaggacgacgccgaccaacggcgccgccttgagcgggcattcatctcggccgccagtgaggctggctggccgtgcctggtcagggtacaccgtgaccggaaggtcgtgtcgtactacatcagggattcttattggattcctgatggcgatttctacattgagcttcccctaagggaggagtctctcggcgagcagacgcagctcgctgacctcctctccccggaggagatcgacgagctctacgccggcacagacgaagtcgaggacgaggatgaggaggtgaacgccaccaccgccgaggaggagtgatcctcggcaaaaaagggcttttaagcccgtcagaaaatagcccgccagagctctaaggctcggcgcgaggcccatctggcgggctattttctttggcttatcaccctaaatagcaagcattaaatttggcatttttagcaaatcggtttactattatataagtatgaagaatctggttatcgtcgagtcgccagccaaagctaaaactatcgagaaatacctcggcaatgattttcatgttttgtcaagcgtggggcatattcgcgctatcgccaaaaaaaccaaagacggcacgccgccaattgatatccagcacggcttcaaaacgacttacgaaatcgacccagaaaagaaaaaagtaatcgctgaattaaagaaagccgtcaaatcagtcggcgcggccaacgtctggctagccactgatgaagaccgcgagggcgaggccattgcttggcatctgtgcgaggtcctaaagcttgaccccaaaactaccaagcgtattacttttcacgaaattaccaaatcggccatcgaggaggcaatcaagcatccgcgcaccgtcgatatgaaattagtcgaagctcagcaagcccggcagattctcgaccgaattgtcggcttcgaacttagcccggtcgtctggcaaaaagtccccggcggcaagtcggccggccgcgtccaaagcccggcggtgcggctgctagtcgagcgcgagcacgaaattgacgcctttgctggcagctcgcagttcaaagtaaccgctattttcgccgctggcaaacaagaactaaaagccgagctaaaacagcgtttcgacagcgaggacgcagcccgagctttcctcgaatcgctggctagcgccactttcaccgttaccgatatcagcaccagcccgtcaagccgcaatccggccgcgccgttcaccaccagcactctgcaacaagaggccaacagcaagctcggcatgggctcgcgcgctaccatggccagcgcccaaaaactatatcaagagggccgcattacttacatgcgtaccgacagcgtcaacttatcgagccaggccatcgctgctagcgccgattacatcaaacgcttatatggcattgaatattcgcatgtccgcaagttcaaaactaaatccgctggcgcccaagaagcccacgaagcaattcgcccgaccgatattacccgcgaatcggtcagcggcagcgactacgaccagcgcctctacgacctcatccgccgccgcacgctggccagccaaatggcgccagccaagctagagaacacgacaattacaattagtattaacgacggggaaaagcaaaataactcaagcaagactaacgacaagctcgtctttgaagccaagggtcaagttgtcctgttcgacggtttcctgcgcgtctatggcggcagtaaagatgacacaattttgccaaccgtcaaatctggcgaccagctgcaacgccacagcgtcgaagcccgccaagttttcgcccggccgccagcccgttataccgaaggtacgctagtcaaaaagcttgaagagctcggcatcggccggccaagcacctatgctactatcatgaataccatccaaacccgcggctacgccgaaaaaggcgattccgaaggcacgccgcgcgatgttatcttattgcaacttatcgacaataaggtcgagcgcgaaatcatccaagaaaagaccggctccaacaaaggcaagctcgtgccgacgccagccggcgagctaattagcggctttttaaccgaccatttcgaccgcgtcgtcgattatggtttcaccgccgacgtcgagaaagacttcgacgatattgctggtgaccgcttggcgcgcaacactatgctcgagaaattctacgcgccattccacgcgctgattgagcaatctggcaatattgaccgccgaactgtcggcgccaacagggaagttggtattgatccgaaatctggcaaaccaattattgctcgcttcggccgcttcggaccaatgctgcagctagggtcaagcgacgacaaagccgacaaaccgcaattcgcaccgctgcctaaaggcgccaagatcgaaaccgtcactctagagcaagctttgcacgcatttgagttgccgcgcttagtcggccaaaccgaggacgggcaagatatcaaggctaacgtcggccgcttcgggccatatattcaaatcggtaaactctacgtcagcctgaaagatatcgacccgcgcgaagtcacccaagagcaagcgcgcgaactatacgccgccaagctcaaagccgaagctgagaaaaatatcgctgactttggcgacggcatcaaggtactcaacggccgcttcggtccatacgtcaccgacggcagcaaaaacgccaaaatccccaaagacaccgatcccaaaaccatcactcgcgaccaagcagtagaactgctcgctaacgccccgcaaaaaaggtcggcacggcgccaaatacggcgaaagaagtaagcatggcaatcaaactccaacaagtccgacgtgtccgccgctggatgatgattttgctgctcgtagtaatgattatcgttgtcttctcgctaaatgttcacaggtcgtaccgcaccgataaccatccacgtctaggcaatgtcgctaatgtcgactctgatattccgtattgcgccggccaagacaagcagaagtttgatttgtacacgccaatcaacagcttgcttaatactcatacaacaccgtacccgctagttatttatatccacggcggcggctggcataagggtgataagcgcaattcgctgcttgactattacggttctagcttgacggcggctggttttgcggtcgcctcggtcaactaccgcctagcgcccaaataccattatccgacacaaaataacgacgttgcctgcgctatcgataccatcgccaaactcgccagctcttatgacatcgacaccaacaatgtaattctttttggcgacagcgctggcgggctcttggctatcgactacgtcttaactcgccaagacagcccaattactgtccgcggcgtgatcagtttttatggcaccaccgacctggtcaaccaattacagcgcaccaagcgcaacccaaatgcttacaaattcctcggcacccgcaatgtcgatactgcccgcgtcgccagcccgctgtaccaaccgattaccaaaacgccgccgccgtttttgtttttccacggcaccaaagacagtattgtgtcgattgagcaagcttacaagttctaccagcgtatcttggcctaccagccgagcagccgctttattcgcgttgccaatgccggccacggcttcgacgacagtggacgcagtaccaaaccgaccagcgacgaaattcgccgcacacttacactgttcgccctcaagcatatcaacaacgaccagtcagaaactcaggcgcaaaccacgccagaaaaagtccagatattattagacaatgattaagctgtttaatcagctaattattcattggtgttttgaataagctttgctcaataaacaattatattttgtgataaaccgttagattaaccagcatcgataccgccttaacaccttaaactttgacaaaaataggtattattgttagcctagacattattctttattaaaaaaagtagcaaaaaagtatttaccataagcgtctatattgtgatacaatataactagttagtatttgatttgacaatctaactactatgtattataatcagatacgaaattacgatatcaaactaaaatcactctcgaggggcggggagtggagataaaaggataaggatcgcatgaccgaaactaccggtacacctgctgtggagactatcaagacagcaattgaggatattcttaagactatagaccaagagcgcgaacgcgaaattatcacgcgccgtttcggtctatatgaacgccgggaaacgcttgagcaaattggcgaactgctcggtatcacccgcgaacgtgtccgccaactcgaaaaagccatcttagcccgcctcaaaaccgctgccgccgacggcaaaatccccgccattagcgacgccgagcgcctaattatccgcgatctttccgaaaacggccgcgtcggccgcgtccaagacgtcgccaaccgcctctcgaaagacaaagcttccaataatacccgagctcacattgcctttatcggcgagctgtcgccgcgcttcgttataatcaacgaaaccgacaattaccaccagggtatcagtatcgccgaaaacggtaatgagaagaaagtccgcggcgatatcgacagtatcgttaaaactatcaaaaaccacggccagccaatcgacatcgagagcttgcatggcatgttgactttcgaaagtccgtcccaaatccgcggcctggccagcttatccaaaaaactagccaatctcaaagacgtttggggtctagccaagtggccaactgtcaatcctaaaaacatccgcgataaaatctacgttattttggcaggcaatggcaagccgatgcacttctccgacatttctaaagccatcaaagaaagcgacttcaagcgcagaaacgttaccactcaagctatccacaacgaacttatcaaagacaaacgcttcgtcctaatcggccgcggcatttacgccctcgacagctggggctatagcaaaggcaccgtttcagatattattgccgacattttgcgcaaagcaggcgagccgctccaccgcgacgaaattgtcaggcgcgtactcaagagccgccaagtcaaagaaacaactattctgctcaatctgcaaagcaaatcgatgttcaagcgcgtcgctaaagcgacttacaccatcgccgaaccacagcaataatctatctgcggattccgcttaatcttgcaaaaataacagaggtatgatataatgaaagtatagctatgtcatttatcacttctgttattgctctattgttgcaatggtatgtctgggggccgttggttattgtgctgttatatctaacttggcgcaattatcgcagtattgatgtaataaagaacgttgagagcgtcttgttaaccctagagattccaaagactaacgataagtctgagctggccgccgagcaaatgttcgctagcctccatggtattttgcgcgatgcccgcgagctgaaagctaacaatggctatcaggagcacctaagcttcgagattgcctcggtgggcgggcggattcaattctacgtttggacgccgaaatcgctgcaaagcttcgtcgaagggcagatttacgcccaatacccgcaagtacaaatccataaggccgaagaagattatgtcgctcacgaacgccaccacagcgtagtctatacttcagaagttaccttaaccgacaaggaatttttaccgatcaaaacctttcagagttttgaagttgacccgctagctggcatcaccggcacgctcgccaagctcgaagataccgacgaagaaatttggatacagatgctagtacgcccggtcgccgacagctggcacaaagaagccgacgcctggattcaatcggtcaaagcaggcggcttcaacctattcggcaccgacggtataggcaagtggattgctggcctattttctgctctgtggcaaccgcccgagcaagctggcgccagcggtccagaactgtcagaacgcgacaaaacccgcatatctgaagctgaaaaaaaggcgaccaaacttggctatcaagtcaaaatccgcgtcgcttacctgggcgagcgcactagcgacgccaaattacgtatgcaaggcatcattggcacctttaagcaatttaactcgaccaatctcaacggctttaagatgtcgaacgatagcttcgccaaagaggcgctcgctaaatacaaaacccgactcttcgccgaccgcggttatctaatgaacattgaggaggtcgccagtgtttaccatttaccgcacactaacgtcgaaacaccgaacattgtctgggctagcaccaaaaccgccgaaccgccgccgaagttgccagtcctaactggcgatccagcgcatgatgagaatatctcggcctttggcatgactaattttcgcggtatcaaccatcaattcggtatgctgcgctacgaccgctcgcgccatgtttacatcatcggccagacgggagcagggaagagcggcttactggagttatttgccttgagcgatattttccatgggcagggctacgccattatcgacccgcatggcgacttcgctatcaataatatgcgctttatcccaggctcacggctgcaggatgttgtttatttcaacccagcggacacgcaatacccgcttggtttcaacccattagaggtcactaatccttcacaaaaaactaatatctcatcagaagttatcggcgtgctgaagcgtatgttcggcgactcttggggtccacggctcgagtatatcttgcgctataccattttagcgctactagaccggcccgagactaccatgctcgatattactcgcatgctcactgacaaaaagtttcgcaaagacacgctcagctactgtaaagacaccgtggtactgcaattttggaatgtcgagtttgctagctggaccgataaattccaagctgaagccatcgcgccagtcctcaataaagtcggcgccttcaccgctaatccagtcatccgcaacattatcggccaaccgaaatcgacttttaacattcgccaaatcatggacgaaggtaaaatcctggtcgtcaatctttccaaaggtttaatcggcgaggataatgctggcattcttggctcgtttttggttaccaaaatccagctagctgccatgagccgttccgatatccctgatatcaaagaccgccgcccattctatctatacgtcgacgagttccaaaacttcgctactgattcattcgccactatcttgtcggaagcgcgcaaatacggtcttaacctgaccgtcgccaaccagtacattagccagatggaagaaaccgtccgcgacgccgtttttggtaacgttggcaccgtaattagcttccgtgtttctgcagacgacagcccaattctcgccaaacaattcgagccgcaattcgagccgaatgatctactgcaaatgcataaccgtaactttatcatcaacatggtcatcaacggcgagaaggctccggcctttagcgccaaaacacttaatctgccaactgcgcaagacgataacaccggccggattatccaatggacgcgcgataattatagccgcaaccgcagcgatattgaagccgatatcgccaatcgaatcctgccgccagaaaacctagtcgtcaaaaaacctggtcccgcctatacgccgccaaaaacacccgaacagcgagccgccgatcgcgccgcgcgccaagctgctaagcagccgcaagaccagacccaaccaattgccaaacaaccatcggtcaaacttgacaaaggcgctgttggtttactacaaatagaccacggtcaaaacaataaagacacctcaaaggccgcaaaggataatgacaccgcaaaaataagtgcagcagctaaacccgccaccaatgaagaaacagagaaattagacacagctactagcgacaagccaaaacgcaaacgcactcgcagccgccggcgcaaaactccagcggcaactacctccaattcgtaatcaaccattgctatacccctaccgttagaaatagccaccacgccgcatgctcatgacgctcaagttggcgagattatcgatctattatgtaagcccagcatctgcggcccaatttcagacatactaggccgagctgctttcatgaaagcagctaccgacctaacgcagcgtttatacttgggtgagtgcgccgctgcactggccagatacatcgatgaaaacagcaatactatcaaaccagttggcataattgtatacaaccaaagcccgaaagatcctagcctggccttcttagaattagttgttacgcgagaaaaataccgccgccgaaaagttggtacgcgattattacaactagtcgagactgaaacagcattacacggcgcaacgcaattacaagcatctgtgcctcaagaaatgacagatttgcaatggttacttgcaaaaaacggcttcgcattcacggaagctgttgataatggaggtgttttgtttttgcggtatcggaaaaaggttaaaggcactaaggatattgcaaaaaaataaaaaactgcgtattataaagctacagtcccttaagtaaggattgtaccaatatctaaattgttctaggtttctataataatctggcggtaaaaatccgctgtaaagtatatgaaatactggagcaaagcactaatccgctcacttgttgggcggattatctttttatttacataaatacacttacacttacacttacacttacacttacacttacgctttcaattataaacttttgattatataattatctcaaacatagcataacaaaggacttctttatggcacagaaatcttcatattcaccgaaaagatactcactaggactggacatcggcacctcctcggtcggctgggcagtattagacctagataaggagcgtatccatgatttgggagtgagaatttttgagcggccagaagttccgaaaactggcaagagtcttgctgaaccacgcaggattgctagatccgctagacatcggctaagaaggcgtcgacaaaggcttaattatctcaagcggttctttattgataacaatctgatatcagagagtcgcataagcgatatacttagtccaactcaccctaagaaatggcggccaatctatgacccctacactctacgcatcaagggtttaaatgaaaaactctcaccagaagaattattcgtggctctttatcatatagcgaaaagacgtggatacaaaagtaaccgtatatctatagaagagcaggatgtcgaagggtctcaagtgttatctgctatttctgagaacaaactacttttggaaaagtataagacaaaatcggtagccaaagtacttacgcttgatgaaaaatttaagaacaataaacgtaataaaacaagcacgtataaaaattcatttgttcgtaagaattttgaagatgaagttatgctacttcttgagtctcagaaaaaatttggccttaaactgccatatgaaaagatacaaaccttgctgtatggtaatgtaaaaaatggcaactacaatggtatattttcacagcgaccattcatgacaagagaactgattgaaaagatgcgtggtaattgtgaattcgagccagaaaagcctcgcgcaccaaaggctagctatagttttgagctatttcgcctcgctcaaaatctatctcatcttcgcattgtagtcgatcaagagactcgacagctatctgaagacgagatcgcaaagataatcgaaaaagcaaagaacgttaaagtactaaaatatgagcatattcgcgacatacttggatataagggcgaccaaagctttagttttgctcaaggtatgatacgtggcaaaattaaaaatgacgacaaaaagaacggtgaaggcaataaatttgactcaatgatattttaccatactgtcaaaaaagctttcgaacaacatccaaaagattggagtatactagctgccaacaattttgaactattagatagaacaggattaatacttacggtaaataaagacgactcgagtctacgcagagagctatccaaattaaatataagcaccaatgccatcgagtctttattaccaatcaatgttagtagtttcgtacatttatcgtttgaatccttgcataaaataactccgtggctattaaaaggactaaattacaatgagtcggttgaacgagccggctatagtttttctcaaaatctttctggcaacaagaaggaattaccgccattgtcagagaaacaagcagcacaaatcactaaccctgttgtcaagcgtgcagtatctcaaactattaaggtagttaacgcaattatcaggaagtacggtataccatacagtgtaaagatagaagcagcaaacgaactggcaaaaaacgcccaagaacgcgataagataaaaaagattcaagacgaaaacgctgcatataacgaaaaaattaaacagaagcttattaatgaatttaatataccaacgccaaccggactacaaattactaagtttaaattgcgcgaacaacaaaatggcgttagtatttattcaggcaaagaaataaggctcgaaaatcttttcgccgacgaacattatggcgagatagatcacatcataccattttcacgctgtggcaacgatggattaaacaataaagttttggtttttgcagacgaaaatcaagagaaaggaaatctgacaccatatgagacatggggtggagataatcaaaagtggatacaatttgaagcacgagtaagggcaactgctggactaccagccgctaaaagagatcgccttctgtcaaaaagtaagccagttgaagattggaatgtccgcgcgctcaacgacactcgatatatttcacgttttttacgtcaatacattcgtgataatttagattttcctaaaatcgaaggaaagactggcacgcagagggtcttctcaccaagtggaccaatcacttcatatttaagaagggtgtggcgtgttggcaataaaaatcgcgatgataataatttgcatcatgcgactgacgcctgcattattgccgcgacagacccaggcattattcaaaaagtatccagtcttaataaatactatgaactattcaaatatagtgataagaacgaagttatcgacaagctaactggagaagttcttaaccgtaatcaatttgaacaacacatagcagatcttgaaccctgggatgattttggtaaggaggtgcgaaaacgcagtgaactatacaatacaccaagcgagctccacaatgaactaactggcctaaaaaactacgacgaagagtttcgtttgagtacactgcctatatttgtttcacgcatgcctaaacgctctggaaaaggctcaacaaatagcgaaactttccgatcgcctaaaatcgtagaaggctaccttgacgaaaaagggaggcccgctattgcacgcaaacaacgcgtaccgcttcgttctgtagatcttaaaaaattatacgattcgccaattcgtgaaacggatcctaaactgtacaaaattttggaacagcgactcaaggattttaatgacaatccagtaaaagcatttgccgagaatatttacaaaccaacaaaagacagtaaatgtggcaatattgtacgcagcataaaaatatataacacacgagattcaaagagtggattcttggttaacgagcaaagagcctttgtaaataatggtaagactattcgccttgatgtttataaacgcaaaaactataaaggcatatatgaatattattttactccagtctatactcatttgataaacactcaaaagattgaagttttgccgacgccgactggtcggagtaagaaagaaaaggcagattttgacactatccgaacagatgatggtgaaatatatgcaacactgaagaatggttttataaagcaattctctatatatccaaatgactacgtacgaatatattttggcaacgaaatcgttgaaggatattatgtaaaatacaataccaacgacggaagtttaaaactaataaagcacagcgaaacaagtaaaaatgacaatgatttaatcagcaaatcagccaaaacagccaccctcatcgagcgttacgacatctccgtcctaggcgacaactacaggtggttataaatggcctggcgtgttgtagctatcgaaaatcctgccagactgagtttgcgcgacaaccagctagtaattgcgcaaggtgtcgaagcaactttaccaatcgaggatatcgactcactcattctggacggttatggtattaccacaactacaaatctactcacagcactagcgaccaagggtacgacgaccataatatgtgacgaaaagcacttaccagctagcgtacttttaccgtattcacaacattcgcgccaagccaaagtttcacgtcagcaactcaccatgagtcagccgctcaaaaaacaattgtggcagcaaattatcattagcaaaattaccaaccaagccgatgttttgcagaccgtaggactggacgattccgccttacgaacccatattaacggcgttaaatcaggcgacactagcaatcgtgaatcgatcgctgctcgcatatatttcgaccagctgctcgacgacgccactcgccataagccgatttggcacaatgctgcgctaaattatggctacgcgatgatacgcagtcatatagctcgacatatcgccgctcgtgggctagtcgcttcacaggggatttttcaccacaacgagcttaatagttttaacctagccgacgatctgattgagccgtaccgcgccgctgtcgatttatatatcttagaaaaagttgcgccacttcatgtcggcgaccgcgatgccagcctcaccaagcatgaccgtcaacttatcattgacatattaaattattatgttataatgaacgttaagaagtttactataaaacatgcgattgagcggacggttgaaagctttatcgaatgtatcgaggtaaaggaggcgcgtaagcttcttttgccaaaagtcgcctcctaacagggaaggaatgtcatataaaattatgagggtcgcagtattctttgatttgccgaccaatactaaagctgagcgtagagctgccacacagttccgcaagttcttgctggatgacggatttgacatgttgcaatacagtgtttatacgcgattatgcccaaatcgtgacgtcgccgaaaagcatatgatgcgagtccgccgaaacgcacccgacagcggatcggtaagactactttatttgaccgaacatcagtttacacatatgcacgttatagttggcgaaaaaaccatccaggaaaaagccgttcctgccggccaactagcatttttctagccaaaaatccccctcgtaacagagggggatttgaggaagtattataccaatatctaaattgttagggaactataacatcttttcctggataaagtcaaagtcctcaattataccaatatctaaattgttagggaactataacagcttcaaattgcgctatcgttagaggcgtattataccaatatctaaattgttagggaactataacccgcctcctggcgctcggcttcgtagccctattataccaatatctaaattgttagggaactataaccgataatgttcttgatctcatctcggctcaattataccaatatctaaattgttagggaactataactcaggcagcaattgaacttgaaagtatcgaattataccaatatctaaattgttagggaactataacgcattcttatagagtgtgatagatgttggcattataccaatatctaaattgttagggaactataactgataggcacgccattttctaaaagcttttattataccaatatctaaattgttagggaactataacgcagtttaatgtcttgcccaggacacgtcgattataccaatatctaaattgttagggaactataaccaacaaattaggaattacatcggcaattttattataccaatatctaaattgttagggaactataacccatcaccatcaggattatctgaaatagcgattataccaatatctaaattgttagggaactataactcctcgtcctgcaattttgccagttcaaccattataccaatatctaaattgttagggaactataaccgctcctggtttctgtcacgcaaaacggtaattataccaatatctaaattgttagggaactataacagcggtggtggcagcatgcaaaactttatcattataccaatatctaaattgttagggaactataacaatggattcggcagcgaccaccgcgtcactattataccaatatctaaattgttagggaactataacggccagcaacgcgagtagttcgcggcgttgattataccaatatctaaattgttagggaactataactgatgcagccactgccggcgcagttttcaaattataccaatatctaaattgttagggaactataacacaacaattatcacaggttaacaaaggttgattataccaatatctaaattgttagggaactataactaatatatgagtaatattaattttataggaattataccaatatctaaattgttagggaactataactactcgtcgccatttttagtaaaaaattttattataccaatatctaaattgttagggaactataacattttgccgagcgtgactttactgatagtaattataccaatatctaaattgttagggaactataaccttggctgtaaaatcaaaattggctcatcaattataccaatatctaaattgttagggaactataacagtggtatttaagctgccggatagcgtttgattataccaatatctaaattgttagggaactataacatccaacgaatagcaccattagtagcgtctattataccaatatctaaattgttagggaactataaccataccagccacgctctcgagcgcagagctattataccaatatctaaattgttagggaactataacaccgcgaacagcaaaattaagctaattatgattataccaatatctaaattgttagggaactataacacgcagttatgtcgcgttatccaggcgagcattataccaatatctaaattgttagggaactataacctattcaagatggttttaataatattttatattataccaatatctaaattgttagggaactataacctcctgattctctagtttcaagccccgcatattataccaatatctaaattgttagggaactataaccattcagcggtcggtacaagaccgctcctgattataccaatatctaaattgttagggaactataacgtctttggcaaatgttaggctgatattcatattataccaatatctaaattgttagggaactataacaagacctcccactgcccttatcttaattttattataccaatatctaaattgttagggaactataacttagctttgcgacggcgttctttttcagcaattataccaatatctaaattgttctatacagaataagcaaagcattctttgtaagtttaacaaacatctgagaataattcttctgtatggctcgttttgcattgttctaggtattgtttaggagatagatagccgagtggtctcatggctcggttattggttttatctttagatagtcttttaaaaagatgagtaatagagttcatcatggtagacatagagatgacagacgatacgagatatctcgttgccacacgccttaaagccaagccaaattaactcgatacctacaaccacgtctggcaaatggattctgattactttgattagcatcctgaagctatattaaatccaaagatagcgatgagggatggatagttattactgaataaattacgatcgtcatccaacaggggctacccctacctatacctgtatttgattcagcaatcaacaggtttagaacaaatatagaacattttaatgatttgctcagaaagctcaaatacaaaaggtttggatttttgtagatgtaagtagttacaataaatatatacatagtaaaatctaataaaataatcttgagaaagactaatatgaagacgacaaaatacaaacaaatacgtgcacaaagacaaaatctcatacgtacataaaaggcggggcaaacataaaataactaaaagtcgtgaggcaataaacctttgaaatcaaccaaacagtaacaaaagggacgcaattctcattcatgttttacacatagacctaacgtcgcacaatgtccgttttacgtcttataatctatgttgtcaggatgattaatcatacgttcgcaaataacgattttacttgatacaagccgcagcttattaatcttggtctaaaatggggagccttaaccacgctaatagagtcatcttttacttttatatttattcgctatataaaaaataccgccaaccagcagttctatagatataagtccaccagttctatagatataagtccacacactcgaaaacaaactcgaaatttaaattgtagtaattagcacatgtttatagacttaagttatccacagaaaaaatctcagcattatgagaataaatttgcattttttaaaaaatattgtcccctactacttttcccgtctcacctgctttatttgactttttgcattttcaatattttaatatagtttttttcacctagcctatttagctgtttaatagaacaaaagtagaacatggcccaccagtgcaggggtagcctactgcctaagacctcttcctcatttataaaaagctcgcctacctacccgcacatcaatatactctgcagttattcctctgttcgttaaatagcggatggcacgcaccgcgtcttcgacttggccagccgctgggcggtcaactgtcattttaatcgaataccccaccccgtcgaggctgactagcacctggcgagtagtactagctggcagaatcatcttattaacagtaagatcgttttctttgaaatatcccacaaccttgccgataaactgcagaaaacggccgctaattactgaattgccaacgcttgcacgaattccagtttgatcctcgacggcgataactgacgtaccgaggatattacgttcaaatactacacctgtgctatcaacataagctttcatgttaccagactgccaataaaccactggcgagcgcaaattaaccgaaaaatcggccgaccagagagcacctttagctggcggcgacacgctagacacttctggatatctactttgaatggctcggctaagattattagcgttgatatttacagccagccgctcgaggggattagcagagaggtaatcttgaattgctgctgcataatcgcgagcggcagtttgtacttctgaatcgttactagtgccgacaatttgcactttcggctcgacaataatctgagtaagcagccaccccaaaccagcaattagcactaatgcgctaatcaacgctaaacggatagagcggcgtttgcgcttcagattgtgtgcctgtacgcgcggcgattgcaagctagccgattgctcattaggactaggcaccgaggaaatgagactgccagtcaaggtacgattacgccgaaataatgttcccgcactaggcgagttatcatcaaccacagcacggcgccgcacaggctgtgcggcgcggcgtgatttagattttttcgatctcataccaaacatgcttgtggtatcaattatatcattttgcagcgctatcggggttcgttcggcggctattagcagcatctagaatcatatcggccatatctttagcagcaccaggatgtgcaaacgacagaaaagcctgccccatttgccatgcttctgcaggatcgtcaataaggttttttatctcatcgacgagcaactgcggcgttttttccatttgcatttcgtcgataactttgacagcgcctttatcttcatacaccttagcatttttaatttgatgaccgccggtcaagaagccgttcggcaccaagattgtcggcttggccagcgctgccaactcgagaatcgtagtcgcgccagctcgtgctaccacgacatcagccgcaccaagcatatcaatcataccgttgctaacgaaatcgtaaactttaacttgatctgtatcctccggcaaccgccgccgaatctcggcatactggccagtaccagttattaaaattacgctagtgaactgtgtaagttcgctaatagtatctgccacagcattattcaaccgttccgcacccaaaccgccgccagtaaccagcactaacggtctgttacttggaaatcctagtttttccttaaccacgcggcgctgttgctcgctgtacggcttaaatccctcgcggatcggtacgccaacgtaacgactaatcgccttggggtacggataatactctagcggagcgccagtgccaatacggtcagcccaacgtgccaatacgcgattagttaaccctggatgagcgtctgagtcgtgaattaccagcggaatgcgcagcacatgtgccgccaagccgaccggcatgcaaacgtagcctcctttcgtgaatatcacgtctggacgccaggcgattagtttcactaggctctgaacaaagcccacgcacacctttagcgcatcaacaaaatttggccacacaattgtccgtaagcgtagcagctgacgcacaatgctaagattatgatagcggcgtaatttaccgctagcaatgacatctacgcgcaccgagctatcaaagctagccataacattgcgcgcttgcttgctaaatttgcggtcaacccagaaccgtagttctgcatctggctgctgttttttaacttctcgcaacacggcgacgactggagtaacgtgaccccccgagccgccgcctacggctagtatccgcatcttggcctcctatatctattggtttatgtgcagtatatcgcgataactggaaaacaatccccaaagctgcacccgaaaacagcatactactgccgccagcactcaagaacggcagcgttatacctgttaacggcgctaaatgaatcattgatgcaatattcatgaaaaagtgcgcaaataaccagccaaaaatacccgccactaccaatcgcctggtcatatctggtgagtattcagcaactcgcaaaacccgcagcaacaaaaccgcaaacagcactactaccaacaccgtcccggcaaaaccaaaaatctcgccaattacagcaaaaatcgaatcgttaattgcctctggcaagtagcctgtcgattgaatactcttgccgataccgcggccagttaacccacctgtccccaacgcaatcattgcgtttttgatatgataatcgttatcgtcttgcgaagctgatttactcgctccgaaaaacgtcgtaatccgttccaaccggtgcggcgccgttactgccgtgagccccaaaaacagcaagcccactagtgcaatttgcatcagagttttcattcttatcgtactcaccataaatatcgacgccgcagccgccgctatcgccactcccgagcccatgtctttttgcaacactacgacaataaatagcaaaaagccaaccagcgcagctgctgggtagaccgtttctttcaagtcgtttatcttaccctcttggtagcgtttacctaaaaacaccgccatatacaaagtcattgctaattttagcagctcggacggctgaaaattaactggtcccaagtgaaaccagcgataagcgcctagcgtattttgtgctattgcatcaatatgcagaatatttccaatcaaaaagagcaaaaacgataagccaattccaatcatcattaactgaaagatatacttcttgagataatcaaacggtaccaatatcaacagtacaaaaccactaactgccaggctaatacccataagctgtttgaaaaagaaatacgtactagaataatcgctgccataagcactattctgcaaattagcatactgcggcccgaccgaataaacaattatcattcctaccagcatcaacaacgccgcacataacaccaaccaataatcaggccggtgtttacgctggattttgccatcggtaaattgtacgtacctgtcgcggtgccgagcgccaatcacggagcaatatgccccccggtcatcgccatcgccatccccacaaacgccgccacgccagcaatcacccaaaaacgcatcgtcactttagcctctggccagcctgatgcctccagatgatgatgaatcggcgccgacagaaatatcttgcgatggaataatttcttgctggtcatctgcaacaagctcgacccagcctcgaccacgaacaatatgccgataatcggcagcaaaaacagcgtgttggtcatcatcgctaccacgcccaagctcgtcccaaaagcaaagctgccaacgtcgcccataaagaaccgtgctggaaagatgttgaaccacaaataactcagcaacgcgccgaccactgtgaaacagaacgccgctaacttcaaatggccttgcagtagcgcaatcacaccaaatgccgaaaacgacattaccagcaaaccgcccgccaagccgtccaggccgtcgcttatattgaccgcgttacccgtcgctaccaccgcaaacacaaacaatccgacaatccacgcgcccatttgccaatcgccaacgtatgggatatgcaccgacgagtagccgagcttacagaagaaaaaccagcccagcactagcccgacgccgataatcatggcaaatttcacccagctacgcaagccagcatccttgcgattagagccaaaaacattcaaaatatcatcaatcagaccaatcaccgcgccgccaaccaacgccgccaatggcagccaagtttgcgctcgatccagattaaaggccagcgtcaccgccataattgccactacggcaattattcccgccatggtcggaatatgccgctcgattttcttcttatgcaataagttaaaaatcttgagtttttcgccagttaccgctgctgtacgctgtgttttccagaatttatatttgtaagcaaaatatgtatatactggcgttagcagcatcgccagtagaaacgccatcaagctcattagaaaaaccgagttcaattcgtttccaaaagttacaatcgacatactaccattatactccctaccctactctctcggggctaattttaagtattttatcatccagttggatatctcgttgaaaatcggcttggcatccgagccgccgcccataccgcggccgtctgcagctatctctaccatgataacgtaacgcgggattttaccgtattcgccgccaaaacccagataggtaccaatcgtctcgttatcatcgtacttgccgttaacaatcacctgcgaagtaccggtcttgccgccgactagccagcgttccgagtcgtcatgcggcttatatgttgcataatgagcctgatgcaccatttcgcgcactgtctgcgacgaagcttcgctgatagcgggagtactggctttttgcgccgctgccgtaaatttgccattactatccattgtaccgttaatcaccgtcggcatgtgatatgtaccgccattaactaccgaacaaaaaccacttgccacctgcagcattgtcacattcataccctggccaaacaccatattactgtaacgcacggcattaccttcttgctgtgctggcgaaataactgtgccgcccgcctcattcgccagctcaataccagtcagctgccccagccggaaacgattataaaagtaatcataaatcgtatcgcgagcactgcgagtaatataggaaccatttcccagccgctgcgcaatcgttaccataccagtattcagcgaccagttcagcgctgtctgcatagtgatgtcgccgttcaagaagctgtttttagaagcgttattgatcgtgatatcttcaaccttgattttgccagtattgttgtaagtactctgcggcgagataacacccttgtcgattccggtcgctaccgtgaaagtcttgacatcggaacctgcctcgtacggatgcgaaatcgtatc

SEQ ID NO: 3527 - DNA, 15200 bp, synthetic construct
  misc_feature 1..15200: note = Synthetic
  source 1..15200: mol_type = other DNA
cagacttatcgccaacgctcttctttcgacccgcatcagctcagccatgtcgtccgatttatccaccaactcctgcatcagtggcgtgagcataggaggcatagtcacggccgatactcctcgtcgatttgatcctctagtcctttacggtacgcaccagccacccaactctggctcgccactttgcggtgcatcgctatcgactctctatgtcgctcctcggggggctgaacacaagtctgcgctttggccagaatagtatcgaacacttctttgtcggctggacgaatatgcttaagtccaagaggcatatcgtcgagccgatcgtcaacgataacttgattggcccgaataacccccaaaagagcactatcgggcacatgctcgcgcagatacgcttcttgccggtcagaagaaacttggttaccgatcgcaaaaacccgctcgccaacaccggcctccgtcgccagttgcaaaaatcgctgaaacacatcaatgccctcgcgctctggcttgaccacgaaaatcaacatatcctgcataaacagcgtattaccgaatgtatcattacccgccacgctatcaatcaccaccatatcatcatctgccaactgagcgtgagatagcatattctccgcgatttcttgtgcgccgtgatgacagtctatacctattcgatcgacactatacgacccgacggtaaatactcgtgcgccatgcttcactacaacaccgaacgcccgggtgataggattattctcatcgagtgtccatacaccgctctcgcgacccggaggggtagtattgaggaactcgtgcacctctactctaggatttgcgcctttcagatgactccgaatatcgtgcaccgactcactacccgctagctcgataactggctccgtcacccctagcatacttgccgtatggctattaacatcgacatcgagcagcgccactcgcttgtttttttcggcagcgtacagagtgaataacccagatatagtgctcttgccactgccaccttttcctaaaaatgctattctcataactcatcattttataggccgcgccaatctattgcaaatttgttgcaatagtaagtataattgcaacatggaacgcctcgaaacattactccgcaccagcaaacatcgcctgaccgcgccgcgcaaacaagtatttacagctcttaaaaaagcacagcaaccattgtcgcttcagcagctcactcgctcggttcctgcaatcgatcgcaccagcctataccgcacgctcgaattgttcgttcagctgaacatcgtccgcgttatccatactggttggaaaaagcaatacgagctagcggatccattcaagccacaccatcatcatttacagtgcactcgctgcaaagaacttatcgaggtaaaaaatcctcagctagaacagctaatagaccgtatcgtccgtgagcatcattacgcattgaccaatcaccatttcgaactcgaagggctgtgccagaattgtcgaaactaaaaaagcgccaggtaagggtgggcatcacctggcgccatattacccttcaacccaccctgggcttgagtgtttgaagcgatcgcatctaactccacgaagatggtcgcctgagccgtaacagctcactactggatagtcaaaccctaaagttcagcctttgaaaaaggggtgttaaaggggttagtatacatataatgcttctttccagagaaaggagccatagaaagtggagggtagttactctttatggcacattatatgcaacctaacgagattcctaaaataggaattcttgttaaaatagggggtataaggtgcttgattatcctcgcaggaataatcaatcactttcaatattagcacacaattgacatttagtcaacactttttgaaacatttatggataatatcaatataatcaacccccaagagcacgactacctcaagataagcgagtgtattgctgatttatcagataagttgtatgttatgggagaattacccgctaccaggcagccgtccgtggcaattgttggctcacggaagccgactgcctacggtaaagaaataaccgaaagaattgctggggagctggcaaaaaaaggagtggttatcattagtggactggccatcggagtagatgcgttagctcataaggcagcgctggcggcaagcggtaccactatcgcagttctcgcaaatgggctgcatcgtatatatccgaacactaaccgcgagcttgccaaaaccatcctagctaaaaatggtgctattttgagcgaatatgagcctggggttgagccaatgcagcatcggtttctcgagcgaaatcgaattgtcagtggactatcagatatcgttatcgtgacggaagccgcaagccgtagcggtacgctcaatactgccgcccatgcgctgaatcaaggaaaaatagtgttcgccgtgccaggaaatatcaccagccccatgagcgcaggctgcaaccaactcatcaagcaaggtgcgatacccgtgctagacactcaagatattctagaagccctcggcctcctcgacaacaccaagcaaacactattgccaataggctctactcctctggaaaatgatatcctcaagtccctgcaaaaaggcatacgagatggcgatgccatattgcaaacactaggtgccaatccaagcgagtttaataccgccctcactatgctcgagataaacggtgtcatcaaagccctcggggcgaatcagtgggcattgagctagtgttcccatgaaggggcttcagcggcagcagcaccgatgccagctggcacctcctcgcgcaatacatcttcgggtcgcaaaaagtccatccctgcttcagtcatttgcggaaggaaatactctggatctctcggaatcatagccttactggggtcatatgcattgcttgttcccacgccattgacttcaccatagccactatccatactatttctccttccggcaataatattatctatatgcgtagtatactcttattcgctataagtacaagcttttcgcacgcttctttcacaaagctggacttttctcgaatataaagatgaggcgtatcgaattcacactcaaaagcattgcaaacagccgcacatgagaggattcggaccgaatttagcgatggaatacaagatttattacctcgttttgaagcattataactacgacgacagtcaatatatttgttttttccaggcattaccgttactatagtaaacgatatgagcaaaaatctagttatcgttgagagcccagcaaaagctaaaaccatagagaagtacctcggtaaggattttcaggtgctctcaagcattggccatatccgctctattgtgaagaaaaccaaggacggcacgccaccaattgatattaagaatgatttttacactcagtacgaagttgaccccgagaaaaagaaggtcattaccgaactgaaaaaggccgtcaaagccgttggcaaagaacatgtctggctggcgaccgatgaagaccgcgaaggggaggcaattgcctggcacctctgtaaagtgctcgatttaccacccgaaacaaccaggcgcatcgtctttcacgaaatcaccaaaagcgccatcgaagaagcggtgaaacacccgcgaaccgtcgacatgaacctcgttcaagcgcagcaagcacggcaaatcctcgaccgcatcgtcgggttcgagctgagcccagtcgtgtggcagaaggtccccggcggcaagtcggcgggacgcgtgcagagtccggccgtacgactgcttgtcgagcgcgaacaagaaatcacggcgtttgaaggcagctcgcagttcaaggttgtcgcgctgtttatccacgacaatcaagagttcaaagcagagctcaatcagcgattcgacaccgagaaggaagcaaccgagttcctcgaacacctcaaaggttcatcctttacagtggcggacatcacgaaatcacctggaacacgcaacccagccgcgccatttaccacctcaactttacaacaagaggccaacgcaaagctcggcttcagctccaaagctaccatggcggcggcccaaaaactctaccaagccggtaaaattacctacatgcgaaccgattcagtcaacctcagcggccaagccatcgccgctgcaaccgacttcatcaaacaactctacggcccagagtactcaaccgttcgcaagttcaaaaccaagtccgcctccgcccaagaagctcacgaagccatccgaccaaccgacatcacccgagagtcagtctcctcgaacgaatacgaccaaaggctttacgatctcatccgccgtcgcacactagccagccagatgagcccagctaagctcgagaaaacgacgatcaccatcgatattacatcggtagagccgcttgctacctctttttcagaagcctctgcagcccgagtttctccgagcgccggggcctcggccgaaacccggagcgaagccgattctgaaaaagacggtagcaagaaggcaaccgcaaaaaccactctcatatttgaagcaaaaggcgaagtcatcatcttcgacggatttctccgtgtctacggcggtggtaaggaagaactactgccaaaagtaacctctggcgacacactctccacccaccacatcgaagcccgccaaacctttgcccgcccaccagcccgctacaccgaaggttcgctcgtcaaaaaactggaagacctcggcatcggccgcccaagcacctacgccaccatcatcgacaccatccaaacccgcggctacgccgaaaagggcatgggtgagggtgaaccgcgcgacatcatcgtcatcacctacaacggcgaaacggtcgacagggaagtcgtccaagaaaaaactggctccaacaaaggcaaactcctgccaactccaagcggcgagctcatcgccggcttcctcggcaaccactttacccaagttatcgactacgattttactgccaatgtcgagaaggaatttgaccaaatcgctgacgctaaactggccaaaagcgacatgctgcgtgcattttacacgccatttcacggattgatcgaacaatctgacaacattgaccgctcgaaagttggcacaaaccgcgaagttggtatcgacccgaaatccagcaagccaatcatcgcccgctttggccgttttgggcccatgctacaactgggcaccaccgaagatgatgaaaagccacagtttgcgccgctgccaaagggtacgaagattgagactatcacgctcgagcgagccctcgaagcatttaagctgccacgaatcgtcggtcaaacaccagatggcgtcgatatccgtgccaatgttggccggtttggcccatttatccagattggcaccaaaacaaagaccaccacaccactgtatgttagcctcaaagaagatgacccgcacgacatcacgctcgagcgagctcttgaactctatgccgaaaagctgaaagccgaagccgagaagaacatcgcagactttggcgatggcatcaaagtcctgaacggccgttttggcccgtacgccaccgatggtaagaaaaatgctaaagttccaaaagataccgacccaaaatccattactcatacgcaagccaaagaattactcgcaaatgcccctgctaaacgagggagagttcgtaacactggcaagaaaacaaccacaaaaaagaccgcaacaaaaaaatctacctctaaaaaatcataagtttatgtatctatcgtcaaatatagtgttatcttaaccatatatctcaaatacaaaaagtctcaaaaaatcatttaccataagcgccaaagatgtgctataataagattatccaccattatgtttgacatagaacaaattttgttctataatgaaaacaagttaatcaatataaatgaagtaatagcggtgaggcagaagggcgtaaccagcgatggaacaaccggcagataacaattcttcaatcgtaaagcaagcgactgatgaggttctgaaaacaatcgaacaagagagagagcgagagatcatatctcgtcgatttggactttttgatcgcaaagaaacgcttgagcaaattggtgaaatgctcggcatcaccagagagcgcgtacgacagttagagaaagccattctcattcgaataaagcttgctgctgaaaaaggcgatatcgcaggactacccgaagcagaaaaactgatcgttcgcgacctcagcgaaaatggccgtgtatcgagagtagatgcagccgccgaacgaattgttggagcaaagcttgccaaaagcctcaaatcacaaatagcattcgtagctgaactttcaccaaaactcaccgtcgtaaccgaaaacgacgatttttaccaagcgattggtatcaccgaatatggcaacgacaaagatatcaagcaacatgtcgaagatatcgtgaaggccatcaaaaagcacggcgaaccaatccacatcgaagctttgcatgatagcctctcatatgaacatcctagccatgtagctggtcttgcaagcgtatccaagaagctatcgaccctgaaagatgtgtggggcctcaacaaatggccaacggtaaacccaaaaaatattcgcgacaaaatcttcgttatcttagcagaaaacggcaaaccacttcatttttcagacattgccgctcgtataaaagaaagtgatttcaagcgacgaaatgtcactactcaggctattcacaacgaactcatcaaagacaagcgcttcgtactcattggccgcggcatttatgccctcgaatcatggggatacacccgaggtactgtcactgatgtgattcgcagcgtcctcgaagaggcagacgagccgctccaccgtgacgaaattgtcaaacgagttctcgacaaacgacaggtaaaggaaacgactatcttgctaaacctacaaagcaaaccagagttcaagcgcgtcgccaaagcgacctacgcgcccatgaaaccagccgacaaatagctattgctcacacagaccagtcgcgagcacacagtagcaatccaggagctcactacgcgcatcgatcgtatcggatagtagaatagctgtcattatttctcagtacctcttgctttttttcaccattcgtggtatgataaaatagatatgaatgtattacagtggtttttcagcatcataacccagtggtatgtttgggtgcccatcactgttatattgctgtatctcgcatggcgcaataccaaacaagttgaagccattaaatcgatagacagcactctgttatcgctcgaaatacctcgatcaaacgacaaaaaagagccaaccgccgagcaattattcgctagtttacacggtattctaagagatgccaaagaattaaagctcaacgacggcatgcaagagcatttaagcttcgaaatcatctctgttggtggtaaaattcgttttctcatttggacaccgaaaaatctccaaggattcgtcgaaggacagttgtatgcacagtatcccgacatacaggtgactgccactactgaagattatgtcagccacgaacgacagcactctattgtctatacctctgaagttactctcacaggcaatgaatttttacccataaagacctactcggaatttgacgcagacccactagctggcattacgaacactctgtcaaaactagaaaataccaaagatgagatatggattcagctattagttcgtccagtgggcaatgattggcagcgagcggctgaaaattggggtggttcggctaacatgagcagtccgctggcacttatcaactctggcggctttaacctgcgatggtttgccggactctttgaagccctctggaaaccgcctcaacagggaagtggcactagaacgactagccaagatactgctatagccgatgcggtggctaaaaaagctggcaaattgggctatcaggcaaaaattcgtatcgctgtgctcagtaataatcagtcaaatgctagactaaaaatgcagtcaatcgtcagtactttcaagcagtttaatcaaacggggctcaatggctttaagatggtaaacgatagcttcaataaggaagatttagggcgctacaaggtacgactcttttccgataggggatacctgctgaatatcgaagagttagcaagtatttttcatctgccacatactgccgcggcagctccaaatatatcgtgggcgggcagcaaaacggccgaaccacctgcgtcgttgccggttatttcgggcgaccagactatcgatcaacatatcagtgcgtttggtatgacgaactttcgtgggctgaatcatcagtttggtatcttacgacaagaccgttcaaggcatatgtacatcattggtcatacgggagcagggaagacgggaacgctcgagctattagcgctgagtgatatttttcacaagcagggctatgccattattgatccgcatggtgattttgctatcaataatctgaaatttattcctgcctcacgattgaacgatgtcgtgtattttaatccagccgataccgagcacccgcttggttttaatccgctggaaataactgaccccaaccaaaaatcaattgtttcatcagagctcataggtgtgttcaagcgaatgtttggtgactcgtggggcccacgacttgaatatattttgcgctacaccattttggcgttactcgataggcccgatccaacgcttctcgacatcacccgaatgctcacagataaagagtttcgagaagagacactcgtgtattgtaccgacgctgttgtattgcagttttggcgggtcgagtttgcgtcgtggagtgaccgcttccagacagaggctatagcgcccgtcctgaataaagtgggggcttttacggctaatccgattatccgcaacatcgttggccagccaaaaagtagcttcaatattcgcgagataatggatagcggtaagattttggtcgtcaacctatcgaaagggctcatcggcgaagataacgccgctgttttgggcgcttttgtcatcacaaagattcagcttgccgccatgagccgctctgatataccaaacatcgaagatcgacgaccgttttatctatatgtcgatgaatttcaaaacttcgctaccgattcttttgcaaccattctttcagaagcacgaaaatacggcctgaatttgaccgtcgccaaccaatatattagccagatgaacgaggcggttcgcgatgcagtgttcggcaatgttggtactatcatgtcgtttcgggtgtcgccagacgattcgacaagcctcgtcaaacagtttgcacccacatttgaggcgaacgatttattacagctgcataatcgggattttgtcatcaacatggtgattgacggcgaaaagcagccggcctttagtggcagaacgctcaatttaccaccagagcaaacgagtcttttgacacaaatcatcgctgaagctcgtcaaaaatatagccgaccaaaggctgaagttgaagcagaaattcgtgagaaagtactgctacggccagttgaggtaacgccggcgcccgccctaacgccactagtgcaggcagcaccccctgttttcgatagagaggagcatactcaagctcccagtgcctctactattccaacacatccacgcaagcgccgcagccgaagccgtcggaaaaagcaaactaatagcgcaagcgacggttcgttgtttattcggcattaaaagttgcgccatatgacagatgaggtataatggttgtacagtcccttaagtaaggattgtacaactatccaaatgcgttaggtttctataataatttagtttattatgaactaaagcaaagctctaatccgtccgtaagggcggattatcttttgccatcacacttatgctcgcttttttggcaattttacgctataaatagtatatgaaatattctcttggactcgatattggtacaacatctattggttgggcggtgatagatttagataatgaacgcatccatgatgtgggggtgcgtatttttgaaaagcctgaagatccacagagcggcaagagcttggccgaacccaggcgaactgcccgcagcacccgccgtcggttgaagcgtcgtcgtcagcgactcaatacactcaaggcattctttgtcgagcacaggctactgacacgcgagaagattgaagaactcctcgctccgaatcatcagtacgacccgtatgaaatccgtactcgtgctgtcgtcgagaaagtatcaaacgaagaattattcctcgcgctttatcacattgccaagcgccgcggctacaaaagtaatcgcaaatcgctagaggaaaaagatactgagggttcgcgcgtgctttctgcgctctctgataacgcacaaatcctcgccagctatccatcagttggcacagcacttcgccacgacgcaaagtttaccgaccatcgccgtaacaagcgcgatgactataccaattctttcggccgcgctaatttcctcgatgagacgaaaaaaattattgaaacgcaacaggcgaacggactggagctatctaacgacgccatcaaggagctgttatttgccgacgaacatagcggcgacttcagcggcatattctcgcagcgaccgttcatgaccagcgagctgattcaaaagatgcgcggcacatgtgagctcgaaccaagccaaccgcgtgcaccacgcgctagttacagcttcgagctattccgcctcgcgcagaatctctcgcaccttcgtatcgtcatatctggcgaaacacgggcattaacaccagacgaaattgcccaaattgtcgagaaagccaaaaatatcaagacactcaaatacacacatatccgtgaagttttgggctacaaaaacaacccagactttagctttgcgcgcggcatgattcgcggcaaggtaaagccagaggacaagacaaacggcgaggcgaataagtttgatgaactgacattttatcatgctgttaaatccgcactgaaagattcgccagcagattggagcaggggagagagcaatcctgaactactggatactatcggcgaaatcctgaccatcaataaagatgacattaacttacaaaaggcactggctgaaattgaattatcacccgaaagtatcgcgaaccttctgaggctcaactttagcggcttcgggcatctgtcgctgcgggcactccacaacatcacaccgcacctactggacggcaagaactacgacgaagcagtcgttgcggcaggctatcgattcagccaaacgctctcgggcgataaaacgaaactgccaccactaaacgagcagcaatcacagcagcttactaacccaatcgtcaagcgtgccgtctcgcaaacgatcaaagtcgtcaatgcaatcattcgtaaatatggcatgccgacccgcattggcatcgaggcggcgggcgatctgtcgaaaaacttccaggaacgcggcaaaatcaaaaagtcgcaagacgaaaatgccgccaccaacgaaaagatcatcgaccgcctcaaaaatgaatttggtgtcgccacaccgacagggctacaaatcaccaagttcaaactctacaaccagcaaaacggtgagtgtatgtattctggcaagcagctcaaccttaatcaactttttgccgacgaacgctacggcgaaattgaccatattattccattttcacgctgcggtaacgatgggctcgtcaataaggttctcgtactgacggaagaaaaccaaaacaaaggcaacctaacgccatacgaagcgtgggggcatgacgaggcaaaatgggcagagtacgaagcccgtgtcaaagcaacattcttgccatttggcaaaaaagatcgcttgcttacgaaaagcccgcccgccgaagaatggaacgaacgcgcgctcaacgacacgcgctatatctccaaattcctccgccgctacttccgcgagaacctcaaaccaacccgagaagaagatgacaagggcaaacagtgggtcatcacgccaagcggaccgatcacctcatacctccgaaaacgatggcaagttggcagtaaatctcgcaaagaaaacaacctccaccatgctaccgacgcgtgcattgtggcatgcgtcaaccaaggagcaattcaaaagatatcaagtcttaataaatactacgaattattccccaagggtggagtagaaaccgatgaagtagtagacaaactaacaggtcagtatgtccatcgtggcgacctcgagcagcacatcgtcgatactttgccgtgggaagattttggcaaggaagtgcgattacggacaggaacggagaggaataaaccctatgcaacacctacggagctacacgaagcactcattggactaggcaattatgacgacggtttcagactatcggtaaaaccgatatttgtatcacgcatgccaaaacgaggcggcaaaggctcgaccaaccaagaaaccatccgctcgccgaaagtcgtcgaaggttacgaaaatgacaagggcggaaatgtcatcgctcgcaaacagcgcgtcgcgctttcaagcctgaaactcaaggacctagaggattctccactcaaagatgagtacaaccgaaccaagagtaaggactcttcaggcatgaaatcgctctatgaaatactcaaacagcggctcgaagacaatggcgatgacccaaagaaagcgtttgccgaaccagtctacaagccgaccaaaacaggcgagcaaggcaacatcgtgcgaagcgtgaaagtatacgacacactcaaatcaaagactggattctatatcaatgacggcaaggcgtttgtaaataatggctcaactattcggctcgatgtttacaagcgcaaaaacttcaaaggtgagcatgaatactacttcgcgccggtttacacacacctcattcacgctgataaagtcgagatattgccgacaccgacaggacgaagcaacgatgacaaatcagacctaaatacaattcgcgaagcagacggaaagatttacgcgacagtcgaaaacggatttgagaagcagttttcgatttacccaaatgattatgtgcgaatttatatgggcaataagattgttgaaggatactattcaaagtatgacatagtcaatgctgtattctcgctcgtggctcactcaagttcagataagagcacatttattaaggcgtcaccacggacggcagttgatattcaacgcctcgacatctctgtccttggcgataactacaaatggatataaccccatggcatggcaagtgatcggcatcagcaaccccgcacagctcagtgtcaaagaccaccagctggtcatcaagcaagacgacacggtgtcgcttcctatcgaggatatcgacgcgcttattcttgatagttacggactaacatttaccgcaaacctcatcaccgagctgtctacgagtggtacgacggtggtgatctgcgacgagaaacacttgccgtcgagcgttatcttgccgtacagccaacattcacgcggggcaaaagtatcgcgccagcaacttgccatgggcgcaacactgaaaaagcagctatggtcgcgaattatcgtgcaaaagattacgaaccaagctgatgtactcgcaaagcatcactacgatgatgcattcctacgcaagcttgcaagtgaagttaaatcaggcgaccccaccaaccgcgaatcgcaagccgcccgggcgtatttctcggcgctcctcgatgacgccacccgccgcaagcctatgtggcacaacgctgcattaaactatggctactccatggtgcgcagccatatcgcacgccacattgctgctcgcggactcatcgcctcgcaaggtatatttcatcacagcgaactcaacggtttcaatctggcagatgatatcatcgagccatatcgtgccgccgtcgatgactatgtgctctctgttgttgcactgcgccatatcggtgatgcagatgccagcctgacacgcgaagatcgacaacttatcgttgatgtcctcaatatgcccattatattacaaggcaagcaatttacgctcaaacacgctgtcgagcggactatagaaagcttcatacaagcaattcaagatgatacacccgcctcgttgcttcttccagatataaaaatagggaattcacccctatagctattgacaatgagccacattatgtgatataatggaagtatgagtatacatgaggcgaggaatgtataaatttatgcgagttgttgttttattcgatttgccaactggcacaaaagcagagcgccgtgccgcaacacagtttcgcaaatcgttgctcgatgatggctttgacatgctgcaatacagcgtctattcacgcctatgccctaatcgtgacggggcagagaagcatatgctccgagtcaagcgaagtgcgcccgacagcggctccgtgcgcgttttataccttactgagcatcaatttaccaatatgcacattatcgtgggtgagaaaacgacacaagaagagcttttacccacaaaacaactagcatttttctgagtgtaatttttacaacaatgttacaattatgtttagtcattttacctagaaatacgacctcgacgaatatataaaccaattttcccaaacaaaaaatcacctcattacaggggtgatttttcgtaagtattatacaactatccaaattgttagggaactataaccgctgtcgtaaacgcctttaggtgtaccgcattatacaactatccaaattgttagggaactataaccttgtttgctgccgaacggtcgaattctggattatacaactatccaaattgttagggaactataactacgacttcaacaagggtatgagccactacattatacaactatccaaattgttagggaactataacctatttcggcctcttttagctcgtcgccgtattatacaactatccaaattgttagggaactataacaccagctatacgggtgccgagttgttttttattatacaactatccaaattgttagggaactataactgaactatacgagctatgcaaggaagtgtaattatacaactatccaaattgttagggaactataac

SEQ ID NO: 3528 - DNA, 14429 bp, synthetic construct
  misc_feature 1..14429: note = Synthetic
  source 1..14429: mol_type = other DNA
gaacgattggtttttgatttggcaaaatatggcataataatcattagcggtttagcgcttggggttgactcgattgctcatcggacggcgcttgaggccaacggcacaacgttagctgttgttgttaacactttgcccgatatctcaccgcgaagcaacatccctctcgccaaacaaatcataaacagtggtggagcaatcatttcggaatatggcccggggcatgatgccaatatcggtaaatatagtttcctccaacgcaacagattagtcagtggcttagcggacgccgtcctgattaccgaagcctcggcaaaaagtggcacactcaataccgccagccacgccctcactcaaggcaaggaagtctttgttgtaccaggcaatatcaccagccccttatccgaaggttgtaataatcttctcaaacagggagctacgccagtcactgaagctagagacattatcgaagttgttgctccagaattgttaaccaccgataagcaaacccccttaccgctcggcgacagtccagctgaaagttctattctacaacttcttgcgacaggtatccgtgacggcgaacagctccaggcctcctctggactctccgtggctgatttctcaaccgccctaacaatgctcgaaatcaacggtttcatcaaaccactcggcgccaaccaatggacaatcaagtagtgatttggcgatttagatttttttcgatagtattagttatgcaatgaagaatttagttatcgttgagtcaccagccaaagcaaaaactatcgagaaatacctcggggcagactttaaagttttgtccagtgtcggccacatccgctcaatcgtcaagaaaacaaaaaccggcaagccgccaattgaagtcgataatgatttcttcgctcattacgaagttgaccccgaaaaaaagaaggttgtcgctgagctcaaaaaagccatcaaatcggtcggcaaagaaaacgtctggctagcaaccgatgaagaccgtgaaggggaggcgattgcttggcatttatgtaaagtacttgatttaccaccagagacaaccaagcgaattgtcttccacgaaattactaaaccagccatcgaggaggccgtcaaaaaccctcgtgtaattgatatgcaattagtccaagctcagcaatcccgacaaatactcgatcgaattgttggctttgagctttcgcctgttgtctggcaaaaagtccctggcggaaagtcagctggacgcgtgcaaagcccagccgttcgtttattggtcgagcgtgaacgagaaatcaccgcctttgaaggtagttttgatttcaaagttagcgcattgtttatccatgataaccaagaattcaaggccgagctaaaccaaaggttcgccgatgaaacggccgcccgagattttctcgaaagcttagtcgacgcagagtttattatttccgacatcgccaagacacctggcacacgtaaccctggagccccatttacgacctcaactctacaacaagaagccaattcaaaacttggttttagctcaaaagcgaccatggcggcagcccaaaaactctaccaagcgggtaaaatcacctacatgcgaaccgatagcgtcaatctatctggacaagccatcgctcaagcaactgattatattaaacaattatacgggccgaactattcaaccgtgcgtaagtttaaaaccaaatcagcttccgctcaagaagcccacgaagccattcgtccaactgatgtaacccgcgaaactgtttcttcgaacgaatacgaccagaagctatatgaccttatccgccgacgagttctcgcatcacaaatgagtccagccaaactagaaaaaactactgtccagatagacatttctggcgaaaacaagtcgccagcaagcctgcactttgaagcaaagggagagattatcgtttttgacggatttctcagagtttacggtggtggcaaagaggaaatattgcccgcagtctcaactggggacaaattaacctcacataacgtcaccgcccgtcagactttcgctcgaccgccagctcgatacactgagggctcgcttgttaaaaaactagaggatctcggcatcggtcggccaagtacctatgcgacgattatcgatactatccaaactaggggatacgtcgaaaaaggtatcggcgaaggtgagccacgagatattattactctaagttataacggcgaatcagttgagcgagatatagttcaagaaaaaactggctcaaccaaaggtaagctcataccaacccccagcggggaattgattactagcttcctaaccaatcacttcgatcgtgtagtcgactatgatttcaccgccaaagtagaggaaaaatttgatgacgtcgcaaaaggggctgccgaaaagtccaagattcttcacgaattttatacgccatttcatcaactgatcgaaaaatccagcgagattgaccgctcgaccgtcggctccaatcgtgaagtcggcactgatccaaaatctaataaaccaatcctcgctcgatttggacgttttggtccaatgcttcagctcggtgacaccgattcagaagacaaacctcgcttcgccccaatgccaaaaggcgccaaaatcgaaaccgtcactctcgaacaggctctagagatgttcaagcttccaaggctcgtcggccaaacgactgatggcaaagacatcaatgccaatatcggtcggtttgggccatatattcaaatcgacaagctattcgtcagtatcaagcccgaggatccattgactatctctcttgagaaagccctcgaattatacgaagctaagctccgcacagaagccgaaaaaaatattgctgattttggtgacggcatcaaaattctcaacggccgattcggaccgtatgccaccaacggcaagaaaaacgtcaagatccccaaagacactaagcccgagtcaataactcatgatcaagccaaagaaatgctcaaaaatgctcccgtcaaaccagttcgagctcgaacgaaatccaagaaatcaaagaagtagccaaaaaaacatatgcgctatctctgtggtagctagctgtaacgacaacaccatatctaggttatggttcaaaatttttatatgacattttataggataatctcaaaaactatgctataatcaatgtagcttaattatacagttgacatattttctaggtagttgtataataagaatatatagttgaattataaacatttcaggtgggcaagagaggaaacaaccaaacgtcatgagccagaccgatcagaaagacccagcaaccgacttaaaaaacgtcgttcaagatatcctaaacgacatcccccaagatcgtgagcgtgaaatcatcagtcgtcgatttggtctatatgatcgcaaagaaaccctcgaaagcatcggagacatgcttggtattaccagggagcgcgtcagacaactcgaaaaagctatcctaacaaaactacgccaatctctaaaagatggcggtatcccatcggtggccgttatggaaaaaaccctaaccaccaatttgtctgagatgggacgagttgctcgagtcaatgagctagctaaacgactacttggtcgtgaaggaaacccaagcgataacgcccacgtcgccttcataactgagcttgtgccaacaattaccgcaattaacgaaaacgacgactactatcagtcagcaactatcagctcagttggcgatgaaaaaagtgtcaaaaagcaagttgaagaaatcgtcaaatttatcaaagatcacggccagccaattactggtgaagaaatgcacaattcgatgaaatatgagcatccgcagaatattatcgcccttgcaagcattagcaaaaagttggctgagttaaaaggaaactggggacttgtcaaatggccaactgttaatccaaaaaatatccgtgacaagattttcgttatcctagaagacaacggcaaaccaatgcattttagcgcaatcgccaaggcgattaaatcgagtgactttaagcgcagagacgttaccactcaggcaatccataacgaactaatcaaagacaagcgatttgttctgatcgggcgggggatatatgccctcaaatcatggggcttcaagagcggaactgtgtctgatattatcaccgacgtcctgaaagaggctggtgagccattgcaccgcgatgaaatcgttcaacgtgtgctcaaaagtcgccaagtcaaagagacaacgattctactgaacctccagtcaaaaccacagttcaaacgcacatcaaaagcgacctacgctctaaacgaacaagcataagttgcaaacactcataagagatgagaaaatgtcaatagtatggaaattatctcttggttaattagtctactcctccaatggtacgtctgggtgccaattgtcctaatcttgggcttcctgacttggcgcaactatcgaaacgccgatcaataccagccagtcgagggtgaacttttggttctggaaattccaaaagcaaatgacaaaaaagaactggccgctgaacagctgtttgctagcttacatggcatactgcgtgacaaaaaagaactgaaattatcgggaggggttcaagaacatttgagcttcgagatagcctcggttgatgggcagattagattttatgcctgggtacccaaaactctccgaagctttgtcgaaagccaaatctacgcccagtacccaacagtgcagatttatcgagcaaacgaagattatatcatccatgaacgtgatcactcggttgcttatacagcagaattaactactacagcgccagaatttttaccaatcagaacctttcaaacttttgaggttgaccccctagctggaatcactggcacgctggctaagcttgagtcgactggcgaagaattatggattcaagttttggttcgtccgcttcacgatgagtggcatagttatactgatcaatacgtcgagcgagtcaagcgaggagcgggttcaattttgcctggctttggtaggggtggtggctttcagtggctaatcagcatctttaccgccctctggcaaccacccgaacaaggaaccagcaaggacaagccctctgttgaagtttctgatagagacaaaactcgcatatctgaagccgaaaagaaagctaccaagctcggttacgacgtaaaaatccgcctagcatacctaggcgaaagccaaaccagcgccaaactacacatgcaagccctagtcggcacatttaagcagttcaatagcaccaacctaaacggcttcaaatccaccaaagccgtcttcggcaaagaaattctcgataaatatcgtgagcggtcatttgctggcgaagggtttatcctgaatatcgaagaattagcctcagtttatcacttacctcataccaacgtcgaaacaccaaatatcgtctgggcaagcgccaaaaccgccgaaccgccagccaaattaccaattatcagtggtaacgacgaattagatgatgaaatttcaccctttggcgtaacgaactttcgaggtatcaaccatcaattcggtctgctcagaaatgaccgatcaaggcatgtttatatcatcggtcaaactggtgccggcaaatctggcttgctcgaattactcaccttgagtgacacattccacgagcacggttacgctatcattgatccgcatggtgattttgcggtcgaaaacttgaaatttatccctggttcgcgaataagcgacgttgtttacttcaacccagccgacaccgcttatccgctaggcttcaacccacttgaggtgattgacgtaaaacaaaaaacgaatatatcatcggaggtaatcggtgttctaaaaaggatgtttgaagattcttggggaccacgcctcgagcatatcctgcgctacacattactggctttacttgatcggccgagcacaactatgctagatatcacccgcatgctgactgacaaaaaattccgtaacgagacgctaacttactgccaagacccagttgttctccaattttggactgtcgagtttgctagctggaatgacaaatttgcctctgaagcaatcgcaccagtactaaacaaggtcggcgcttttactgctaatccgattatccgcaatatcattggccagccaaaaagctctttcaatatcagacgactgatggacgaaggaaaaatcctcatcgtcaatttatcaaaaggtctaatcggcgaggataacgctgcgattttaggggcgtttatggtgacgaaaattcaattagctgccatgagtcgatccgacatccccaacatcaaagaccgtcggcctttttatctctatgttgatgagttccagaacttcgccaccgattcatttgccaccattttgtccgaggctcgtaagtatggcctcaacctgactgtcgccaaccaatacatctcacagatgaccgagacggttcgagatgcggtatttggcaacgtcgggacaatgatttcgttccgcgtatcggccgacgatgcgccaattcttgccaagcaattcgaaccaaattttgaagcccaagacctgttacagatgcataatcgtaatttcgttatcaatatggtcatcaacggcgagaaggctccagctttctcggctaaatcactcgatttaccaccaattcaagccgacaacaccagtataattattgagcagtctaggcgaatctattctcgatcccgcgaagaagtcgagcaggatatttcgaaaactactcgtgcaacgaaacaagccatcgtccagccaaccgctaaatcagcgccaacactaaagcccattcaaccagaaccgtcaaccagcccagctcaaccacaacaggcagcagtgtcgaccccaaccgaacagacaccagagactaccccaaaaaagaaacgctcacgctctaggcgcaaaaaagccactgaaacaaccgagccaattactacccagaccagtcaagaggaagtcgctcggcagaaacaagccgacggcatcctgaaagttaaacacagccctcaccagccgagtagccctaccgccaagcctagcaccccaaaaacacccccaactagcactaaaatctcctcctccaaaaagcccgaggataccctgctcaaaatcaagcactagactaacctaaaagaaaacttagtgttgagattttatgcttgacattgtgacaaccttttgatataatatatattatgacagatgtcctaaatagtgacaatttccacacctaccgactaaaagcgagcgacagtggtgagatagaggatcccaagactagaaacctaactactgcaatagctcaacaagttatcgcattattaaatgcgaacagagatagcatagaaggcccgaacggagaacagttagatataccaggaatagacgaatcgaccactatcgaaggagcccgaaaaagactagaaaatgtcatgaaacatgacggtggtagattggcaatttatttaacttacgagatagagcaagccgaagacgatgctacagaagaacctatcgtggccgtagttatcgggcaggaaactccagctgatcaatatccaaatatcaaaaatgatttcttacgaagattgttgtatttgtctatggcgcgttcacgagccccagagttacgcatatttggctttggtagcgagatttcagataaagaaaccgaacagatgctgtttgaggatataatcgacggccaggtcgggttagaggaggcccgcaacatatacccacaaaggataactatggtcgagtctggtgacaacagagagcctagtaacccaaagaggccacgtcgccaccgaatgtcagctaggttatctaacacgagacgatttaccagcacctttcttgagagatacggcaagtacaaatcagaagcagaataaaaagcactttttatattttcatgaacagcaccgccccaaacaccgaaaaactcaactaccccaaactattcacctgggcgattaattatctatggactgcgtccaaacgacactttgtaggtcatctaattactataactatccaagtagctacagagataactcaagtttgggtggccgctctagtcatcgacaagataggttcaactctattatctggggcagaagttgggaatctgtattatctcatcggtatcagcgtagggctaatggtgctggacaagatttgctgggtaatgattgcccatttcgaacgacaattatatctcatggggtcatctaaatcttatcaactattcaacggccaactcgcacgactatctatctcccagcataacaacccagaaatcagacaactcattgacagactagagtacgaaggatatgcttggaaaccacttaactttagcttttctatcgtatatgcgatacacgccggcatgcgttttatcacatccagtaccatccttttgatacagttacccatcgtagttttattgctgatcatcggctctatcccatcgatatttatccaacgcaaaagcggagacctcggctggggcatctggggcgatatgggtgatgggagccgagtattctggggagtgtcacataatctcaagcaaaaagaaacgatagaggaaatcaagcctcagaggagcgcaaattacctactcgaacaagcccacaaagccatcaatacctatacaagcaaggccatggctatacgaacaaggtttgccaaactctctatctacggcgcattattcgagatgtttatggctggcgctagttatttatggctaataacgagagcggtagcaggcaaggtgtcttttgacaatttcatctttatgagttcactgatttggcaaaccctgtcctcaatcaggatggtatccacccaggtagcagacgctctatactccgccccatttatgcgagactatatcaaatttatcgaactagaaaatgacctacccaaaccagacaatcctgtcgtactcaaaaataaacccctcagtatagaatttcgtaatgttagctttagctatccaaacagtagcagacaatcactccgtaatatctccctgaccattaacccgggtgatcacctagcacttgtcggactaaacggtgctggtaaaacgacttttatccgtctattactccgtttctacgatcctacaaaggggaaaatactagtagatggtgtcgatatcaagcaaatagacctagattcgtattacgcccatatcggtacgctgtttcagtctttcaaccgctatccattagaatttaagaaaaatataaccttgaacaaacgaactaactctgcgaaatatcaacaggctctagagatttcaggtgctaacagtgtacttaaaaaactagctagcgaaagaacttttcttagaccagagttcagaaatggtgcggatttgtcgggaggggagtggcaaaaagtcgctttggcacgtaatctttacgcaggaggagatgtttttatcctcgatgaaccaaccagcgccatagattcactggccgaaaaagaaatctttgataaattatacaaagaacttgacggaaagactctgataaccgtttctcatcgattcaataccgtcagaaaagcctcaaaaatcatcgttatcgagcaggggaagatagtcgaacaaggcacacatgaagaattaataaaaactggcaaactatatcacgagatgttcacctctcaggctaaaggctacgaataacttcgatagctattgcaaatatataaatcttattgttataatcaatgtgtaactccttaagtaagagttatgcatctatctaaatgcgttaggtttctataataattagtagaaatactaagcaaagctctaattcgcctttcggggcgaattatcttatttcataccgctcacgctcgcttttttatcgattctacgctataaatagaccatgaagtattcactcggactagatataggaacgacatcaatcggctgggcggtggtcgatttagacaaagaacgtatccatgatgttggtgtgcgaatttttgaaaaacccgaagacccgcaaagtggtaaaagcttagccgagccacgccgcacggcacgttctgctaggcgcagactgaaacgacgacgacaacgactgagcactttgaaatcattctttctgtcaaacgacttattgagcgaagaggatatccaaaatatcctcaacccgagtaaaagcaatgactacaaaaaaacaaatgacccctaccgactgcgggaaaaaggtcttagcgaaaaattaacgaacgcagaactttttatcgctttataccacatagccaagcgacgcggttacaagagtaacagcaagtcacaagatgaagatatcttaaaaagaatagccgagcagagagagcgagccaaacagaaacaagaggctggcaaagaatcttcaaagtccgatgaccgactaaaggttctttcggcaatctatgataatcgtgatcttttggtcgagcacaaaactgttgctggtgccctaaacaatgccgaaaaattcagggctcataaacgcaacaaagccgacaaatatcagggatcttttatgcgtgatgattttgaatttgaggcgagtgaaatcttacgcaaacagcgtgagcttggtctacagctttctgatgaaaaaataaatgaattattgtatggtggagactctattatccgcaacgatggcattgtcatagcgacaagcccaggtattttttatcaacgaccatttaccaatgaaaaacttatcaacggtatgcgaggtaaggactcgtataattacgaagatcgtgcgcccaaggccactctaacctttgagcttttccgtctatccgaagatatttctcatatcaaaaacgccagagacccagattgggagatttcgcgcgagcaggttgatgcgattattgctaaagctaaggttacaaaaaccatgacttatggtgcggttcgtatcgctatggggcttaaagataaatataacgagttcgattttggttatatccgcggtaaaaatccagacgtcaaaaagattaagggctatgaaaatatgagcccagacgaaaagatgattgctgaaacgagggaacgtgagaaagcaactttcgcaaaaatggatttctaccaagcgattagctcatcgctaaaagaatttccagaaaagtttgcggaattagacggttcattgggacttttcgataagcttggcgagattctaacaatcaacaaggacgatgatagcagggcaaaagaattatctgatattggattttcaaactcagagataaaaccacttttactattagacttttcgacatttggtaatctatcactcacgactatgcgaaaagctatcccactaatgctcgatggtaaaacatacgataaagccctagaagagatttatcctggaaaatttgccgtccaactatctggcgacaaaaccaagctccctccgctcaacgagcaagagtctcaacaaattaccaatccagtcgtcaaacgagccgttagccaaactatcaaggttgtgaacgctattattcgcaaatacggcttgccgtcgcggataggcatagaagcagctggtgatttagcaaaaaatttcaaagagcgtggcgacatcaagagattacaagaagaaaacgccagccgaaatgagagaatcaaagacaaactcatcgagctaggtgttacgacgccgactggactacaaatcaccaaatttaagctgtaccagcaacaaaatggtaaatgtatgtattcgggcaaatcccttgaactagaacgattgttctcggatgagcactatggcgaaatcgaccatattattccgttttcgcgctgtggcaacgatagcctcaacaacaaggttctcgtgctcaacagcgaaaatcaaaataaaggcaacctcaccccatacgaagcgtggggtagtgatgaaaataagtggaaagattatgaagcacgagtcaaggcaacctttctgccttttgccaagaaagaccgtctcctcgccaagacacctccaaatgaagagtggaatacccgtgcactaaacgacactcgctatatctccaaatttctccgccaatacctgcgcaaaaatctcaaatttgacaatgataagggttcacagcgagttatcacccccactggaccaatcacctcatatctacgacgaatttggcaagtcggcagtaaggtgcgcgaagaagacaatctccaccacgctactgacgcttgtattatcgctagcgtcaatcaaggaactattcagagagtttctagtctcaacaaatactacgagttattttatggtaatgacaaaaatgaaatcaccgataaattaactggtgaaatcgtccgacgtggtgatgttgagcaacacattgcggatgtacaaccatgggaagaattcggcaaagaagttcgtctgcgcacggcagaatacggaacaccaagcgagctacgcaacgaactccgtggtctagcgaattacgatgaggattttcgcgaatccttaaatccgatattcgtttcacgtatgccaaaaagaggcggtaaaggttcgacaaatcaagagactatccgctcgccgaaaattgtcgaggattacgagaataataacggagaaaaaactattgctcgcaaacaacgagttgcactatctgggctgaagctcaaagacctctatgactcgccgattcgcgaaacagatccgaaactatacgaactactgagacagcgtctcgaagataacggtgatgaccccaagaaagctttcgctgagccagtctacaagccgaccaaaacgggcgaacgagggaatatcgtgcgtagtgtgaaagtttacgacacgcttaagtcaaagacaggattttatattaatgatggcaaggcttttgtaaataacggatcaacgattcgactcgatgtatacaaacgcaagaatttcaaggataattatgaacattactttgtgccagtttacacaaatatgctaaagaccgagaaaaaagacggcaaatggattgaggtaatcagcgacccagagattttaccaacaccaaatggtcgcagcactgacgaaaaatctaatatcgatgcaattcgcgaggctgacggcaagatatatgctaccgctggaaatgggttcgaaaaacaattctcgatctatccgaatgattatgtgcgtatttatatgagcaataagattattgaaggatattatgtaaaatatggcataggcaatggtaatttgagtttattacctcatagtcaggctagtaaggatatttttcttaattctgcgccaaaatccgcctctagtatagagcgtttcgacatctccgtcctcggcgataactacaaatggatataaagttatggcttggcaagtaatcggcatatccaatcctgcacaacttaacctgaaagaccgtcaactggtcatcaagcaagacgaaaccgtatcgctcccaatcgaggatattgatgcactaatattagacagctacggcatcacaacaacagccaatctcataactgagctgtctagcaacggcactaccgtggtggtctgcgacgaaaaacatctaccagctagcgttatcttgccttacagccaacactctcgccaagctaaagtttcacgccagcaactcgccatgagccagccgttacgcaaacaactctggcaaaagattatagtgcaaaaaataactaaccaggccactgtcctacagcaattcgattacgacgctacacctctcaaagatatggcaaagatcatcaagtctggagacagcgataaccgtgagtcgcaagctgctcgtctatacttctcactattactagacgactccacccgtcgtaagccgatgtggcacaactcggctctcaactatggctatgcgatggttcgtagtcatatcgcacgtcacatagcttctcgtgggcttgttgcgtcgcagggcatctttcatcgtagtgaactaaacagtttcaatctcgccgatgatattatcgaaccatttcgaccagtagtcgacgaatacgtcctatctcacgtcgccctatttcatattggcgagacagatgccagcctgaccaaagaggatcgatgcaagatagttgacatattaaattattctgttacaattgataataggaaatatcctatcaagttcgctattgagcgaacaatcgaaagtttcatccaagcaatcgaatcaggtgaggggagcaatctattgcttccctctgttgtttcaaaataacaagagagtatgtcgtacaagattatgagagtggtaacgctatttgatttgccaacc

SEQ ID NO: 3529 - DNA, 9573 bp, synthetic construct
  source 1..9573: mol_type = other DNA
  misc_feature 1..9573: note = Synthetic
aattcttcaccgataatgaaagcctgtgctagaccttctggtttgggctggacagtatattccagattgataccccactgcgaaccgtcgccaaggagtcgttgaaagccagcttggtcgtctggtgtggtgattatcaaaatgttgcgaattcctgcctgcatcagtgtggtaagcggataataaatcatcggcttatcataaattggcattaactgtttactaatcgcttgggtaattggccaaaggcgcgtacccgatccacctgctaaaattattcctttcataaaaactccttttagttcagtatataatcttttagatcatgtgtccaatcatgactagtgaacccggtagaatgtaatttatcaagactcatatcgctacctagtggtcgaggggcgatgccatctttgccggcaaaatattcagccgtcgttgtgttggtaacggtcagatcattacgcccagctaactcaaaaatccgcctagtgatatccgcccagctttctaatggtccgtcgttggtagcgttatatgtgccgaatggcgcttgagttgatagcaggtggtcaataattctcaccaattcacgagtaaaggttaatcggccaatttggtcatgaacaacagttggtgaaatgttcttttccgccaatcccagcatagtgcggacgaagtttttaccttcgccaatcacccaagtagtgcgcagcaagtaaaaattatcgagttgctcgactaataaatctccagctgcttttgaggcgccataaacgctcaatgggctgaagtcttcattttcaaaatgaggttcttttgttccgtcaaatacgtaatcactagaaatatgtactaaagtcatgttgtgagtgcggcaaactcgggttaggtttgcaaccgctgaggcgttaaccttccaagctgctacgcgaccttctggtgtttcagcgccgtcaacattagtaaaggctgctgcatttaaaacgatcgatatccctgaccagtcgaatgactcaactgattggcggtcagtgatgtccatctcgtctatgtcggcgaaccgtgcttctggatattgttgacgaagtgctcgccccaattgaccatttgctccgacgataaaaatgttatttgaattcatattaaacctccattggaattacatttgtaagtagtggatgagcggcgtctttttcggaaatgatcgcttgctcttggctgattggccagttaataccaagtgccgggtcaaataaattgacaaaggtgtatttggcatctggcgaccagtgcgcgtcgaccaggtaggtgtaggcaatgttgtcgtcaagtgtctgatagccattagcaacacctttgggtacgaaaattgctgtgccaggattaatttcgtgcgtgaaaaccgtgccgaagctatcgcctttgcgcaaatcgcaccacgcgccgaatactcggccattagcggtggagatgaacttgttccatggctcggcgtgtaagccacgagtggcgccagctttatcgttaaagctgatgttgttctgtacaatgttaaatgacggcagtcccagtgcttccattttttctttttggtagttttctttgaaccagccgcggttgtcgccgtggacaggcatcgtgattacaaataatcctgggattggcgactcagtgacggtgagttcgttataatttgatgggtcaaagttcatacttcctcctccaagaactttttaaaaccttttctaatatcatcattgaacacgatatcggggttaattccgtcaagcggcaacgtgactatttcagcaacgtcatcgcctggtttcggttgtgcatcggtatgcaggattgcccagaatagactggtgaggattggtaggtcttcaccctggaaatgatatgttgcaggtactgagcagaagtaagtgagcggactataccattccttcgtcagccctgtttcttcggtgatttcacgatgtgtagcatcctcaatgctttcgcccgcttctaggaaaccaccgatacaatcaatcatacccttaccgggattaatagctcgccgggacaatacgacatgttgtctgtcggatgtcaaaaagaataccccagtagttggcaggggattgttaaaaatactatgctgattatcgcaaacccaaaacccgccagacgttcgattcagtgctgtgccacatcgtcggcaaaagttcatttctcgctgagaatatatattttttgtagcgatcattttctattgaccctgatttgcataagctgcttcaacggcctctttttgcgctttccaccagtcttcgtgttcgcggtaccagtcaatagtttgcagtagcccatcgtgcatgccagtttggttgtcagtatattgcggttgccagcccagttcgcggcgcaatttgctggaatccatggcgtagcgcatgtcgtgacctgggcggtcgttgacgtgctcgtaccaatctttgcctttacccatcagctcgcaaatcagttcaatcaccattttgttgttgacatgatcgttgtcagcgccgatgatgtaagtctcgcccaatttgcctttttccaagatgaggtgaacggcagcgttgtggtcatcgacgtgaatccagtcgcgaacctgctcgccggtgccgtacagtttgggcttgatatcgctcaaaatattggtgatttggcgcggaatgaacttttcgatgtgttggtatggaccgtaattattcgaacaattggagatcgtcgctttgatgccgaagctgcgaatccaggcgcgtaccaacatgtcgctggaagctttagtgctggagtaggggctggacgggttgtacggcgtatcttcagtgaagcggttagggtcgtcaagctccagatcaccaaacacttcgtctgtcgagatgtgatggaggcgcttgccgtgcttgcggacagcctcaagaatggtgtaggtgccgatgacgttggtttcgacaaacggccacggattgcgcagggaattgtcgttgtgactttcagcggcaaaatgcacaatgatgtcgttttcagcgactaatttgtctatcaactcggcatcgcaaatgtcgccttctacgaaattgatttgatcagctactggctgtaaattggcagtattacccgcataggtaagcttgtcgataacggtgatgtcgtattctggcttgtgtttgacggtataatgcacaaaattcgagccaatgaatcccgcgcctcccgtgactagcatctttgtcatatttatattgtaacaaattaatatattaaaatatatttttagtctgcaaatccatttggattatttgactgccacttccaactatcggcacaagcttgttctatagaataaacagtttgccagttaagttctttcttggctttacttgcgtctgcataagaagcggcaatatcacctggtcttctatctgttatttcataaggtattgactttcctgcagctttactaaatgcatcgattagctccaatactgagacacctttacctgaacacaaattataaattgcaacacctggcttactgtggtttaaggctgctgtatgtcctgatgctaaatccatgacatgtatataatcgcgtacacccgtaccatctggagtgtcgtaatcatttccaaatacaccaacctttgcgagtcttcctacggctacttgagtaatgtaaggtaaaagattatttggaatgccatttggatcttcgccaattaaaccagatttgtgcgccccaactggattaaaataacgtagaatagtaacttcaaaatctgggttagctgcggctatatctgttaatatctgctcaatcataaattttgtccatccgtaaggattagtaatgccgacaccagcttgatcagattctgtaattggtaatttttttggtactccacatactgttgctgaactagagaatactattttattgacattaaatttactcataacatcaaataaaactaaacttgattctagattatttgaatagtattttagaggttgttcaacagattcaccaactgctttaagtcccgcaaaatgaatcacggcatctggtttttcttgctcaaaaatttcttccaatttggatttgttccgaatatcagcttcgtaaaatggaatttctgttttagtaattttattaagcctattaataacttcctttgatgaatttgagagattatcaacaatgactatatcatttccattctctataagctctattgcagtatgtgaacctatgtatccagttccaccagtaagtaaaatcttcataaaacgaatcctttctataatgtaattgtaactactattatataatgtaaatatgataaccgtaattatagctggtggcgctggtactagactgtggccactttcaacgccaaacaatccgaaacagcttttgactctaactagcgaacgaactatggttcagcaagcttatgatcgtgcctctatactaggggatacggtatatattgttactgaatctagtcatgcagataaactacgcgatcaacttccagaactccctagtgatgcctttttgatagaaccagggcgtcgaggtacggcacattgtattatttttgcacttgattatattgcacgccatcataaagccaatgaacctgttgcttttattcattctgatcataatgtccgtaatattaaaggctttaagcaatcttttcaatcggcggctactatatctcagcagaatgattcaatcgtgctagttggcattgaacctactgcaccgtcaactggttttggatatattgaatgtggcgatttaatcgataaaagtaataatgcatatacggtaaaatcatttaaggagaagcctgattatgaaaccgctaaaaaatattttgcttctggtgattatttatggaacggcggatattttgttgggtcagttgatatttttgtaaaacaaatgcaacaatttgcacccactttgatggaagattacaataaattaagatccttgtctaactttgctagtgaggaatattacaaaacatatcttagtttcgatgttcaagcaattgatacagtcttgatcgaaaagatgtcgaacttatttatgatttcggctagttttgattggatggatattggaaattttaaagatttatatgatgtccttataaaagatgaaaagggtaattattgcaaaggcgaaaatatttatattttagatactgatacggcttatgtccgtaatgaagagccagataagccagtcgcggttattggattagataatattgttgtggttaatacgccgaacggtattttggttgcaagaaaggatatagctgctaaaacaagtgaaattactaagatgttgaataaaaaaaataaattaagatccatattgccatttaaaatgtagcgtgatatatttgaattacagtcccttaagtaaggattgtactaatatctaaattgttttaggtttctataataatttagcaacttagggcgacgattttgatcgtgcagctacggttgagaattctattgtgaatctaaagcaaagctctaatccgctcactagttgggcggattatcttttgtgcgtttcgattcctcttatactttcaatcattatcatttgattatataatataatcaacaacgacattataaaaggggcttatttatggcacaaaaatcttcatattcaccgaaaaaatactcactggggttagacatcggtacgagctcaatcggctgggcagtgctggatctagacaaagagcgaattcacgatttgggagtgaggatatttgagcgaccagaagtaccaaaaaccggcaagagtcttgctgaaccacgcaggatcgctagatctgctagacatcgactaaggagacgtagacaaaggcttaattatttcaagcggttctttattgataacagtctgataccagagagtcgcataagcgatatgcttagtccaacccaccccaagaaatggcgaccagcctatgacccttacgatctacgaattaagggcctgagagaaaaactctctttagaagaactattcgtagctctttaccatatagcaaaaaggcgtggatacaaaagtaaccgtatatctgtagaaaagcaggatgtcgaagggtctcaagtgttatctgctatttctgagaacaaactacttttggaaaagtataagacaaaatcggtagccaaagtacttacacttgatgaaaaatttaagaacaataaacgtaataaaacaagcacgtataaaaactcatttgttcgtaagaattttgaagatgaagttatactgcttcttgagtctcagaaaaaatttggccttaaactgccatatgaaaagatgcaaaccttgctgtatggtgatgtaaaaaatggcaactacaatggtatattttcacagcgaccattcatgacaaaagaactgattgagaagatgcgtggtaattgtgaattcgagccagaaaagcctcgcgcaccaaaggctagttatagttttgagctatttcgcctcgctcaaaatttatctcatcttcgcattgtagttgatcaagaaactcgacagttatctgaagacgagatcgcaaaaataatcgaaaaagcaaagaatgttaaagtgctaaaatatgagcatattcgcgacatacttggatataagggcgaccaaagctttagttttgctcaaggtatgatacgtggcaaaattaaaaatgacgacaaaaagaacggtgaaggcaataaatttgactcaatgatattttaccatactgtcaaaaagaaccttgaacaatatccaaaagattggaatatactagctgccgacaattttgaactattagataatgcaggattgatactgaccgtaaataaagacgactcaagtctacgcgcagagctatcaaagttagatataagcactgatgctattgaggcacttttaccaatcaacgttagcggctttgttcatttgtcatttaactctctccatagaataaccccatggctattaagaggattaaactatagcgaggcggttgaaaaagctggctacagtttttttcaaagtctttctggcaacaagaagaaattaccgccactatcaaagaaacaggcaaaccaaatcactaatcccgtcgtcaaacgtgcggtatctcaaactattaaagtagttaatgctgtgatcggaaaatacggtctaccatgcagtgtaaaagtagaagcggcaagtgaactagcaaaaaatgcgcaagaacgcgataagataaaaaagattcaagacgagaatgctgaatataacgaaaaaattaaacagaagcttattaatgaatttaatataccgacaccaacaggactacaaattactaagtttaaattacgtgaacagcaaaacggtgttagtctttactcaggcacagaaataaatcttgaaaatcttttcacagatgaacattatggcgagatagatcacattataccattttcacgctgcggcaacgatggattaaacaataaagttttggtttttacagacgagaatcaagagaagggaaatctgacaccatatgaggcgtggggtggagatgataaaaaatggacacaatttgaagcacgtgtaagagcaaccgctggattgccagccgctaaaagagatcgccttctgtcaaaaagtaagccagttgaagattggaatgtacgcgcgctcaatgacactcgatatatttcacgtttcttacgtcaatacattcgtgataatttagattttcctaaaatcgaaggcaagactggcgcgcagagggtcttctcaccaagtggaccaatcacttcatatttaagaagagtatggcgtgtcggcaataaaaatcgcgatgataataatttgcatcatgcggctgacgcctgcattattgccgtgacagacccaggcattattcaaaaagtatccagtcttaataaatactatgaactattcagatatagtgataagaacgaagttatcgacaagctaactggagaagttcttaaccgtaatcaatttgaacaacatatagcagatcttgagccttggcatgatttcggcaaggaagtacgaaaacgcagtaaactatacgacacaccaagcgagctccataatgagctaactggtctaaaaaactacgacgaagagtttcgtttgagtacactgcctatatttgtttcacgaatgcctaaacgctctggaaaaggctcaacaaatagcgaaactttccgatcgcctaaaatcgtagaaggctaccttgacgaaaaagggaagcccgctattgcacgcaagcagagagtgccgcttcattctgtagatcttaaaaaaattatacgattcgccaattcgtgaaacagatcctaaactgtacaaaattttggaacagcggctcaaggattttaatggcgatccagcaaaagcatttgtcgagagcgtttacaaaccaacaaaagacagtaaacgtggtaatattgtacgcagtataaaaatatataacacacgagattcaaggagtggattcttagttaacgagcaaagagcctttgtaaataatggtaagactgttcgccttgatgtttataaacgcaaaaactataaagacatatacgaatattattttgctccagtctatactcatttgataaacgctcaaaaaattgaagttttgccgacgccgactggtcgaagtaagaacgaaaaggcagattttgacactatccgaacagaggatgataaaatatatgcaacactagagaatggatttataaagcaattctctatatatccaaatgactacgtacgaatatattttggcaacgaaatcgttgaaggatattatgtaaaatacaataccaacgacggaagtttaaaactaataaagcacagcgaaacaagtaaaaatgacaataatttaatcagcaaatcagccaaaacagccaccctcattgaacgctacgacatctctgccctcggcgataactacaggtggttataaatggcctggcgcgtcgtagctatcgaaaaccctgccagactcagtctgcgggataatcaattggtaatcgcgcaagatgtcgaagcgacactaccaattgaagacctcgacacgcttgtcctggacagttatggcataaccacgaccgcaaacttactaacagcacttgcaaccaaaggtaccacaattgttatttgcgacgaaaagcacttaccagccagcatacttctaccatattcacaacattcgcgccaagccaaagtttcacgtcagcaactcgccatgagtcagccgctcaagaagcaattgtggcagcaaattattatcagcaaaattaccaatcaagccgatgtcttgcggtcaatcggattagacgatgccgccttacgcacccatattagcgatgtcaaatcaggcgacactagtaatcgcgaatcaatcgctgctcgcatttattttgaccagttactcgacgacgccacacgtc

SEQ ID NO: 3530 - DNA, 6009 bp, synthetic construct
  misc_feature 1..6009: note = Synthetic
  source 1..6009: mol_type = other DNA
ggcgagccgtcagcagatcgtgattggtaagaaaattatcgagggtagcagcgaaccgattctagaaaatactcaggcaaatcagcaaatgttccgccgagaatttgcgctgtgggcggccgaaaaaatcgaagccgagcgccgtagtttaatgaatttttatgggcaaaaaattccaaatgttgggcaaaatatgattcaaaaagagctcgctaaagttgcgccaaatattatttcactcgatcaattagataaggaacggcgtaaatatgtggtttcactagctcgaattgaaacctactttgcagataatttctgggaaaatctagcgcgcaaaaaaccaaaatcgcgtgactttggcaaacgaaaatttggcaaatttaacaagaataaaccacgcaacgatcgcggcggaaataaaaataatcacgcccgtaaaaataaatcaaagcgtggcaaatcttgggtggaatatcggcgggagagtcagcgacgtaagttgaagtaaacgtaatttgtggtataattaagctatgaaaatgtccgaaagacgcaaagatctccggccgcgcgaaaagttgcaagcgcgtggggcggcggcactttcggattatgagcttttgatggcgatgatcggtagtggcaatgcgcaggctgatgtgacgaagattgctcgtgaggtgcgtaagattttgagcgaaaagggcagtgatttagcttatgaagatttattgaaaatcaaaggcttgggcgcggcgaaggtgacgcagattatggctgggttcgagctatggcgcaggcagttcgaagttggcgagcggccgattatcgattcggcggaaaaggcagttgagcttctgagcgatattcgtgataaaaagcaggaatattttgtctgtctgacgctggatggcgcgaatcgattgatcgccaagcgtgtgatttcgatcggcacgctaactgcaagcttggttcatccgcgagaggtcttcgccgaagctattactgatcgcgccgccagtattatcgtggcgcataatcacccgagcggaaatttggagccgagcattgccgacaaagaagtgaccgaacgattgaggcaggctggggagattttagggattgaggttttggatcatttgattttgggtgagggcgggtttagtagcgtggaatatcaagattgaggcttgactattaacctaaaatgaattaaaatactacgtataacaccttaagtaagtgttatacactaatctaaagctattaggtttctataataatttagttttattatgaaactaaagcaaagctctaattcgtccttcggggcgaattatctttttatgtaagtgcttaagattgcttacggcgttaatatattatataatttagctatgaaaaatagtttgaaatattctctaggactcgacatcggtactacgtcaatcggttgggcggtgattgatgaagataaaaaacgtatttatgatgttggagtgcgtatctttgaaaaacccgaagacccgaaaagcggcaaaagtcttgctgagccacggcgaacagcacgcagcacacgccgccgactcaaacgtcgccgacaacgactcaatgcgctgaaagaattctttatctcgcatcaattgttagatcgacgtactctagagcagcttctattacctgaaaataagcataacccatacgaaatccgtgaacgtgccatgtcggacaaagtatccaatgaagagctatttgtagcactttataatatagctaagcgtcgcggatataaaagcaatcgcaaatctctcgaagagaaggatagtgaaggctctcgtgtattatccgctatatcagagaataaggccattttagccgattattcatctgttgctggcgcactcaacaataatgacaaatttattaagcacaaacgcaataagcgcgacagctatgtaaattcgtttgcgcgtcaagatttcctagaagaagccaaatctatcattactaaacagcgttcgttcggactggagttaggtgataatgcagtgcacgagctactatacgccgacgagcacagtggggattttagcggtatattctcacagcgaccgttcatgactagtgaacttatcaaaaaaatgcgtggcaactgcgaactagagacgattgagtttcgtgcgccccgtgcaagctatagtttcgaaatattccgtctagctcaaaatctatcacatctccgcgttactatagatcgtgctacacgaccactgacaccagaagaaattgcagattgtatagaaaaagcaaaatctatcaaaacgcttaaatattcacacattcgtgacgtgcttggctataaaaataataaatcatttgaatttatgcgtggtatgatccgtggaaaaatcaaagataatgacaaaactaacggcgaatctaataaattcgatgaaatgacattttatcacgctatcaaaacggcctgtaaaaactttccgtcggaatggactcgcattgaggctgataataatttactcgaccaaataggcgaagtattaacaatcaacaaagatgatatcaatctacgcaaagggctagaggagctcaatatacccgaagaaataatagtgtggctacttaagctcaatttcagtggatttggccacctatcacttagggctctacgaaaaataacaccattcctgcttgaaggtcaaacctacgataaggccgtcgtgtccgctggctatcaatttactcaaaacctctctggtaataagtataagctaccaccactatccgaacagcacagtcagcagatcaccaatcccgtagctaaacgtgcaatctctcaatctatcaaagttattaacgcagttattttgaagtatggcgcacccaacaagataaaaattgaggcggcaggtgacctagcaaaaacctttgccgatcgccaaaaaatcaaaaaatcccaagatgaaaatgccgactataatgagaagcttaaagagcgtttaatcaatgaattcgggattgctacgcctacgggactccaaattactaaatttaaactatataatcagcaaaatagtaaatgtatgtattctggaaaatcacttgacctcaatcgtcttttttctgatgaacgctatggtgagattgatcatattattccattttctcgttgcggtaacgacggactcaataataaggttctcgttctgacagaagaaaatcaacaaaagcgtaatctcacaccatatgaagcatggggtagtgatgatataaaatggaaagatttcgaagcgcgtgttactgcgaccttcctgccattcgccaaaaagaataggctacttactaaaagtctgccagatgaagattggaatgaacgcgccatcaatgacacacgctatatttccaagttcctacgtagttatatccgtgacaacctaaaattcgccgactttccagaagaaaaaggcgtgcagcgtgttattacgccaagtggctctatcacatcatatctgcgccgcgtctggcgtgttggcagtaaaaatcgtgatgaaaacaacctacaccatgccgcagacgcctgtattgtagcagccatagatcaaggtacaatccagaaagtttcacgactcaataagtattatgaactatttcggggtaatgccgacaacgaagtaaccgaccgcaccacgggcgagattattaagcgtggagatctagaacatcatagtgtggaggttgaaccgtgggaagatttcggtaaagaagtccgtaagcggactgcactatacgatgctccaagtgagttgcataacgagctagaagggctagataattatgacgaagaattccgccgtagtgttcgccctatattcgtttcacgcatgccaaaacgcagcggaaaaggtgcgacgaacaaggaaacaatccgctcgccaaaaattgttgaagaatacgaaaataataaaggtgaaaaagtgattgctcgcaaacagcgcgtgccactcacaagtgtcaaacttaaagacctttacgattcgcctgttcgccaagatgccaagctttatgaagtgctaaagcaacgcctcgaagagtttaatgacgacccacagaaagcctttgtatcagataagccaatttataagcctacaaaagatggttcgcagggcaatatcgtccgtagcatcaaggtatatgatactcaaaactcaaagaccgggttttatatcaataatggcaaagcttttgtgaataatggctccactatacggctcgatgtctttaaacggaaaaactttaaggggattgatgaatattatttcgcaccagtctatacacaccttattcatgctaaaaaagttgaaatactaccaacgccaaatggtcgtagtgcggatgaaaaagcagattttgataagattcgtgaagctgatggcaagatttatgcgactgaagaaaatggattcaaaaggcaattctcgatttacccaaatgattatgtgcgtatatttatgaaaaataaaatcattgaagggtattatgtaaaatttgctatatcaaccgggcagctcagtcttgtagaacatagttcggcgggtaaggataatctaataatcacagtcgccaaaacagcatctgagatccagcgttacgatattactatcctcggcgataactacaaatgggtgtaactctatggcatggcgtgtaatcggaatcagtaatccagccaggctcagagtcaaagataaccaacttgtcatcgcgcaagatgagtctgtaaatctaccaatagaagatatcgatgcgcttgtactcgacagttacggtattacgctaaccgcaaacctcatcaccgaactatcggcgtctggtacgaccgtcgtgatatgcgacgacaagcatctgccgtcgagtgtgattttgccatacagtcagcattcgcgccaggctaaggtttcgcgaaaccatttggctatgaatcaaccactcaaaaaacagatctggaaagaagttgtatcgcgcaagatcgtgaatcaggcgtccgtactagataaatttgattttaacccggcgccgctagtaaaattagctaatgaggttaaatctggtgatacagataatcgcgagtcgatcgctgccagaatatattttgctgatctgtttgatgatgcgactcgtcgtaagcctacttggtataatgcggctttgaattacggatatgctattgttcgaagtcatattgcgcggcatattgcggctcggggattgatcgcttcacaaggtgtattccatcgaagcgaactcaacagtttcaatttagccgatgatatcattgaaccatatcgggcgattgttgatgattatattttgacttttgtggctccgctgcatatgggagataaagattcggtgttaactaaagaagataggatgcggatacttgacattattaatttttgtgttataatggagaataggaaagttccagtaaggtttgcggtggagcggacagttgagagctttgtccaagtaataaattcaaaagaggttagcgatttaaagttacctttagttaatcaaaaataggaattatgtcatataactttatgcgagtagtagccttattcgatttgcccacaggcaccaaaaaagagagaagtttagcttctaagtttcgtaagtatttattagacgatgggtttgatatgcttcagtatagtgtttatactagactttgccctaatcgagatgttgcagagaaacatttacaaagagttaaaaagaatgcaccagatagtggttcggtgcgagttttatacctgacagagtatcaatttaataatatgcatatagtagttggtgaaaaaactacccaagaaacaaaagttacgaccgatcagttggcatttttttaaactaaaataccctcattaacagaggggattttaagtaagtattatacactaatctaaattattagggaactataac

SEQ ID NO: 3531 - DNA, 23798 bp, synthetic construct
  source 1..23798: mol_type = other DNA
  misc_feature 1..23798: note = Synthetic
caggactggacccggacgaccgccaacagcaattgcgaacgcacttgggattgcatccagaagctccagcggattcttgaccattatggagtgcttggtgattgggaatgaaaggccaaaagtgtcggcctcctggaatgcgtccgtaccaatcagagaggagttgacctgacccgtgattgcgattataggaatggagtcgcacctggcatcggcaacggcagtcaaaagattcattgcgccgggacctgaggttgccatgcagaccgccggttttcctgatgtccttgccattccctgggcgataaatccagcagcctgctcctgtcttacaaggatgtgcctgatggagcttctgttcagctcgtcatagagtggcagaatggagccacctggtattcctgctacggtcgttattccgtggagttccaaaagtttaacaataatctgagatccgcttgccttaatcatggtttgacattgtataaggtagcggattttttttcaagcgtacaggaaacttagacatggaactcgtcaatctggattccaatcttgttgattgagttctccatctgctgggtgaggtcggaaagaacggctcctgtctcgttgatgcgggccgcgcctgtggacatctgggccatgccgtcctttatgctgagtgtcgcgttctgcaggagctttatctcctggaggatggacttgttgccctcggacatctcaagcgaagcggtgcggacctccgatgtgctgtcgttcatgttgttgagagcgatagaaatctgtctggaccctgcgctctgctccaccattgcgttcttgatttccttgaccagggatgtggtgttgttgattcccgcggtgacattgctgaacgaagtacccgccgcgctggatgcctggacaatgctcgtgattgtctccgaaatctttttgagctggtctccgattgtctttgactgctgcgaagaagtttccgaaagttttctgatttcatccgcaacgacggagaatccctttccggcctcacccgcatgtgcagcctcgatagccgcgttcatggcaagaaggttggtctgctccgctatgcttgagataacggagttggcctcctgcaaagtctgggactcctgctcgacggtctttataaggtggtcaacatcctcctgcttctggattcccgcgacggccttcttttccaaatcctcgaaagcgtccgacatctttgttaccgaggcgttcacggaattgatgttccctatcatctcctcgattgcgctggatgcctgctccaccgaagaagtctggtttgaaatcatgtggttcagcgaatcaatgttggaggcaatctggttaaccgccccggcagtctggtcaacggaagaagtctgcgcctcaatctcctcacccatgttcctgatgttcgcaataatctgggaaatggagctttcggtgttttcggtgctgacgttgaggttttcgccggtccgtatcagttcctccttggacacctttatgttcttgacaatctcctggagcttggcagcaaacttgttgaatccgccgaccacctttccaatctcgtcgttcttaatgtgcctaagctcaatcctcttggtcaaatcggcgttgccctcggcaatctcgttgattgtgttctggacaaccccaagcggtttcagggcggcaatcagaagtgtggaaatcaaaatcaccaggacaattgtgaacactgtggaccctattataaggaactttgtcaccgtgtttgaagaaaggtttatctccttctcctcaagccccgtaagcacaaaccactggggagttcccggcactgccttgaatgtaagaagagcccttgacgagccttttccagaccagattgaatctatcttgccggtggacacagcctgttcgatacgcttctgcatctccggattctgccgtccctggttcacctgctgctgggctttttcctcctccacgccagatgtggcaatcaagccgttttcgccggaaaacagctttatggttccggtgtttccgaccttcgccctcttcacaatctcgttgattgagtccagcgaaacaattcctgtaaaaaatcctacggtccgtccatcggcctttgccgccttgcagatatggatgacaaactttccggaaacctttgaggcaacaggattgtccatggtcatgtccatgccgtttttcacaatgtcgatatagtacgaacggtcgctgactgtcgtgttggtcataatgtccgaattgaagtttccgtccaaatccacaaaagccacatagtcaaaatcggagctgcggatgttcgcgtgggactggagccaggaaacaatctgcgcaggatcggaagtggcgacaacatccgcgttggcatatacctcaagcagattgaaatactcgttgattttgctggaaataagttccgaataagactccgttatgaaccggcactcatcttcgtatgtccttgtcactgtggattttgaaatcaaattcacgacgacggtctgcacaacgttcagcacagtaacgacgatggccgtaatcaaaattatacgcactgtcaggcggctattcttttttgcatctgccatgggttgtcctcctaaaaaaatgcctcatttaaacataattatactacagttttcggcaggatttaagctgtatttcactccccgcgttaaattttttataaacttctcggcatctggcggaaattgtactgcttgaatttttttggcgtgagtccggtggattttttgaatgcgcttatgaagtggctttcggaactgaagttcaggtagtttgcaatctcggtggtcgaatgttccgtgaacatcaaaagattttttgcggcatcaagttttttttccattatatactgcacaattgtttttccggtctccttgtggaaaagttttgagaggtaggttttgctgagttccgcctcccgcgcaaggtcgtccgtctggattttgcagtgaagattgtcgtagatgtagtcgatgcagcgggaaatcggtcttgaatagtggcggctgtttttgcatgtccgcattcttttaacatagtcctcggtcagcgcaacgtgaagctcgtccagttcctccagcgaggtgcatgtgtcgatttttcggatgtagaggtcgctcagattgtacgccgtctccatctccagtccgccctcaatgcagtatcttgtaatgaatgcgaccgttatgaccagatggtacttgtgatttcttagggagtttccgctaagacgaccgtagcccgcaactccaagcggctgaaagagtctcttcatctcctccatgtcgccgtttttgatgctctggtagaacgcaatttccctgtcataaggcaggtggttccgcgtgttttcccggttgtaaaattcggttctggtcaaatcttcctttatgcccatcagtttcctctgggactattttaccacggatttgtttttttcaccacgtaaattgacctgatctattcacagcaattctagaaattatataataccggacttgccttatatgtgccgttggcaaaatggacaacatagcaataataatatgtgcttggatatacactgcggcttggtctatattcagtcaaaacattaggtgttactgtatatgaatcttcctgatcgagcgttcccaacaattcccattgcccggctgtccatagtttacattcttctttactcttgtccgctctatatatacggacaaaaacatttgcgtcatttgattgtattataattgattcttttgagtttccatctgctataacacaattattcttggcatctttagttgaactgccaatatagtaaattttttcaacatatgcagtgggggaataaaaatctaaaccagtatacacaacttttatataatcgtaatctgttgcattgactgaaaatgaataggtgtctgttggtagttgattatctttatttatttctttaagaatcgtattttcaaatttgctctgatatgaatttggtgacaatccaaatatattcatcgtactattagcattaacataataacgatatcttctgctgtcattaactgttgctgtgaaggttttaccacttatgctaaaatcgtcaagacactcaacatccgttgaaagtttgttcttcaagctaaaagtaagagttcccttagttgtatttccttttttatcttttaatacataatctatagtgttatttccgatgtttaacacttttataccaactttttttccataacacccatattttgattgaaccgggtctgtaatctcatattttgtcgaacctccatttatataaaattctccataatcaggaccagaaccataatcatagaaacagaagtaagcataaacataatacgaaccggtttgattgtttctatcagaagtaatattgaaataatataattccgaaggatttaaatcgtcaaaagctgttttttcttcggtggtaagcgaaattttttgagattcttctggactgattatattatttttggttcctttacagtaataccaaaaactataatctgatacagcataattagatacattgaaaaacagttttgtttccacaggaacggtataacatacctggccatctttagtataagtattgctttgtgtaagcttgaattgtgtacttttaatactacaatctaagtaatcatatttgttccacaaatctgaatcccattttaatgttagattaacaaagccttcttttcccttagttttttcaatagttgttgtcggttttgccggtgcaccaacagaagactggttcttttcatacggaccaatcagttctcccataagtcccttttcaaaccatcttttcctagtgctcgaagatccaaaagaggtaaaattattatctaaatcatttgatgtatatgaaatttctttatattcattaccaagccccggatgatattcatactttttttgagggaaattcaaattacgttcaccatctaaataaacattacaaagataaaaataagcgttggtaggaatatttgagtttttaatatagtagtctatattaaaaaccagcttgtatttgttatctgaatacttacatattcctaatggattacaggtttttgtatcacccgaagaaggataacttatatttaaataatcatcaattttggataatacaacagcagacggatatgtaaacttttttctacctatttgtattccagtctctttccatactggtattacatagaatgacaaatcagatacagaatctacatcaagaacaacagacctttccattgtttctgaattatatggactaaaggcgtctcttcttttgttaccatttttgtctatatattcacaataataatctacatcattacaagatatataatatttttcatctaaagtccaatacttaccatgagatatattagtacgcaataaaaagacggatggtttatactcatccttaattcttattgtttttatatcagaattgtattttgaaaaatcataacaagtatcatcattttcggccttagaaaatggtgcattacacacatcaaaaggagtagttttcacatttgctggagcaccagtagttgctggataattaccaacgaccttatcccatgatgtataataactaatatcactatataccagataattcaccgcacacttttgtacggctgtataatttccacagttatctttaactttgatttgtaaatcaaaaatacctgctcttggttctgcccgcaggctttcctgcatagtatgttttattacaaaagtagtataacccgacccgtcatctacaaatttaacacaatcattgttttcccttaaaacataggatataaaattgttatcgtttcctttatgttctcccgtaacctgattattgatatccagtgtttctgttacttctattgcagcaactccagagtctacatcataatattttccgtaaatatatatagtagaaggaataagcatttgcttataatcattattggagtctatggaactatatgccttcattctaatttttttatcatctgcgagagaatctgcagaatcaagcgttatttcttctcttgtcacaaataatgacaattcttgtggagcggttgtttccatttcggaattgtactttacagtaaagtttgaatttgaatcttgtcttatagggaatttaaaatcatctattgtaatttcaaattcttcggaaaacgatacatttacatcaatataagatttttgttcatcttttaaataattggcaaatttttctccatctggagtaagagtaagcactgtattctgagaattaaactccggtggataaaagtatgcactcacagatgatttagtatctgcatctattaattttatgttagtataattgaaaagtccatttgacttctctgtttctccaacaggagtattaaaaacaatgactatcggtgtgtttgctggctgtgtttttgttccagacggagtatagctttttacataaggcatctcgatgcactttggcctaatcaaaatatcatttgccggtttaatcagctttacggaggtgacgtacacgcctttggaagtgtcacttttttcttcgtttaacttaaactgaacatagttgtcgcggctgagggtctcatcggctgtcgaaacggcttccagagaaacaaagaaataattattttgatttaatgaaaactggatgtctgttgagtagccgaccttgcactctgcttcgccttttgcaagaaaagaacccatcgccgcatcggatttcagatacaccttgcagctttcggcatttgcatatccaacagaatctttgatttctttggcgagttcccctccattaaaaaagttttcgcatgaggcaagccctattgcgcacagtcccccaaacaaaagtatagtagaaagcaaaaagaaatgaacaacttttttcatagaatctcacctcggtacagaaaataacatgtcaccccatgacatttcaaagttaggggatgtccaaaaaagttcgtcgtatgtggtcattgagcttgtcgaaatgaccttgtacactacatgtggtggttagtcttcgacggctacgcacgacaggctcaaccaccgcaataaaaacttattggacattcccttcccttaattattatttcatttattgatatttgcgtctagacatgtgaacctgtaacgatagctttccaataaaatctccttcccctgacgacaaaaaagtcccggcaccgaaaagcaccgggacaaggagagagattgtatctgtccggaaaactgaaatttccagacagacttattatgaaaagttcaaagactttactactttatttcctcaaggctcacggactcgattattaccctgtgcgggctgtcaatctgttttccgtcaaccgcgcccatggagattgtgaagattacgttcgggtcggtggcgtaatccattgagaatgtgtgctcaaaaacctgggacgagcttgagacatccagaacaagtgtcccggaatacggaatccagttgtcgtcgccggaaccgtcgcgctgcagtgcccacatgatttttctgtcgatgtcagattttgctccgaccttgacgcggtacttctttcctttttcaagaaggatgttgctctgcttcagctgaaccatccagtccatgtttccggttttgttgattgagacaatagccgcattgttcgccgcctgtgcctcgctgtcagcattctcgtgactgtagagttcccatcccgcaagtccgctgtcaaatccaccgttgagcagaattgaattttccttcacgacaacattgtcgatgtagacatccgcaccggataccgccgccttgaacaaaagagtcgccttgattggaagctccgcgctgtacgcaaactcataatgcgcggtcttttttccaagcttcactgtcttttcaaaatcagcaagcgcaactccaatgtagcaggtttttgacgcatgtgcatcgaacgcaaggacaagctcctttccgcccggaagggacagatttttctgggagacggtcacggcatcgttttcgacatccgactttggagttgaaaccttaagctcacgcacaccctttgtgtttgtaacggaaatctccgcgcccgcattgttttcaatatcccagttttcaagacggccctcgccctcctggaactgaccgttgtgcacaaagtttccgtcgggaagaagaccaagaccgcccttgtccaaatccgccacaccaattttttcaagacagatgttcgagatgtggaccgtggcaaggcttccctgtgaaccaaggttgtattcaagacgcgcctcggcatctgaatcatcggtcattgtgaagtcccatgaaaaatgctgggttgttggagtgaccgtaacctttgtgtccggaaaatagcgaatccatcccctctccggcgcactcacggttgaaattatcgttctctcctcgtcggcacttgcgtcaaaggaatagcggtagatgtttcccttaatcatcgggacaggcccctggacaacctgcaccgcatattcaacaggaccgtcggacactgaatagatgtcaaggtttccgttgttgacctcaagttttccgtctccaccctgggcgttcaggaaaatccacttgtccttgtcctcgacaatcatgtttcccgcggctgaatcaaggacggcagcctttgcaggtttcttgacatcgtcgttgtaatattttttctggtagaccttaacatagtccacaaccatctgagccctttcgtcaaaaggtgtggtcgcatcaggatagcccggccagtttccaccgacagccacattgaaaatcatgtagaacggctggtcgaacggagccggataagtcacctcgccaaatccgggtctctttgtgtaccagtcgtttattgtcttgtatttgattccgtcacagtaaaggcggatttcacccggatcccattcaagcgcaaacacatggaactcgtcggaaaaatttccgcttgaaagagtgtatgttccctggtcctgggaatgtggctcaccaaaatggagcgtaccgtagagtgtgtccgtctggtgtccaagaacttccataatgtcgatttcgccgcactttggccactgtccgtaaaaactctcgtcgtccggcatcatccagaatgcgggaagatagccctgtccgcttggaaccttaaggcgtgcctcaaaacgtccgtaggtgaaagcatgttttccctgtgtgttcacgcggccggatgtataagaaacagtcccgtcgtccgaaaccttcttgattggctgaatcacaaggtacccgtccttgacataagtgttttccgcagaatcgtcgtaggactgaagctcgttgttgacccagcccggctcatggaattcatagttccagctttttgtgtccagcttgcttccattaaaatcgtcgaaccaaacaaggtctgcctcggtatattcaaccggacctgccgccacttcaccagatggaacattcgcagcctgattttttgagcagccagcaaaaatggatgccgcagccaaaacccctgccgcaatcttcaaaactttcatatccgcctccaagccttttgaacggacgcaaatcgcccgcccttttacaagaaaacgcccctgaatccagcgttcccaaaactgaatccattatcaatcgaggttccgtctaaaaatattaaattcctgctataaattttagaattctgccataaatttgcgggacgggaggaaaaaaatagccccacggagtacgcagggctgtagtcaaatgacttcggcacaaggccttattgtgatttgatttctaaatttagaataccatgttataatagtaattgcaatagatttttcatcgggggcttttatgaaaacattgggacttgatattggtactaattcaattggttggggaatcgttgatgaaagtgcacaaaaaatcgaaaaatgcggcgtttatattttcccagaatgtgctaacaaagatacaaagggtaatataagctcaaaagccgcagaaagaactggattccgttctgcccgaagactaaagtttagaagaaaacttagaaagtatgaaactctaaaagttttgataaaaaatggaatgtgtcctcttaccctggaggaacttgaaaagtggcacaaagaaaaaatatatccaacatcaaaagattttataaattggtacagaactgatgagaggaaaaactgggagccgtactttcttcggaaaaaatgcgttgagcagaagtgtgagccttatgaaattgggcgtgcactgtatcacatcgcacaaaggcgtggatttttgagcaacagaaaagaggctgcaaaagaaactgatggaaaggtaagcgaaggaatttctgagctctcaaaagcaaaaggcgataaaacactcggccagtatttttatgaattgaagcaggccggagaaaaagtccgtggcaaatatacttcccgaaaagagcactatgaagaagaatttaacaaaatttgcacggcgcaggagatttctacaagtctgaaggaagatttgtacaaagcgattttctttcagcgaaaattgaaatctcaaaaattccttgtaggaaagtgtacccttgaggtagggaagccacgctgccctgtttctcatttcgaatttgaagagtttagaatgctttcctttataaacagtattcgcatcaaacgtgaatcttgcgattcaaatacattaaatttatttgaagaaatgaatgaaaattttcccaaggacggaaaactgacagacgaagaaatagaattgataaagccccttttcttcagaacttcaaaaagtaattttgactttaaggacattgcaaaaaagcttagaaaaaatcatgatgaatggacttttaattatcgcgatgacacaaacgttgctgcatgtcctgtttctgcggcattgaaatctatttttggtgaagattggaagaatacaaaaatagataattatgacatttatgatatttggcatgttctctttgattttgatgatgatgaaaaattacacgagtttgcgctgaacaaattgcaccttgattctgaaatggcagataaattttgttcgattcactttcagcagggatatgcaaatcttagcttaaaggcaatccgaaagattcttcccttcctgcgaaagggctatgtttatgcccatgcagtattcttggcaaatattcctaatatgataggggaggatgtttataataagcatgcggatgaaatagaaaagtctgttgaaaatatcataacaagcttaaaagataaaaacaacagaattacacttgcaaaccgctgtatagaagctatctttaaggatgaaaaacatgactttcatagtgaagaatgggataaagcaatcgtcgatgctcaaatagtagatttgtttggcaagagaaaatttgcagaaaagtcactggcagagcagaaagagataagggaagatgtgattgcgaaagttgaagcaactctgaaaattgctgtgtccaaaaatcctaatgattggaaaataccagcgttgcggactgacgatttgattttggaatatcttgaaaaacaaggttttaaaatcaaaaagaatacaaaaatttatcatccgtcagacagtgaatataacttagagcggccgatagaatctgataacggaaaaacttatcttgcttccccaagaacgccgagcgtaaaaaatcctgttgtaatgcgggctttgttccagcttagaaaactggtgaactatcttataaaaacaggcgaaattgacagtgagaccagagttcatgtagagcttgcaaatgaagtgaatgataaaaactggcgcaaagctattgaagatttccaaagagataatgaaaagaaaaatgcagatgctcgaaaaagattatgtgaagaatttggcgacaattttaatattacagatgatgtgttgagaaaattccgtctttggaaagaacagaatgaaatctgtccttacacaggaaagaaaattaacatctgtgatttgtttggtccgcacccgaaatttgactttgagcatacgattccgcgaagtctttcttatgatgattccctggaaaatcttacgctgtgtgattctgactttaacagaaatgtaaagaaacagcatattccgtcggaacttcctaattttgaggaaatagttaggcgatttgagcgaatgtacgaagacaaaattgatgaatgcctttctgcaattgagcggaacaaaagtcgtggaggctacattgatccagaaattaaaaacaggaaaattgttgcccgccataaagcccagcttgagcttgattattacaaaggcaaacttaggcgattttcggcaaaggaagttacatctggctttaagcacagccaactgaacgacacccgaataattacaaaatttgctttgcagtatttaaagtccgtgtttgaacatactttcccggtaaaaggctctatgaccgacacttttaagcgtcaatggggattgcttgacagtgcagaaagcaaagaccgctccaattaccgtcaccatgctgtggatgcgcttacaattgcctgtattgatcggactaaatttaacttgctttcagaggcagttcgggcaagtgctgatggggcgcatttaaaatttgcaaaaccgtgggattcttttgacacagatgttctctctgccgtccaatacattgtgccaaagcattttgtggatgacaattcgctcaggcaaacaaagaaagttctgcgtgacccgcgtacaggaaagccaaaattaggcaagaatggcaacaaaatctatattcaggggaataccgcacgaggttctttgcacaaagatacattctatggctgcattatgacgccgccagaaaaagattctgagccacagaaaatatttgtccagcgtgtttctgttgatacgcttacaaaagattccgctgacaaaattgtggataagggaattcgcaatacttttataaacaatcttgaaagcggaaaacaaactcttgctgaaattcaggaaaggggaattcttttaccataccagatgaatggaaaaaatgtttatgtaaaacggataagagttaaagcaaaaccaacgtctccgcttgtcctcaaaaaacataataatgttattgaacgcaaccctaaagattataagcagaactattatgttgtgaacgatgaaaattatcttattgcattgtatcgtggtaaggatgcgaaggggaaagaaaagtctgtaagtagaacattgaatcttttggatgctataaaagttaaacagggcgggaaaagcctgtacgaagctaaacttgagggacttgatttatataaagtcctaaaaattggaaaaattgtcattttgcagaattcttacaaagaaaatattttcgatttatcaactgaacaaatttggaaaagaatttaccgaattgcaggattatcaaaatctgcgggtctttcgtatgttaaattatctcatattttgtcagcaaagccatggtcatatattccaggaaattttgctttggatgaaggcatagaattccgtaggtatcaagtaaataattttatcggcctcgttgaaggcaaagatttcaccatctctccaacaggggaaattatccctaagaaataaaaaaatggtacaaatcgtaagttcaacttacgatttgtaccaaatctaataaaaactgtggaaatctgatagtctagccgatacttaaaatatgattaaacgaacattatttttctcgaatgctgtttgtttaactctaaaaaataagcagctggtcattcagaataaagagactcgcgcagaatcttctgttccgatagaagatgttggatttatcatcgtcgaaaacaatcaggtttatatttcaatccctgtcataaatgctcttgctgagaacaatgccgcagtcgtgttctgtaacgaaaaacaccttcctttttctatgaatcttccgttagactgtaacacaattcaaaaccaactttttgcagctcaaattgaatcaacgcttccgataaagaaaaaatgctggaaacagataattgagcaaaaaatcaaaaatcaggcagaggttcttgaaaaatacaaaatagattcgataaaactaaagcaatatgcgtcagaaataaaaagcggtgacagcacaaatcgtgaggcaatggctgcaaaactttattgggatttgctcattgatgttgattggattcgtactcgtcacggtgaatatccgaacaatcttttgaattatggttatgcgattttgagagccgcaacagcccgggctttaatcggttcaggccttcttcctactctaggaattcatcatcacaataaatatgacgcttatgcgctagcagatgacattatggaaccgtaccgtccttatattgatgatgaagttgtcgagtttatgaaaaatggcgattcatcggaagaattgacgacaaattttaaaagaaaaattctggatatcctcacaagggatgttgaaataggaaatgtaacacggcctctgatggttgcgcttacaatcacaagttcttctctggcaaaagtttttactgacaaagcagaaactttgaccctaccggagttcgcaaaatgagttacgaaaggttcagtgcttataggattatgtggctattctgtttatttgatttacctacaaacacaaaagcacaacgaaaacgcgcatcagagttcagaaaaaaactgatagccgatggttatgacatgatgcagtacagcgtttacaaaagattctgcggaagcctggaagcgtgcgaagtacatataaaaagagtaaaacagtggcttccaacagaagggaaagtcagtattttaaaattcacagacaaacagttcggggatatagaaacttttgagggagcttcccctgtaaaacctcaagcaactccaaaccaactagagttcttctaaaaaaatggtgaaaacgcctgaaaaatcaaccattttcaccatttttttctggtgcatttttgatgtattttattatataatatggttttagcaaactcatattattatacaacaaaattagaaatcaaaccacaacatccttgaccttcaccttttcaagaagggaattattatacaacaaaattagaaatcaaaccacaacgcttggtatctctgtttacgtggtgtgatgattattatacaacaaaattagaaatcaaaccacaacagtaagagaaactttagcaaaaccacactgattattatacaacaaaattagaaatcaaaccacaacttccgtgtgccgccagtccagaacagtttgattattatacaacaaaattagaaatcaaaccacaacgccctaatgatgataacacgcagaaaatttattattatacaacaaaattagaaatcaaaccacaacacgttccctattaccttttgtggcgccattattattatacaacaaaattagaaatcaaaccacaacagttatctttgcggaaatgtttttacattcattattatacaacaaaattagaaatcaaaccacaaccatcattctacttatgacgctttgatgaaaattattatacaacaaaattagaaatcaaaccacaacgtaaacaaaattacggtttcaaacaaatagattattatacaacaaaattagaaatcaaaccacaacagtctgctttctcagtttggtgccactcctattattatacaacaaaattagaaatcaaaccacaacaaggattactttcttgatgaggatgtgcagattattatacaacaaaattagaaatcaaaccacaacatttgtcgcactcgacatggcgatgatagaattattatacaacaaaattagaaatcaaaccacaactgtttgctcgttctggtgtgttggctatcgattattatacaacaaaattagaaatcaaaccacaacataaagtagtttaatataggtataaataaaattattatacaacaaaattagaaatcaaaccacaacgtggattggaatcaatctcgctccccgataattattatacaacaaaattagaaatcaaaccacaacacaattcaggtatcgcatgtgcaagcaaaatttcaattattatacaacaaaattagaaatcaaaccacaacacaatacaagatttccaatcagccatcgtgattattatacaacaaaattagaaatcaaaccacaacggaacgtttgccattgatgatgacgtgataattattatacaacaaaattagaaatcaaaccacaaccttctggagaaggtcaaggtcaaggatgctattattatacaacaaaattagaaatcaaaccacaactcatcagtcgtttacaatataatgatgcagattattatacaacaaaattagaaatcaaaccacaacggtgcgaggtgactccttctggagatattattattatacaacaaaattagaaatcaaaccacaacgtcaagaaaagttatgacatgcccgggcggattattatacaacaaaattagaaatcaaaccacaacggataaccaattgtcctaatatttttgcaattattatacaacaaaattagaaatcaaaccacaactacttttgatgtgtcaatggactctgataaattattatacaacaaaattagaaatcaaaccacaactgttgcggaggtattacttccgattctgtaattattatacaacaaaattagaaatcaaaccacaactatataaatataaaaaataaaagattttcaattattatacaacaaaattagaaatcaaaccacaacggttgaatcctccataaaaatatccctgtcattattatacaacaaaattagaaatcaaaccacaactcaagctctgcatctgtcttttgttcgcttattattatacaacaaaattagaaatcaaaccacaaccgtttctcaacgttctgcgctttgcgtcttgattattatacaacaaaattagaaattaaaccacaacgtgtttccgtagttgaattaaattcagattattattatacaacaaaattagaaatcaaaccacaacccatggtggttcgagactgtcaaggaccttattattatacaacaaaattagaaatcaaaccacaacttatatcttgaacaaacaagcaatgccattatattatttcatttgccgaaaaatttaccacacaattttgatattttcatcataaattttatatttttatgatggatttacacttataacaagattgtccgatacctagggaaccgctgattaatacacgaagcattaatcaggctactggcggacaaagggggaaacatgaacacatttaccggcttcaaaaagggcttgaaccttggcggatggatttcacagtgcgtcgcgaacacggaagagcactacaacaatttcatcaccgaaaaggacatagaacagattgcaaaatggaactacgaccacgtgaggcttcccatcgattatgaaatcatcatgagcgaagacggattttttcttccttcaggattcaggcacatcgacgactgcatttcatggtgcaaaaaacacggcctcaacataatccttgacctgcacaagaccaaggggtacatgttcgacaaggatgctgtcaaagaccccgacctgtttttccatgacaaggcccttcaggatgtgttcgtaaaaatctggtgcttcatggcggaaaggtacggaaaatattctgattttgttgcgcttgaacttttgaacgaaatagtaaacccgaatcttcaggatgattggaacaggattgcgacaagggctttcaaggaaatcaggcagtttgcaccggactcatggattgttgtcggaggagtgaactacaacagcgtatctgcggttccgggaatcgatgtgccttatgacgaaaagaccgtgttcactttccactgctacgagccgcttgtgttcacgcatcagaaagctccatgggttgaaaaaatgccgccggattttgacgtttcatatccgggtccttcaattgactacatccgcgaaaaaagcaggctgattccacaggcatgccacggagccattttcgacaaggacatggacgatttgcagcttgacgaaaacttctttgaatatcttttcaaaccggctctggacactgcagaaaagaagaacgttcccctctattgcggagaatacggagttctggacagggcaccggtcgaagataccctcagatggctgaacgacatccacaaggctctggaaaaccatggaatcggacgtgcgctctggaactacaagcagaaagatttcggacttgcagattcccactacgacccgattcgtgaggctgtggtttcaaaaaactgaaagattctaggacaaacgtgccatttcatagtataataaaatcatgaagttcaagagattttttgtaaaatggcacgtttatttttatggactcatctgcattttggcgaacgtcctggcggttctgtcaacgaacatttccggctttcccatgcccaagtccgagactcttgatttgtgggaagagtttctgggggcccatgaaaaaataataagcactctaagcctgctctgctatttcattccggttatattgtgcgttttatattcgatgaaagcattcagacgcaagccgaccgacaaagagtacatcaaggtcagggtccatattccaggtgcgtttgcgttgcgcggaattgccggatggatctgcaatcttcttcttgaaaccacgttcctgatttattttaagacacagcacaatgtcccgattacattcatagtgattccgtcacttgcatcatatatttttctttcgatgttctcattcacgctcacatattttacgctggaaactctgaacagaaacgtggtgcttcccgaaatctacccggacggaaacatctccggcacggaacgcatgtcggtttcttccattaaaaacatgttcctgttctactttttttcggcatcggtttttcctgtttcgtttttaatcataaggattttctgcacgaagcattacaacatagagattcccgactactccgatttcatatacacgggactgctgctttttatcggactgattctgaccatactgatttcaagatttttccaaaagccgctccagaaactcaccgacagcgcaaaccagatttcaagcggaaactacgatttgaaaaccgtaatctgctccaacgacgagatgggcgtacttggtgactcattcaattccatggcacgctcgctgaaggaaaaggaattcatgcgcgacacattcggtaaaatcgtaacgccccaaatccgagactaccttttgaacgaaaacgttgcccttggaggagagactgtcgatgtcaccgtaatgttctgcgacatccgaggattcacaagcctttccgaaaacatggaaccggaacgcatcgtctcttttttgaacgaatattttaccggacttgaaaaatgcatcgcatcgcacaacggagtcataaacaaatacataggtgatgcggtcatggcactgttcggcgcacctgtcaggacaaagacacacgcaaaggatgcctggctttctgcctgcgacatgaggcgtgagcttgtcgagatgaacaaaaaattttctcaggaaggcttaccggaaatcagattcggaatcggtcttcacaccgggtctgttcttgcaggaaacatcggagccacaaaccgcatggaatacacggtaatcggcgacacggtgaacacggcaagcagaatcgagggactgtgcaaaatctacaaaaaagaccttttaatatccgaaagcaccgcaaaagagattcagggacaggattttgcctttgtcgatgaatccgaaatccgaggccgcaaggaaaaggtcaggctttttacggattcggggaaccctcttgaaaatcatggggcaaatccttaaaatagattccctatggaattcacacaagaacaaatcgatgcactttcagttaatgaagttgacatcatgaaaaaaatcgccggcgagctgaacatcaatatttcgcaggtcagcgcagttatcagtttggttgcagaaggatgcaccattccttttatcgcacgttaccgcaaggaaaagcatggttcccttgatgaggtacaggtccgtgattgcgaccatcttttcacttcatacaagaatcttgaggaacgccgccttgaaatagtgaagggaattttcgcccagaacaagctgacggaaagtctctacaacgccgccatgaacgcaaagacaatgacggagcttgaagatttgtgggcaccgttcaagaaaaagaagaagacacgcggtatggtcgccattgaaaagggtctcgaccctcttgccgatgcaatgctggagcttgacgacaaggcttttgaagcaaaggcagccgaattcataaagaccgatgcagaagacgcagcgctgaatgttccgactgttgaggacgcaatcaagggtgcgcaggacataattgcagagcgcataagccaggacacaaagaaccgcgaatccgtccacgacctttacatggcaacaggaaccatggtaaccaagggaatcgttcctgaaggtcaggatgccgaaacagccgaaaagacttccacatacaagatgtactgggactacagcgagcctctcaaccaggtcaagccgcacaggattcttgcaatcaacagggctgaacgtgagggtgcattggaagttacccttgatgtcgatgttgattcagcggtcaaggaagtttcttcaaagcagacaatccgcaacaaatatcatgccgatgcaattgaagatggtatcgtccgccttttgagcccggcagttctccgtgaaatcagaagcgatgaatttgatgaagccgatgagcatggaatcggagtgttcagcgagaaccttaaaaaccttcttatgacacagccgatcaagggaagccgcgttcttggagttgacccgggaatccgcacgggaacaaaatgtgccgcacttgatgagaccggaaaatatctgggctacttcctgattaagcaggtgacagatccggatggctcatacaacgccgtgaaggacgcaatcagaaaatatgcgattcaggttgtcgcagtcggtaacggaacgggaagccaggaagttcaggcaatcgtaagcaaggtgatttccgaaaactacccggacgtgcgctacactgtggtcgatgaatcaggcgcatctgtttattctgcatccgacattgcgcgcgaagaattcccggagcttgatttgacaatccgtggtgcaatcagcatgggccgtcgtcttcaggatcctcttgcggagcttgtgaaaatcgatccaaaggcaatcggtgtcggtctctatcagcatgacgtgaaccagaaaaaactttccgacaagcttgatgaagtggtcggctcggtcgtaaaccaggttggagtgaacctcaacacagcgtcggcatcccttctcaaatatgtttcaggaatcaactcaagcctcgcaaaaaagattgtcgcataccgtgacgcaaacggaaaaatcaccagccgcgaagatttgaaaaaggtcagcggattgggaccaaaggcattcgagcagtgcgcaggatttttgaagattccggaaagctcaaacccgttggacaacacttgggttcacccggaaaattatgcagtcgcaagtgaagttcttcctcttgtaaaaaacggtgacaaaattacggccgcagcaaaaaaagagatggaagaaaaatacggagtcggcgagcagacaatcaacgacataatcgacgagcttgcaaaaccgaaccgcgacccacgtgacggatatcctgcaccgatcatgcagaagggtgtcgttgcttttgaagatctgacggtcggaatgaaagtcacaggcaaaatccgcaatgtcgttgatttcggtgctttcgttgacatcggacttcatgagacaggattgattcacataagcgaattgagcgatgactttgtaagcgacccgatggatgtcgtaaaagtcggtgacgtaaaggagtttacaatcatcgacctggacaaagacagaaagaggatttcgctttcattgaagagcgatgccgcaacaaggatgccggggtcttcatcaacgggaactgcatcatcaggcggtacaaaaaagcgtgtcgtcgttgtaaggaaaggcggttccgctccaagcaagggacagggacatgacagaccgaacaggggtcagcagccaaaacagaatttcggaagcgatgacggaatgaaatacaatccgtttgcgatgcttttgaaaaaatagtttgaaaaaaattgaccgtccgattgggaaaactttcgggcggtcttttttttttgcggtggtcgcaaggacaaaatcaccaagtcattgaaaactaaacggagcgcacaggcctcagcccaaaaagtttcaggcggtcacttgggtccagagttctcacgcattttatttcacagctttcaacattgcttttccagctgcctccacagaagcacctttcgccattcctttcgtcccagcaccattcgtagacatttccgctcatgtcatagaggccaaatccgtttgacctttttgagcagacctcgtgggtgctgccacaactgtttttcccgaaccaagccacctcgtccgcgacattgctcccggagtaaataaaattgtccctcgcacttgccgcatccagccattctgccacagtcggaagtctgaatccgttcgcgtggaaattacattcgggcggcaataaaaatttaacgtccgaaccaggcttgtacacccagtttctgacatcactttttccgtcaacaaaatagcatggctcatatccgcagatttcactcagacagttgcagaaatagattgcatcgtaccacgaaactccgtccacaggattgcactcatccctgaaccggcttggattgaatcccatgacctcgttccaaacttcctgtgtaactggcgcaacggagatttcaaatccgggaacctttgtcacctcaaagaacttgtttttccatttcaccggcggaagattctgcgcactcaaattctgcggaacaatttttacaccacacctgtaacaaaaaatcgcaccgggaacaccaaccgaaccgcacacaggacaaacggtaggctcgtcagatttttttatgtccagcgtcttgttgtagatttcaacaatgttttccgcgacaaacgaagcctcttcatggattctttttatggccgcctcatcaacagcgttgtcaaaaaatccggcggactccaaaatcaggacaacatttttttcctcgggggaaagttccatgactgtctccgcatcctgattcataccgtcattctcagcggattccgtttttatgttttcagatttcacagagcggacagcctgcacaattttttctagagatatgctcaaagccgttcctccacacaaaaaaatttcattctattatcggttgatttccacaaataaatcacaaaacacttaccttattttttgacctgtattccgttggcgaaagtccgtagactgatttgaaggcct

SEQ ID NO: 3532 - DNA, 23786 bp, synthetic construct
  misc_feature 1..23786: note = Synthetic
  source 1..23786: mol_type = other DNA
cgaaaaaccgcctgcgtaagctgccaagtggggtgcgcaatgaactgcgccttttgtcaaactggaaaattgggaattgcaagaagcttaagaccagaagaaattgtcgagcagttttttttgttggaaaaacattcaggtcctttagacaacattgtttttatggggatgggagaacccatgatgaacctagaaaacgttagaaaagcgattgcgattttaacagaaaagcgtggaagaaatctttcagaaagacgcataacgctttcaacctctggtgttataaaaggaatatacgatttggcagacaatgggcctcttatcaggctcgcagtttccttaacaacagcagatgaaaaattgagagaaaatctcatgccaatagcaaagacgaatccgcttgcagaattaagaaatgcgattgattattacgcaaaaaaaacaggaaggagagtaactctcgaagcagccttgctgggaaacacaaatacaagcgagcagtctgcaaaaaatatgataaattttgcaagaggaatcgatgtaaacgtaaatctaattccgtggaatcctgtagaaggattgccattcaaagaaccttccaataacgaatgccgacgctttgtagaatggcttgaaaaagcaggattaaacgtgaccctaagaacacgacgaggaagagaaatcggcggagcgtgtggacaacttggcaaaactctatacaaaaaaaattcagacagtaaaaaattgtcataaatgtctgaaaattgaaaaccttagcaaaaagttatttcaataaacgccaataactgctataatttgcctagattttacaaataaaactttcgcaattttaaaaaattgcaggagatatttccctatgcaaaaaaaaatatacgttgttggaatgctggatgccgaaacttgcgcaaaggttgaaaatgccgtaaaagcggttgcaggagtaaacaactgtgtcgcaaatttcgataaagcacaggttctcgttgattttgaaggagcagatgaagctgctatcaattccgcaatttcttctctaggcatagaagtattaaattaaggctatgataaaactgactatacttgacggttttgctgcaaatccaggcgatttaagctgggaaccgtttaaaaaatttgcagaattgaccatttacgacagaaccccgccagaacttacagtagagcgcattgcagattcagatgcgatttttttgaacaaagttgcaatcacagaagaaatcctaaaagattgtcctaaattaaaatatatcggtgttcttgcaacaggttataatgttgttgaccttgaagctgcaaaaaaacgaggaataatcgttacaaatattccttcatattcaactgacagcgtagctcaacacgtattttcacttatcctgaattttacaaatcaagtagagcaacattcaatttcagtacaaaacggtgattggataaacagcaaggatttttgctactggctttctccgcttacagaacttaaaggcaagactttgggaattttcggttttggttcaataggacaaaaagttgcaaagatagcccacgcctttgatatgaatgttttaataaacgtacattcaaaaaaatcttttacaggcaacgaaaaatccgttagtgtagacgaactctttgctcagagcgattttttaactttgcatgctccaatgacagctgagacaaaagaaattgtaaacgaaaaaacgctttcgcttatgaaaaaaactgcattcatcataaacaccgctcgtggcggacttgtaaacgaaagcgacataaaaaaagcactcgatgaacaaaaaattgcaggttacgcttccgatgttcttctaaaagagcctatgacaaaggactgtcctctttttaaggcaaaaaactgtgttttaactccacatatcgcttgggcaccgagagaagcacgacagcgtctttttaatatcgctcttgaaaatttagaagcgttcatatctggaaagccgataaatgttgtcaattaaacttttgttttctcatcgtcttaccttgtcttaaaaaaactaaggtgctaagatatttaaaaatactaaatttcttaagaggtattaaaaatgggaaaaacaatcgcccagaaaatttttgattcgcacttagttgaaagtccgtttgaaggaacttatgtcttaaaactcgatagagtattctgtcacgaaataacaacaccagtcgctataaatgatttagtagcgcgaggaacagacaaggtttttgattcaacaaaaataaaagcggttatagaccatgtaactccagcaaaagacagcaaaacagcagcacaaggaaaaatcctgcgtgattgggcaagacgcaataacgtaaaagatttttttgacataggctcaaatggagtttgccacgcaatttttccagaaaaaggctttgttcgtccaggttttactgtaataatgggcgacagccacacctgcactcacggagcatttggagcttttgcggcaggcgttggaacaacagatttggaagttggaatattaaagggtgtttgttcatttagagagcctagaactataaaatttgtcctgaatggaaagttaaaagatggtgtttacgcaaaagatgtaattcttcaccttataggaaaaatcggtgtaaacggagcgacaaactgcgttgtagaatttacaggacctatcgtagataggatggatatggaagaaagaatgaccctttgcaacatggctgtagaagctggaggaacaagcggaatctgttttccagatgaaaaaaccgttgactacctctggaactttataaaagacgagtacgagacgaaagatgcagcagtagaagcatataaaaaatggcgagatgacgacgattgtgaatacgaaaaagtgataacagaagacctctcaaatcttgagcctgtatgcactataaattataaaccggacgaaataagaaccatctctgaaatgaaaggtacaaaagtagaccagatttacatcggttcttgtacaaacggacgaatctcagatttaagaattgcagcaaaagttttaaaaggccataaacttgcagacggagtaagaggtatagtttctccggcaactccaaaaatctataagatggctcttgaagaaggaattatagacatttttatgcaggcaggtttttgcgttacaaatcctacttgcggtgcgtgccttggaatgtcaaacggagttcttgcagaaggagaagtttgtgcttcaacgacaaatcgtaattttaacggacgcatgggaaaaggcggaatggttcatcttatgagccctgcttctgcggctgcaactgcaatcgcaggaactataacaaattctgagctttacaaaggataaaataacaatcagaggaattgaaatttcttgattggcgaaaaggggaaaatatatgaaagcattcggtggaccagtactttttttggatcgctcagatataaacactgacgaaattattcctgcgaaatatcttacagaaatttcaaagcaggcactaaaaccttattgccttgaagatcttaaattggaaggattcgatgcaaaaagggatttaccaggaaaaaaggtcatcatcacacgagaaaattttggttgtggatcaagccgtgaacacgctccttgggcgttggaagttaacgatatttatgttgtaatcgctcaaaactttgcaagaatttttaggcagaatatgtacaactgtggacttttggccttggatatgtcaaaaaaagacatcgacgatatgttccgaacctttgcaaacaaagaaactgaatgcaaaattgaacaaaaagaagacggaacctggaaggtaaaattgattgcaggttctctttcaaaaagttatccatttaaactggaaggatttgaaaaagcacttgtagaaaacgaaggctggattggatacgcagaatcaaaatattgattaagttaaaaatcaaatcaaaaaaaattaaaagaaagcccattcttttgcaaaaacagaaagtatgggctttttttattagaattggtctggtagacgactttcgtatattatgcactatttggacctgatttttttgtgctataatgggattcatgaaaaacttgattcttattgatgaccacaaaatgcttagaaaaggaatttctgcatattttactgaaaattccaagtggaatgtgattgcagaagcagaaagtcttgatgagattcctaacatcatcaaaaaaatcaaagaaaatccttacatgttaaacaaaactgatggagacagagttcaaaatattgccgataattctgagcgagtttttcaatctgcgacaaaatatccagattctgacgatgaagaaaattatacgctcgcagttgttgacattcagataaaaggcaaagacgaaaggctttcaaatggattcgaagcggttcgccttcttcgccattacggaatccaaagcgttattttttccagccacgacacaggagcttgcattgaacgcgcaatgagcgatgaagtcggcgcaagaggatttgtctcaaaactcagcgatgaaaaacttctgctggacgcggtgaatgccgttgctgagggaaaaactttcatccagccggatttggttacaagccttttgaatacacagagtattttttccatactcacgaaacgagaaaagcagattgtaaagttaattcaagacgggcgttcaaactatgagattgcacagttcctcgaaataaaagtttccacgcttgaaaattacttgagcgtcatttacgacaaaatcggctgcaaaaacaaagagatgctgctaaaaaaactttcataaaggcggttttatctgatggatttttattcggcagaggcaaagattgcggttttccattttatagaacttcttgcgataatttcgattctctgcgtttcttttgtaatcatacttttgctttatattaaaaaaaatgaaaaaaacaggcagcttgaaaaaaagaacaaggaagaaagacagaaagcaaaggcaataattcaagttcaggaagatgagcgaaagagaatcagccgagatttacatgacactgtaactcaagatataagaaccgcccttcttttttgttattatttataaccatatttgagtacataattgtaataaataatgacatttttacagacagttgaaacattgaatttttataagcaatggctataaaaaatcggataatttgccgttaaaacctttatgaatttctcataaaatattccttttctcttattgtcgggtgaccgtgtttttgcggacgctctattagcgctggtggtaatttatcatcgagatgttcgtgtataaatctgtcgagtgttccccacgtaacacgaaactcttttgaaatagataacttgctcctgccggctcttaaagctcgctttattttatatcgataaggagttagcttataatactacggtttttgccactttctgcgacaaaattgttttcctgccttccgagctcgtgctaatccctgttttgtgcgttccgacaataatgaacgttcaatttcggctgataaaccgaaagcgaacgcaaggactttcgattgtaaattatcgacaagttcaaatccttcttttatcgtaacgacgcgtaccttcctttcctacaaattttgtaatacattaagaattattaccaatgatctaccgagtctcgacagttccgtcatgatgattgtatcattcggttgtacgttttttaataattcgcccaattttcttctttcaggatttttcagtccgcttatcgttccctcgatccaatgcacaggagtgagtttcatttttttgcaataacccttgatagcaagcttttgattttctgtcgtttgcccacttgtcgatacgcgaatatacccataaatcatatagcacctctataatcattttatgtggtcatgattttaaggaacggtttaattgtacagtggaggaaaaaatatgcaaataacactcgcgttaactttgcaatggcgttttcgaatacttgtgtttattttaacttcattgtcgcacgcagcaactcgacaagcgatggctggcactattataacaccccaaaattcgagttttaatcaggaatgaagagtttttgtctacaagctgattgagaaatcaaaaaagctgcaatgctgtaaaagaaatgcctgaacatgccctttagagttcttgctttagtatagacaagctcgaaacgacctttcattacactccagacagtttctataatgttcctctgctcgaggcagtccaattgctcttttgaaataagtctgttcatattctttccgggtgcattatgcataaaaacacatcttcggccatttctgaaagaacttccggcttgagctgataccctgcatccgcaaaagcctttccgattatgtctttcgtaagtttttgagccattttactgtcatgaacggaatctgttgtaaaagtaagagactcgacaatcatgtctgcggtgcagactccgtgcagcttaaagccgaaaaaccatccctttgttgactttccacgagacgcacagtcctttgcgactttatgtcgtgagattttattatttttgcagacttcgacaggtgtcgaaccgatgaaatttgtttcgcctgcacatttttccctgttttttgcaagaacagaattcacgaacagcatcatcatgggaaaggatttgtttgtcgctttcaaaaagttctcatagttcggaaaattgggatatcgttccttcaaatattcgtttgcgaatcggtgaaatgcctttaagtttgagaactgcatgaaaaatctgtggatattcaatgccattatatctttcattgaaagatatctcttgaatccacgttttccataataatttcttgcaaaatgttctactaaaattaccctcaaagtacttgaaaaaagaatcaacaattctgtaaactccaattaggctgatttcagtcatggcataatcattttttttggtgtggtaacaaaattttaatgggttacaccttttttgtaaatctattcaaaaataagtcgaaatttgggctaacagtctctctaacagcgggtgcaatgtgatatcacgagacgaagaaggaatgtgggtagctacggggttttagtatcaattaaaagccgattgcaacccattatattgatttttttgttagtacagtcaaagctctggcatcatgagtgcctggcgtcccaatgtgtcgcagtagctgaaaaaccataagacctggtattagcaaaagcaagaggaaacggtataaacgggcgagcattctgtggggcaaaagaaccccactgtacaattaaaccgttcccatatttgatatagctcgctctctcgctcgtttcctgcacgacgatatcagaatttaaaataacataatgctcgccatcaaagaggatctcgtacgtgcaccctgcacttatcgcgcctataccaccttggaatttaccgacatacaccggcgcggcaccggtactggcgtttccatcgtatacattgagcgttagattataagtcccgcgaacaccctccgccatcgttattaaatttgatataaatatgtgcgccggcttttttttacaaaaccattgattgtaaccgttttatccatcgtatttgtcgcagtcgtacaaataccaaaatttgcacactctcggagaatactgccctgcgtgtataccggtataccggcactgcccgcattggcgagtgttgtgtgtatctctgagcaggtggtcgtcataccatcagcgttaataaaaattggcgtgtttgcggaaccgattgccggatgtgcttgtggtgtgccgattcgttgtgcatacatagcaagggctgcgtttgcagcgtcaatattttcacacggtttcggaatcccgttgccgtcgatatataccggcttagtttttgtgccggcggataacgatgcgccgtccgcgcccaaatgagcggcatatttcgcatcggcagatttttttgctttacctacaatcacgtctttgaattttgcagccttcgtttttgtcccttgttcgatgatgattatatcttcacctgatgtattgtttgccggcgccgttgtatatattttaccgattgttatacctgccatgtttttactcctaaaaaaattgttaaactttcaatacttcgccagtgcgcatattccatcattgttttcaccgagtatcaattttgcataatcgcttttcggatctattttttacccgaaatcggcttgcacttttcgatgcaggcttttcaagcgcaattgtttttgtactgccgttgtcatcgcaaaaatgcaagtacgacacaaacgtatcaggcttaaactgtgcaaaagtgaatgcactgtcggttgtaccttttgcgatttttgttaccgcttcgccgctaaattcagaattgccgaaccagccgtcaaagacctgtccttccttagatggggctcttaacggaaattcatcgtttttcgtataagaagagggattagcaccattgtttgttccgccgtttaagtgataggtgatgctgtatcctcccgattcatctgaaccgttcccccctcccgaacctgcagaactagaagaacctaaaggttgtttacatccaaatagcattgccgtcaatgctaatccaagtacaagtatttttacacttgttttcattaatgcttttttcataagaaagcttctttactagaaacggacggtcttgttttgccgtaaatacgccacgagaaaacaaaccgcccgccgtttttattaagagaaaatataattgcatagaataaaaaagagatgagattagtattgtattgtaagtttgaatttacattagaggtaaacaccgctttgttccggttcggagaaaacacatttcgcatacacaagaaaaacacggataaacctcctatcaataaatagttatacaatacctttgccgcctgtcgtcctttgctgaaggtggtaaacagtgtaagtccctaccggcaatgcggtaaacataatcactgtgccttgtgtaactttgccgcttgcaggatttgcactcattgttccgcgttctcctgccgtcacctctacggtaaaagattcggaaacaggcggttgccccggcgtgccgggattcaggcatcctgtaattcctatcaccgcgatggcaagcgccaacgcaagtattcctgtttttcttaacgctttcatgtttttcctcctgcgtaagttagttttatgttaaaccgcaagtttacgcacaacttgttggcttggaaaaactttaaaacaaaaaaaagactgccatgccatggacgcttttttttcgcactcggacacgacggtctttttttgctatataaaattttttaaagaaaggatgttctgttcaagattgtgtttcttctcaaaactcttgtcaacattttttcaatgtcttcatattaatactacctttcgaattttgcaaatggtaaataggggggggtattatttacaatttatcccttcgtaaaaaaaagttttaaattaaatgtctaggaacaaatttctgtgatatagtaagttaaattataggttttagaatgtggcagggattggaaggacgacgaagacgttccgaagcgtagcgaaggaatggagcgagagcggaatcctggaaagcccgatttttgcgaaatgaaacgaagtgaaatgcagcaaaaagccacccgaattaaaaagttcgactttcagcctgataaaaaaagtcccacaagatgcgggactgtagtcaaatgacttcggcatttagccttattgtgatttgatttctgtaatcaagataacattgcctgcaattttttgcaagcacattttttattaaggattttaaaaattatgaaaacacttggactcgacataggaacaaattccataggctggggaattgttgacgaaacagcaagcaaaatagaagactgcggcgtgtacattttccctgaaggcgtaaaaaaagaaaaaggaaacgaaagctccaaagcggcggagaggacaagtttccgccttgcccggagattaaaattcagaagaaaacttaggaaatacgagacgctaaaagtcctcatcaaaaacaaaatgtgtcctctttctatggaagaactcgaaaaatggcggaaacaaaaaatatatccgacttcaagagattttttaaactggtaccggaccgacgaagtaaaaaactgggagccatatttcctcaggaaaaaatgcgttgagcaaaaagccgagccgaatgaaatcgggcgcgcactgtatcacattgcacaacggcgcggatttttaagcaacagaaaagaaacaacaaaagcgtcggaggggacggtttcaaaaagcatagacgaactttcttcacttatgggcgacagaacgctcggtcagtatttttacgaattaaaacagtccggcgaaaaagtacgcggaaaatacacatcgagaaaagagcattacgaaaaagaattcaacaaaatatgcgaagttcaggctatctcgcctgaattgaaagacgatttatacaaggcaatcttctttcaacgaaaacttaaatcacaaaaatttcgcgtgggaaaatgtacatttgaaaagagtaagccacgtgccccaatctctcattttgagtttgaagaattcagaatgctttccttcatcaattctataaaacttgcaaaaaattccggggaagatgaaaactgcgattttgattttcttacggaagaagaaaaagaaattataaaaccgctattttttagaatttcaaagccttcttttcagtttgcagacatcgaaaaaaaattaaaaggcaagaacgagttttggaaattcaactacagaaaagacacgaacgttgcaggctgccctgtttctgccggattaaaaaatattttcggcgacgactcttcctatgaaagctggaaagacaaaaaaatcgggcaatacgacatgtgcgacatctggcacgtcctttttgattttgacgatgaagaaaaattgcttgaatttgcaaaagaaaaactttttttgaacgatgaaacggcaaataaattctgtgcaatcagaattcagcaaggctacgcaaatttaagcctcaaggcaatccgtaaaataactccttttttaaggaaaggctacatctattctaccgcagtttttcttgcaaacattccgacaatgattggacaaaatacatttttgcagaatgaaaaagaaattgaagattctgtaaaaaatataatcggaacgctcaaagataaaaacaatataatcgttcttgcaaaccgctgtcttgagtctgcgttcaaagataaagacaatgattttaggtttgaagaatgggacaaatcgattgtggaaaattccgcacaggacttgtttggaaagaaaaagtggaacgaatatgacgaagaaaaacgtaaagacataattttgcaagtttccgaaaaagttgaagacaatttaaaaattgccgtcggaaaaaatccgaacgactacaaatatcagcttttgcgcactgacgacttgattttggactacctcaatcaaaaaggatttactataaatggaaaactatatcacccgagcgacacagattacaactttgaaacgccagttccggcagaagacgggaaaatataccttgcatcacctcgctcaccgagcgtaaaaaatcctgtagtgatgagagctttgcaccaactcaggaaacttatgaactatcttataaaaaccggaaagatagacagttctacgagaataaatgtggagctggcgaacgaggtaaacgacaaaaatcagcggaaggctatcgaagaatttgtgagggcgaacgaaaaaaataatgctgacgcaaaaaagaaaatagaagaactttgcgtcgaagcgggattcaaaatcgttccgacagattctgatgtcaaaaaattcagactctggaaagaacaaaatgaaacttgcccttacacgggaaagcacataagttttacagatttgttcggaccgcttcctaaatttgactttgagcacacaattccaagaagcctgtcttatgacgattcccttgaaaatcttacactttgcgaaagcgacttcaaccgaaacgtaaaaaaacagaaacttccttcggaacttccgaattttgaagaaataaacaagcgattccaaaaattttatgaggacaaaatcgacaactacttgagaataattgaactcaacacaaaacgtggaggctcatacgaagaccctgctgcaaaagatgcacgaatcgtgaaaaaacacaaggcagagtacgagcttgactattacaaaggaaaattaaagcgtttttcagcgacagaagttacttcaggttttaagcacagccaactaaatgacactcgtatcattacaaaattttctctttcgtatttgaagggagtctttggctatgttcagcccgtaaaaggttctatgacagacaccttcaaaaggcagtggggtttgatggaacgagatgaggtaaaagaccgctcaaaccatatacatcacactgtggatgctttgacaatcgcctgcataaatcgtggaaaattcaatctgctgtcggaggcaatcaaaaacagctctgacggaaagcatctgaaatttccaaaaccgtgggagacgtttggcacagacgttcttagtgccgttcaatatataattcccaaaattttttcagaagaaaactcgttgaggcagtcaaagaaaatcatgcgaaatcgggatggaaagcctgtcttgaaaaacggaaaacctgtatttgttcaaggggcgaccgcgcgaggttctttgcataaggacaccttctatggttgcataaaaaccgttcccgaaaagggcggaaaatctgagacgatatatgtgcaaagaattccggtttcaacgctggacgaaaaaagtgcggagaaaatcatcgacaaggggataagagaaacttttaaaaagaatctttcagacggaatacaaacgctgcaagatattcaaacaagcggaatcctgctgccgtttaaaagtgacggaagagatgtttttgtaaaacgggtgaggataaaggcgcagccgacctcgccgatcactttgaaaaaacaccacaatgtgatttcaaaaaatcctaaagactacaaacaaaattattatgttgtaaacgacgaaaactatcttcttgccatttacagagggaaagacgaaaaaggaaaggacgtttcagactacaaaatttgcaatttgcttgacgctgtaaaaagtagacagaacaagactgaactctaccctgattttaaagagaaaaaaggcattaacctgaaattgtacaaggtcctaaaaatcggaaagactgtgattctgcaaaacgacgttcaagaagatgtatttgctttgccaaaagaaaaattctggaagagactgtacagaatcgcagggcttgcaacttcaggaaatgatattcacataaaacttgtccacatcataagtgcagaaccttgggaatatatgaaaggtgaaaaagatttaaatgcaggcatagaatgtcttctttatttacaatcaaattttaaggggcttattgaaggacaggactttacagtttcgcctataggagaaattatacgaaagtaaggagtttgtaaaaggtgtaagcgtttcacgcaaaaataaaactgaacatatcgatttttttgtccgatagttaaagtatggttaaacgaacactgtttttctcgcacgctgtttgtttaagcgcaaggcacaagcagcttgtcattttcagtaaagaaactcaagaagaaaccttagttccaatcgaggacataggttttgtgattgtggaaaatgcactcgtctcgcttacaattactttaataaacgaactcacggacaataactgtgctcttatcttttgcaatgaaaagcacctacccttttcaatgacgatgccacttgactgcaacgaaatccaatcgcaacttttttcagcccagataaacgctaaacttcctgtcaaaaaaaactgctggaagcagattgtggaatacaagataaaaaatcagggacttgttcttaaaaaatacgatttgaactttgcgaggcttgttgatttttcaaaatgcgtaaaaagcggcgactcgacgaacatggaaagtcaggcagcaaaattttactgggacaatctttttggaaagagatggtgtcgcgaccgttttggagattttccgaacaattatttaaattacggatatgcgattttgagagccgcaaccgcacgcgcattggtcggttcaggtcttctgcctacgctaggaatccatcatcacaataaatataacgcatattgcctcgccgacgatttgatggagccttacagaccttttatcgacgatgaagtaatagaatacatttcgacaaatccggatgaaaaagagctcggagtggaattcaaaacaaagattttgaaagtcctcacgcgcgatgtaaaaatgggaaacttgacaagaccgatgatggtagccctttcaatgacaagttcgtcgctggcaaacgctctttcaaacgaatctgaaaaattaaaattgccggattttgtatgatatgagttttgaccggataaacgcttataagataatgtggattttctgtatgtttgatttaccgacaaacacaaaacctcagcgcaaacgagcgagcgagtttcgtaagaacttgttggaagatggttttgagatgatgcagttcagcgtttacaaaagattctgcggaagcagagaatcgtgcgaagttcacgaaaatcgaataaaaaaatggcttccgagggaaggaactgtaagcattttgaaatttacagacaaacagttcggtgaaattctgacatttatcggtgaaatcccccaaaaaaaagaaaaaacaccgcaacaactccaattgttttaacgtcggcacttgaaaaagctaaaaagcagaaaaaacaggctacggcgtaaaaaaaacaaagaaaagcgcataaaaacgtaacttttcctcattttttttacactgtaaaccagtctaaatctttgcataatatggttttataaaactcatattattttacatcaaagatagaaatcaaaccacaacgcgtagcgcaccgcgtccatcgtgtggtcgattattttacatcaaagatagaaatcaaaccacaacatgaaatagaaaataaactctacgaagcgaattattttacatcaaagatagaaatcaaaccacaacctttaattgttgctgggtttttgattgtggattattttacatcaaagatagaaatcaaaccacaacaaggagtgtttgattatggaaaaaatctacattattttacatcaaagatagaaatcaaaccacaactaaaattaaaagcggtgttaacatagtcggattattttacatcaaagatagaaatcaaaccacaacgataccttttttattattatttttgttattattattttacatcaaagatagaaatcaaaccacaaccgttctccagcaatcacaaactactgacgattattttacatcaaagatagaaatcaaaccacaactgtaaacctgacaaggatattttatttggtattattttacatcaaagatagaaatcaaaccacaactgatgggcaagactacatatctgaaattaaattattttacatcaaagatagaaatcaaaccacaacagcgtcaacggtcgtaaaaaatgtttaaggattattttacatcaaagatagaaatcaaaccacaacataccgtgtataatatagaaagtttttttaattattttacatcaaagatagaaatcaaaccacaacacgcctgttaataacaatcattttaacttcattattttacatcaaagatagaaatcaaaccacaaccagcaatcgtttcagcggttggggcaataattattttacatcaaagatagaaatcaaaccacaacgggtttgttcatttattttctatgaaagaaattattttacatcaaagatagaaatcaaaccacaaccaggtgtgttcagtggacgatagattttttattattttacatcaaagatagaaatcaaaccacaactattttgggttcgttgcgtacattcaaggaattattttacatcaaagatagaaatcaaaccacaaccgtcgcttgcttttgaaaaaccgcctgcttattattttacatcaaagatagaaatcaaaccacaactataaaaaccgccgtcgaaaaagcgatagaattattttacatcaaagatagaaatcaaaccacaaccaggtgagttgttgcctgatggaagccgtgattattttacatcaaagatagaaatcaaaccacaacgatttttgataccttttttgataccttttattattttacatcaaagatagaaatcaaaccacaaccaggtgtgttcagtggacgatagattttttattattttacatcaaagatagaaatcaaaccacaactattttgggttcgttgcgtacattcaaggaattattttacatcaaagatagaaatcaaaccacaaccgtcgcttgcttttgaaaaaccgcctgcttattattttacatcaaagatagaaatcaaaccacaaccgtcgcttgcttttgaaaaaccgcctgcttattattttacatcaaagatagaaatcaaaccacaaccttgagtatttgaatatgggttatatcgaaattattttacatcaaagatagaaatcaaaccacaacatttctgcgatttcagttattcatattcagattattttacatcaaagatagaaatcaaaccacaacctttaattgtcgctggtcttttaattgtggattattttacatcaaagatagaaatcaaaccacaactctgctaagtatgaggttgacgccgatgcgattattttacatcaaagatagaaatcaaaccacaactacattcactcaagcacgttggtttgatgattattttacatcaaagatagaaatcaaaccacaaccatagttttctaaagcattttttaccgctcattattttacatcaaagatagaaatcaaaccacaacagttgttccatttcttctgtggtccactcgattattttacatcaaagatagaaatcaaaccacaaccttccagcgccctctcttgctccgcccctaattattttacatcaaagatagaaatcaaaccacaacatacctttttattaattttttattgtttttattattttacatcaaagatagaaatcaaaccacaaccatatccggtatatggtcacataactgtcgattattttacatcaaagatagaaatcaaaccacaaccagtaggaatatctttaataattccataaattattttacatcaaagatagaaatcaaactacaacactactatgttacggactcttaattcttcgattattttacatcaaagatagaaatcaaaccacaactattgttttgtacgcattacaaaaagtgcattattttacatcaaagatagaaatcaaaccacaacatacgacttacacattcgttgcaggtggtcattattttacatcaaagatagaaatcaaaccacaacctttttacgttcccagattcagatgttacgattattttacatcaaagatagaaatcaaaccacaaccgtatttatatttattccgcctgatttttgattattttacatcaaagatagaaatcaaaccacaactaaaatgctattgacagtggttggcttgtatcggttatcagcaattttcagatccccgacacgacaattctcctgttacatagataagttcccaaatatgagatacaatgaatgcgatatcgcatattttcgtaaaatgggttattgagcagatgtccccatcttaagcttttctgcaaacacctgcaaaaatattttatggagaactgttatgaaaatcgaacacatcgccatgtatgtaaatgatttagaaaaagcaaaagatttttttatcgaatattttggcggacgagcaaatgccggttaccacaataaaactacagattttcgttcgtattttataagttttgatggtggtgctcggctggaaataatgaacaagcccgaaatatcggatccaaaaaaacttccgacacgcactgggtatgcgcacatcgctttttcagtcggcagcaaagaggcagtagatgaactgaccgaaaagctaagacatgcgggattcagcgttgcaagcggtcctagaacaacaggcgacggatattacgaaagctgcatcgttgcgtttgaagataatcagattgaaatcacagtgtagctaataagaaaaaaagctgtatccgcaaactgttttttacagtaccgatgtaggcatcaatacgacacaacattggaacgttttctgcaaatttttgcggttttcactgtgtacttacaaatggaaaatcaccgtcagtttttagaatcttcccacaattttctatataagccctcttcttttatcagattgccgtgtgtgccgcgctgaacaatgtgcacattttcgattaccagaatttggccggcgttgcggaggcttgtcagcttgtgagcaatcatgatgacggttttatctttgagcaattcctgtaaggcggcttgtattttggcttcgttttcggcatcgacattgtcggttaccgtttttttttcagccgaccatgcagctattatgcaaacgattgagttcataagtaaaaacttacacaaaagacttccgtttgaaatgctgtagcaaagccaaccgaatatcatggcaattgctttgtcaacaatattcgccggaattcttggcagaagagccgaaataaaaaccggcagatttgtgctttttaaaagcgagtacataaatcggacttgggatgtttccttatagtttgctaatatattcataacggtaaaaatagtggctccttcaaaactgattatgagggaaatcaaaaaaataagaaaaacaatgtcaatcaaaccgatttttttgtggcgcagaatataaaatcggattataaaaacaattgaaaaactgcaaatcgaccaaaaaagcgaatatggcgaaaaatgatagacaaatacggaaacagtgtgaaagacagccgcacagacaattcccgaagtaagtgaaaaaaatgctgccgtaacggtaaaaatcgtgtccatatagaacggaagttggaagtgtgaattaaaataatgaggaccgagattcataagtccaaaaataacgcccaaaaggattggaaaaagcatatttaagaaagtcgggcagccgttgctgccctcaaaaatatttttagcttgtgaagtttttctgtgcatggcggaattttagcatgaaaagacaaaaatttcatctttattttcggagaaaaaagtagacaaactggatttttagtaatttcgctgaaaaaaaaatctctcccgatattttatgtttcagtttaagctgccggttttaataagccggcttaaaatgtgcgcacgtaaacgagtgtgtgtatgagcccgtgcgtaagcccatacacaccatcctgtcgatagtctatatcaccgccgtccatggcggtgactgacacaaattgcatctgaaaactgcacacggacgtgcgtttttaatctggtctgcaaaccaaccgtaagccaaaactggcttgcttgtatgagggaccttcatgccaacgccgcgcacgagtacaatgagccgccgcgcaagatgcgggaagcagggaagccaggcccagccgccccggtcgggtcctgcccgcccgcaggcgtatcactagtataccagtcccagcaccactcctctacgttcccgcacatgtcgtataacccgtagccgttcgctttcttcttcttcacttcatgcgttatatcattttctttgccataccacgcatagtctccaagctcacttttggtatctgttcctgcccatttatcgcttgttccgcccatggcagcccattcccattccgcctccgtcggtaaccggaatccgtttttactccagtcgcatacggcattatcccaatcactgttctgcgatgtcggtatggcggcaaaggtcagtgtatcgaagtttacgccgcttaccgtgtaacacggctcaagattgcacgctttactcagcttattgcaaaatgctatacaagcataccagtttacgctctctaccggccgcttctcctgcacttcgtcccagtgaggttgtttgttgttgtcgttggggtctccattaagatagctcggattattccccatcaccgcctgccacagctcctgcgttacctccgtctctcctatcaggtatgcacttaagcttaccgtatgcggttgattgttgctttcatcgttatgccctatagttttatctgttacggctttgatatctttcatcagaaaaccgatgccgtttaccgaataacccataccttttataaagctcacctttatctcagtatcttccgttacctttacttttgcggtcttgttgtagactgttccgctaccgggttcaaaactgccgtgtgaaagcgtccatttgtctgccgcataaccttcatccggtattgccgtaaaggttacgatcttttcctgctcaacattgtcgcccgaatggatttcgatgccgtcgaccgttgctttgagtgttccgtttgccggtgtgccgtctaccccgaaggttatgaaatttccaattctcttaaacgttactttcacttccgtttcggtgcttaccgttattgtcgccgttgcgctgccggtcgttcccgtattgggctgcaaggctgatgcgggcgttactgtccatgtgtctatcttatagcctgtacccggcactgctgtaaagacgattttactgccttccggcacctgattgtccgacgggatttcgggaaatgccgttaccgtgccggttgagggtactgtaagcgttaccgtgcgcttggtgataagagccggatcgtcttctgcaaagacagcttttaccttcgccgcccgctttaccgtaagcttgtacgtaagcccggcgacaccggtatcggttccgtcaagttcccactttgcaagcttgtagcctctaagaggcgttgccgtaaaggcaagctcggtaccttcggcaaccagctcgtctgcaggcagtgcaggcgttaccgtaacattgccgccgagggtgttttcaagctttactatgaacttattaaccgcaggcggaggggtaggcgccggcttattgccgtccgcatcattctgacagccggtaaacagcagtgcgacaagcagcacaaaagctgctcccaaaaaggcatgtgcttttttattgttggttgttttcattaaaaacctccttaaaaattattttggattgaatcagtctcaatccgcaaggacattcagattatccgcacaaaagatgcggcattctcgaattaccgttccggataccctcgaacgatgtttcgagacagtctcgaacactgcttcgacgcaccgccgaactatgcttcgagatactctcggtctatgctgcagcagtcaacgctttattgaatcttccgtttttaagcgttttgccggacttatttgaaccgttatcataaaagtgcagacctaagaacccgaaaaatattgtactcgccgcaataaaagcggttagtattcgtaaaaaacttttcattttttcacgcaaactgcgttttttttatttttttctaccttgatagaataaaatcccgcattattactttaattttttttccgccacaacttgaactgctgtctgcaaagttctgaagtatcatagcgagcgttattttccaaaagaaaacgctctacaatttctttctcaacaggattcggtattaaaattgcaagttcttctttttcaaatctgtcttttgaaatgtatttgcagatgatttctatggaggaagatgaattgttttctgttttttcaaaacctgaataaaaaatatcttttaaaagtgaggcaacttttgaaggctttatttttaatttttccgcaattgaatataattgtattaaagaaatagaaaaagttgaaaattcaccgaaaaaaccgcaaacattttttataaaagcaagctcataaaaaactatttttctatattctgatttggagacatttaaaagtccgcgttccaaaatataacttgaaaggaaatttcctttctcaaactctccgactgccataaaatcatcccccgcgctttatcgctttgcgaaagcctgccgactgattctgtgccaattataaaattcttgtgattacggcggtagatatatggctttgggaaattatgtgagtcaactcattttttttgaagaatttttaaagatgttattaaagttatatttattttttatcagtaaaatttattttatgtcttgcccttatatagatatagttttcgcatttttacttggacacaaacctttatctctttataaaattgagtctttcaaggcggtccaaaatcaattcgacaatctcgtctggggtatattttgaagtgtctactactaaatcaacaaaatcgtattttccattgtcaattccatagagttttaaatatcggcggctatcttcgctatcgcgcatcgctgtaaaacgctttatttcatctaaatccccaccttctctattaaaaaccctttgagcgcgaatttcatcactcgcaagaagataaattttaaaatcggcttcttttagcatccaaattgcaagtcgactgcccaaaacacaactttcttttaaagcaagttcaacttgatgtttgtccacatattcatcgtagctgtcgtcgttctttgcgttttctataacttgagcaagtgtaagtcctttttctaacgccaactgtcgaaaagtgtaatttataagttttattccaagtttttcgctcaaaagagttgaaacagtcgtgtttccgcagccagattttccgctgacggcaattctaagttctttattcaatttcatgagaaattcctctattcaatatttttcgcctgctctcttatattttctaaagcatcctttgcatttacaaccatttcgccaacttcaataaactgattttttgagccaatcgtgtttatctctctatttgtttcctgacagataaaatcgattctctttccaggaattggattttcgtttaattcttttttcagtgcgcatagatggctttgcaagcggattatctcttcgtttatcgtatactttaccatcatcgcggcaacttccgtcatgattcggttttcgtcgacgctatcttttaaaagttcattaaagcgttgcgttatctgctctttaaatttttgctccatctttggctgccattccttaaaaaaacaagcggcattttcaagaatgctgagttttttgagcaaatcgacttttaagttttcgccttccctttttctgtcttcaataaatctttcaaaaacttcttcaaaaacaggctctatctttagccaatagttctctgcatcgtattggtgcgttatatttaaaactccgtcttggttt

SEQ ID NO: 3533 - DNA, 21706 bp, synthetic construct
  misc_feature 1..21706: note = Synthetic
  source 1..21706: mol_type = other DNA
atgacgtggctttaccttggaatggtagaagaaaaactcggggctttggaatctgcggcggaagactacatgatggtcttgaacatagattctacggaagtcatcgcaaaagaacgacttacaaaactttctgaccatatccaggacactgcgccggaagaagaagctgacggggatgaacttcaggacgtgaaacctgaaatccctgaaaattcggaaaccgcagaatcagaagaaacagaaaaaaacgcaagcgaaaatcaaaatgaaaaatcggctaggaaaaacgacgaacaaagccttgcgaaagtctccaaagaagaagacgcgaacattttgcacattgacggaagcaaaatttccgcatttgacgaggaacaaaaatcactttcgcagaaacttcttgaaggcgaagaactttccgacttcggctacgttatgcccgaagaaaaaaacgaagaagacaaaaaaacggaacagttcataacgaaccctaaagattccggctcggattctcaaatagatttccaaaacaaagaagccgtcgaggacgaacggaaaaaggattccgcctatgaagacaacattctgaaagacgaaggcgacaattcctttaacaaaaatctttccgaaaacacaaaacctgcttccgatttttcaaacggcaatacggaagacgaaaacatttccaacgctgcccccaattcaactgcctcgggaatcggcggttcttcaacggagctgttccccgaaaacaaagcccaaggagacgagagagcttcggattattcgcaaaatgtcccggacggaaaaacaccctcgccttcccaagaggattccgccgtttccgatacgcctacttccgacgacgaaaatgaaattccgccgttgggtaacgacatttttagcgacaacgatttagaaggcgacgatttttcatctgagcgggaaaattccgttccaagttcaaaaactccttctcaatcgtctgaaaaattctccgccacgcaagaaattaaaagcggcacgtcgggttcttcggagcaaaatgattcggcaacagaaaagaaattcaacgatgttcttgaaaaagcagaaaaagctgcggaaaaggcttgggaagccgcccagaccgcagcggacgccgcatccacagtcgacaaggctgaagatttcataaaccaaatgaccgaagacgcgacaaaaaaactgcaagatgtagcagatgacattcagaacagacttgaagagtcgagtttttcaaaagaacttccgaacaatgaagataacgaaaacctatcgcccgatgttccgcctaaagatgaagaaaaaaaatcttcctgcgagcagaacgcttttggagaaactttcaattcggacgaagaacccaaatgcgcattctcagcaattggctcggagaatgaagaaaatttttcttcggacaatgacaatcttagtccgcaagcggaaagcgaaccggacgcaaacgaagaacttttcttgtcggcaaaactcaccccgtacgaaactctgcttaatcaggtcagccaaattcttcctcttgttgagaatatgctcataaataaagaagatgcagctaaattcagcaaagaagtcgccctttttaacagcatcaaggaaatgagcgcatcccttcccgctgaactaaaagaagattttatgacaggcagaatgcgtgttctcctcgatttcatcatagcaaaactttcgggaaagcccggactattacggacaacggtttctctaaagaaaagcggaattttcggaaaggaagaagaatcccttaccgatgcagaacagcatgcacaaaactacagcgaaaaagacttggtaaaaaaagtcctttacgatatgcgcatgatggcaatgtcgctgcatgacagggaacttgccgccggtcttgagcggttgggaaaagaagccgaagaaaaactctaagccttaaagccgtaaaataaaagagcaaaaacaatatggcaaaagaaagaaaaaaccttgtgaagagcggacttgctctttctcttatgacgttcgcctcaagaatcatggggcttgtccgtgaaatgacaaaagccactttcctcggcacaagcgcatacgcagacgcattcggcatagcgtttatgattccgaaccttttcaggcggctgtttgcggaaaacagtgtctccgtggcgttcattccgacattcagaggttatgtcgaagacgaaaactcagcgaataaaaaccaacggcgcataatacacgaaaagacgcagacattcatatcgtccaccctcacgctggtgtctttccttaccgcatgcgtggtagtgctgggaattctcctatcccgcttaatagtcccgattttctttagggaagatgcgagtgcaatcgtacttaacgaagctactctgcttacaagaataatgttcccgtatctttttgtgatttcagtggcggcgttctttcaaggaatcctcaacggaagcaacatatttgccccgtcaggattcacgcctgtgcttttcaacacaatagtcgtccttataacatatatactcacaccccaactggtaaaaacccaaggagtgagcgaaaaccttccctacgaagcccttgccgcaagagcgatgagtttcggagtcataacgggaggatgtgttcaggcactgttccaatggccctttgtgcggaaaacaggctggaaaaccactctcacaggactaagaaaatcattcaccaatcagggaacaaaaaaagtcgtagcccttataatccccacgatagtcggaatggcagcgtaccaactgaacgacgtggtgtccacagcagtggcaggaaagattgcaacaggaacggtcgcaagcctgcaatattcactaagactgcaagaactcatactgggaatctttgccgtatctataggaacggtgattcttcccgacctttcgtccttggcaaaaagacaggaatgggaaggattcaacaaaatgttaatgcaggcgataaaaataatcacgctcataactgttcccgtaaccttttattctcttgtggcaggaaaagaacttatctcaatcgtatataaaaagggaagtttcgacgaaaactctgtagcacagacactatctgtcttcagattccacatagcaggactttttttcattgcctctaacagaataataacgccggcattctattcccagtcgaacactaaacttccaacgatggcgggaatcggaagcatgattttcaacatgattcttgcaatatcactagcccttccgatgaaaggcccgggaatcgcacttgcgctctcaatctcaagcgcacttaatacagttcttttgtttattttcatgaaaaaaatgccctcgatggaatacggaaaaatcgcaaagggtatgactttttatgcgctcaaaatgattttgttcgcagcgattgcggcagttccaacatacattttgcgcccccatcttctaaagctcttcgaaggccggaaccgctttattgcattcggaattcccataattgcaatggcgctcatatttttttccgccggaacgattctgctatttattttcagagataaaaccgcactttcctttaaaaaaaaaataaaaggaaaattcggaaaataaaaacggcgacccgaaagattttccgggaaaaaagctgaacaaagcacgccgcatatgcacaaagttgttttaaagttctttgttttattgtacgaaaaacgcctaaaaaatgtcgagtttttagaaaactcgacatttttcatatttaatattttacgatttttatatccatgtaacttttgtaaaaaccgttgtcattttgcctgcggagtttatatgttcctttgttcagataaagaagtgttgagatattcggcgttcctgtggaaacaaaagtttttacactatctccgtcggaagttaaaagctctaaggtttctttgttcgtgttgcttccgttcgaactgtcttttaagtaaaagtagacttttgtatttccgtctacagagaatgaatcataaataagaaaacttccgctactcaaagcggcatttttgagatttataatttccactccttcccgtccggtaacttctattttggaatttaccggatttgcagaagaatcttcatttaccgcattagtatcattttttcctacaacatatcctttgtgtccttttgcgtcattgcagccggaaagcgtaatgtccacctttcctttatctttaatgctgccggaattataaccgcagtaaccgcccgcataaacagccggggaagtaccggctgtggcgctgccttttacggctgttttgattacttttgttgaatcgcctgaaacagtgccggagttcattccgcagattcctccggtaaattgcataccgtttgtttcaccgtcgattgtacaggtgtctaccgtacagtttttaatctcgccaaagttgatgttgcaaattccgccgacacagttatttaccgataaaggttttattcccgttaccgtacaatttgaaacagtacaagaatcgataacgccgcctgccgcatttgtttttgcaataggtgcatagcccttcatatttacgccggaaacggtgacgtcccttatggttccgcgatttgtgttgcagaaagctccttttatttcgatgcttttgatttcacttcctgcggcaattgtatcgaacagaacaccggaaacccctgagattttcgtcaagctttcaccaacaatttttcctttgaaagtttttccggatgttaaagatatagccggatttgaaacagtattgtcggataaatcattctgcttaagcagaatatctgcagaaattgttccgctaacggtatttgcaaaaggcgctcccatcaaagcgttccattgttttacatcttttacggaataatatcccgagtaaatccacgaatttcccggtttcccgcaccactgcgcatacaaagtgatgtcatcggtaaatgccgcagttattccttccgcatagcgggttccgcttccgttctcagcagtatcccatccgcagaacgtgtatttaccggcgtcggaagaagaagcgaaatctgcaaaagccgttgtatgagttacgagggaatctccggtttcatattgctgaatataaaaatcttttctcatcgaatgcgcaatagaatccgattcaacatttatgatatacgttacttttttaaagtttgcccattgcgcgtaaagcgtaagatttctgctaagattcggagtgcttccggacttgtaagaaatgccaaagccgtttgcctgcgtattccattctttaaagcgtttaccgtctgccgaagtaaagcccaacgcttccgcatctgcaatagacgaaccggaatagaaggtttgcgttttaacagccgcacttgttgtatttgaattataagttacggtgtgagactgcgtaccggaattttgtgttgccgacgaagttccatgaaacggataaaaatcgtctttgctcaaataacccgcttcaacatggacgggaatcggatacacaaatacactgccgtcaacagctgtaaaagtaaaacttacaatatgaaaacctgcatgtaccggagcggaagtaaaagatgccgaattccagttaatttcatacgtatgtccattttcgtcggttttcttaattgaagcggtagaagagtcttttgttacgatgagatttgaatcaagcgaaacggatagtgcaaaataagacgaactgctatgtccaacatattttttaaaatcttcagctacataatcataaggatcataatgcaaatttaattgaatgctgcctgtctgcgctccgcttggatccgccgaaagcgaagtaaaattgagttttgttgtattcccgcttgcaagcgtttttccggtgagcgtttgcgtcatggtggcaccgtaattttttgcagtcagcataaaatcgtacgttcctgccgttatggggttggaatacggctttatctgcatttcgttgtaattttcccattttacaagaagcgtatcgcttgttccgagcattgccgaagaggcagaaagttttgcataaagacagatgtccgtaaaaccggaagcactgttgttggcatcagccttaggcattacggttcgcgcatttgattcagaggaatttgattcgctttcaaatccccttaatcctactgcaagagaaattgcagcatatccgtctttggcggacatatttttttcttccgtattcagggaaagatttgagcaggatgctaaaacaaaaccggctgcaaccaaaaagaatgccgcaaatctttctgaaaatcttttactattattcatcttgttctccttcttttatcagttcaccgttacattaacggtaagcactgtaccgtatgttttgccgccgaactgcgtcgttaccataaccgaatgctgcccctcactcagtgcataagctgaaagcgtcgctcccgtttcgttttctaccgcaacaccgtcgatgtaccatttaaatgtgctcgcgcccgcgagcaccgccttaaaatattttgaagaagaatcgtaattaagcttaatgtcggaatttgtcggaggggcaaccacggatatatctatggatgtttgtaatttttcccactgcgcataaagcgtaatagtttcgttattggcatttcctttccatagtaaaagatgcttcatccgcataagccgtacccgttccgtttgcttttgtattccaaccggtaaacttataatctttggcgtaatattcgtttttacgaagatttgatgcagtagcataagtaagattatcatctctcatgtaaccgtttacgtttacactcgccggagcatttctatcgtagtgaatttttgccgtccaaggagtccattttgcggtcaatgtcatatcttttgtatcgtaatgtttattgatagatgtggttttatagctatctccgtctttataccaaccgtcaaagctataaccgcttgctgttaaaacatatacgcccgaatcaatgtgaatatttgcaccgtaagaagaatccgaatacgtccatgtcagcggagccggagcagtaccgtgttccgtaacaaaggttgccgtgtacgaagccggtgaaaatttcgggcggaaagcggcatttcccgttacgacgtatgtcgtaaaatctataatactttgagaagcgtctccgtcaagataataaccgtcaaatacgtatccttctttttggagagcaggaatttgcgaggcggaaaggatttctcctttatctgcataaaccgagaccgtatcactgtaatacatattgtcgcttttgtagaatttcagttcaaaactgtcatcattattaaaacaggcgtacaaggtgattacctcaccgtcggtttttgatacattttttatctttgcgccgcttttgtattcgcctttttccctaaagcttctttcccacctagtccaaccgcgagctttatacgtcgtgcttgaatcctcatacgtcaaagtgtttgcaggaagcgtgtattcaacatcataagtacaagtcatatcgtcagggagtgctcccgaaaaagtcccgtgagcaccactattatatgaagctcttgcaaactttacagtatatgtaataagggcaaattttacggtaattttgcagtctttttcggtagtaaacacaccggagtatacctgcactccgtctgaattaaaaaaagtgcatttatagccttcttttttatagttaaaatacacattttccagaaaataatcgttgtggactttctgtgtaccaagcatctttccgtgttcatcgacaaaagtgattgtcggatcagaagagctgccattgttatcatccgatgaaccgacattcgttttacatcccgtcattgcaacaaccgtgcagaagccgagaatcaataatttagcgagcaaattcttaaattgccgttccataaaaacctcctaatgtttcaggtgaatttaaaataaaaccgccgtaatcacgcacgaagcatgaaaaagacgaatatttacgatgaaaaataattaccgcacaaaccgctgcactttcgattgaacactgttttacagcgcatataaaatcaaaatttcatcggatttctttataaaatacgccataagcacattatttacggtaatattacgcattttattactcttttagcggattgtcaattttatttacctgccgatagcataagaaaaatggatttgagagccgtatttatcaacaatttaaagagataccgcaaagaaaacaaactttcgcaaatggcactggctgaaaaatgcggaacttccgcaagttatatcggggaaattgaaataggaaagaaatttccttccgtggagatggttcaaaaattcgcagaagcattgaatataaagccgtataaattatttatggaagaaaatgatatctacattgcaaatctttcgccgcaaaaacggcaaatccttgtagaaaaattgcaaaaatccgtagaagaaataatttcgagcggcggggatttcgtttgatttgtcaaaatatttttacgaaaatcccccggaacgattatgcggaaaacttgccctttcggaataaaataaataaacgggaacaaaacttattttacaaaatcggctgatatgctataaattcgcctattcgcggacgcgaaaaagaagcctactcacatcggggtgtttttccccttccgattgcaggtgcgatttattcgtgttatggtggattcgttatgaacattcttgtatcgggacttataaacatcgagacgacggtcaaaatcccttcttttcctataaattattcgccgattgagttttcttttttcggcgtgaattcaagtgttgcgggcgtaggttacaacatcgcaaaagcgctgacggttcttggcgacaatgtgcagttattttcgtttaccggcaacgatatggaaagcgactttatattttcggaactcaataaagacggaatctccgcaaaccatatagaaagaaatctaaaggctacccctataagcgtgattttttatgacgagagcacaagacgaaagatttactgcgaccttaaagacattcaagatgttcagccggacatttctttcataaaaaaacgtatcgaaaaagcggatatcgttgcggcgtgcaatataaatttcagccgtccgattttaaaagccgctaaggaatgcggaaaaacgattgcgaccgatgttcatgttctttcaagcatagacgacgcatacaaccgcgaatttcttgaatacgccgacatcgtttttttaagcgacgaaaatcttccctgtccaagagaagatttcttgacttcgctgaaaaacgcatacggaatgaaaataatcgttttaggttgcggtgcggacggtgctatgctttacgaacgggaaaaagataaaatagttcactttccggcggcaaagcccgaacggattgtaaatactgcaggcgcaggcgatgcgcttttttcgtgctttatccatttttacgcaggcggtctttccgcagaatccgcattgcaatacgcacagcgttttgccgcaataaaaatcggcacggacggagctgcaaaaggctttgtcgatgaaactacactaaaaaacattatgaggaaagatgaagtttgggactgttgaaaaaaagtaactgacttttgaaacagctccggagagatttttttagcagacagcaggcgattgcgtctgaaaaaagatttcgatagtcgccattcgaccgctcaaaaatacaaaacttgtgatataatgaaaaagtcccacaagatgcgggactgtagtcaaatgacttcggcatttagccttattgtgatttgatttctgcaattaagataacattgcctgcgattttttgcaagcacatttttttttattaaggattttaaaaagtatgaaaacacttggactcgacataggaacaaattctatcggatggggaattgttgacgaagctgcaggcaaaatagaagactgcggagtttacattttccctgagggagtgaaaaaagaaaaaggaaacgaaagttccaaagcggcggagaggaccggttttagacttgcccggagattaaaattcagaagaaaacttagaaaatacgagacgctaaaagtcctcatcaaaaacaaaatgtgtcctctttctaccgaagaacttgaagaatggcggaaacagaaaatttatcctgtttcgcaggattttttaaactggtaccggacggacgagctaaaaaactgggagccttattttctgcggaaaaaatgtgcggaacaaaaagccgagccgtatgaaatcggacgcgcgttgtaccaccttgcccagcggcgcggatttctaagtaacagaaaagagactacaaaagcatcggaaggagaagtttcaaaaagcatagacgaactgtcttcacttttggacggaaaaactctcggtcagtatttttatgaattaaaactctccggtgaaaaagttcgtggaagatacacatcaagaaaagagcactacgaaaaagaattcaataaaatatgcgaagttcagggcttctcacaggaattgaaagacgatttctacaaggcaattttctttcagagaaaactcaagtctcaaaaatttcttgtgggaaaatgtacatttgaacggaataagccccgcgccccaatctctcattttgaatttgaagaattcagaatgctttcgttcatcaattccataaaaattgcaaaaaattcaaacgaagatgaaaactgcaattttgaatttcttacacaggaagaaaaagaacttataaagccgcttttcttcagaatttcaaaaccgacatttaagtttgaagacatcgagaaaaaattaaaaggtaaaaacgaattttggaaattcaactacagaaaggatacggcagtttccggctgccctgtttctgcgggattaaaaaatattttcggagacgaaacttccgctgaaaattggaaagacaaaaaaatcggacaatacgatatgtgcgatatctggcacgttctttttgattttgacgatgaagaaaaacttctggaatttgcaaaagaaaaactccttttggacgatgaaaaagcaaaaaaattttgtgaaatcagaattcagcatggctatgcaaatttaagtctcaaggcaatcagaaagataactccgtttttgcgcaaaggctacatatattctacggcggtttttcttgcaaacataccttacatgatcgggcgggatatatttttgcaaaacgaagaagaaatcgaaacttccgtaaaaaatatcatcggaacgctcaaagacaaaaacaatataattgttcttgcaaaccgctgcatcgaatatgtatttaaagataaaaataatgatttcaggtttgaagaatgggacaaatccgctgtggaagcctccgcacaggatttgttcggaaagaaaaagtggaatgaatatgatgaagaaaaacgtaaaaatataatctcacaagtttccgaaaaagttgaggacaatctgaaaatcgccgtaggaaaaaatccgaacgactacaaatatcagctcttacgcacggacgacttgattcgggagtatctggagcaaaaaggcttcacagtaaaaggagaactttatcacccgagcgacactgattataactttgaaacgccggttacggcagaagacggaaaaacatatcttgcctctcctcgctctcagagcgtaaaaaatcccgtagtgatgagagcattacaccaacttcggaagctcgtaaattatcttataaaaaccggaaagatagattcctcgacaaaaataaatgtggaacttgcaaacgaagtaaatgacaaaaataagcgtaaagctatcgcagaatttgcaaaagacaacgaaaaaaagaatgcagactacagaaagaaaatagaagagctttgcagcgaagcgggatttaaaatcaatccgacagaatcggacatcaaaaaattcagactctggcaagaacaaaatgaaacatgcccttacaccggaaaacacataaatttttcggatttgttcggtccggttcccaagtttgactttgagcatacagtcccaagaagcctgtcttatgatgattctcttgaaaaccttacactatgcgacagcgaattcaacaggaatataaaaaaacaacggcttccatcagaactgcctaattttgaagaaatagacagaagattccaaaaattctatgaagacaaaatagacaactgcctgagaataattgaactcaactcaaaaagcagcggctcctacgaagcacctgccataaaagatttaagaatcgtaaaaaaactcaaagcaaaatacgaacttaactattatacagaaaaattaaggcgtttttctgcaacggaaattccggaaggttttaaacacagccagcttaatgacacccgaataatcacaaaattcgccctttcgtatttaaggggagttttcggctatgttcagcctgtaaaaggttctatgacagacacatttaaaaggcaatggggtctgatggaacgaaacgaaataaaagaccgttcaaaccacactcatcacacaatagacgcattaactgtcgcatgcataaatcgaggaaaattcaatttattgtccgaagcgattaaaaacagcgccgacggcaagcatttgaaatttgcaaaaccgtgggagacatttgacaccgacgttttgagcgccgttcaatatataatccccaaatattttacgggagaaaatcctttaaggcagtcaaagaaaattctcagaaacaaagatggaaaacctgtattgaaaaacggaaaaattatctttgaacagggggagacagcacgaggctctttgcacaaagatacgttctatggctgcataaaaaccgttcccgaaaaaggcggaaaatccgaaatgatatttgtgcaaagaattccggtttccactttggacgaaaagcgtgcggaaaaaatcatggacaaaggaatcagaacaacttttgaaaataatctttcaaacggaattcaaactctctcggaaattcaaactaaaggaatcctgctgccgtttaaaaaggatggaagagatgtttttgtaaaacgggttagaataaaggctcagccgacttcgccgatcactttgaaagagcaccacaatgtgatttcgaaaaatccgaaagactacaaacaaaattattatgccgtaaacgaagaaaactatcttcttgcgatttacagaggaaaagacgaaaaaggaaaggatgtttcagatcacaaaatttgcaatttgcttgacgctgtaaaaagaagaaaaaacaaagatgaactttatcctgattttaaagaaaaaaaaggcatgaaccttcaattgtacaagatcttaaaaatcggaaaaatcgtgattctgcaaaacgatattgatgaagatgtcttctccttacctacagagaaactttggaaacggatgtacagagttgccgggcttggaaaatcaggggataacatttatatagagcttgtacatattataagttcaaatccttggaaatatatgaaaggtgaaagagatttaaatgcaggtatagaatgtcttcgttatacacagtcaaattttaaaggacttgttgaaggacaggacttttccgtttcgcctacaggagaaatcatacaaaaaacagaagtctgataaatgccgctgaatgtttattttttcgcacaaaaatattttaagactgccgacagcgttcaaaatcaaggctataaaataacggtctcggtatgccggcagtctgagaaaactctgcacgaaaaaactgaacatatcgattgtttaatccgatagttaaagtatgattaaacgaacactgtttttctcgcatgctgtttgtttaagcgtaaggcacaaacagcttgtaattttcagtaaagaaactcaagaagaaaccttaatcccaatagaggatataggttttgtgattatcgaaaatgaactcgtctcgctgacgattcctttgataaatgaacttacggacaataattgtgccgttatcttttgcaatgaaaagcaccttcccttttcaatgacaatgccgcttgattgcaatgaaattcagactcagcttttttccgctcagataaacgcaaaacttcccgtcaagaaaaaatgctggaagcagattgtggaatacaagataaaaaatcagggacttcttcttaaaaaatatgatttgaattttgcacggctcatcgatttttcaaaatgtgtaaaaagcggagacgcaacaaacatggaaagtcaggcggcaaaattttactgggataatctttttggaaaagaatggtgccggaatcgtttcggggattttccaaacaattatttaaattacggatatgcgattttgagagccgcaactgcaagagcattgatcggttcggggcttcttcccacactcggaattcaccatcacaacaagtataacgcatattgccttgcagacgatttgatggaaccctacagaccttttatcgatgatgaagttatagaatacatctcaacaaatgccgacaaaaaagaactcggattggaattcaaaacgaagattttgaaagtcctcacacgagatgtaaaaatggaaaatatgtccaggccgatgatggtcgcactctcaatgacaagtgcctcgctggcaaacgctctttcaagcgagtcggaaaaattgaaactgccggattttgtatgatatgagttttgaccggataaacgcctataagataatgtggattttctgtatgttcgatttaccgacaaacacaaaacctcagcgaaaacgagcgagcgagtttcgtaaaaaactgcttgaagacggctttgaaatgatgcagttcagcgtttacaaaagattttgcggaagcagagaagcgtgcgaagttcacgaaaatcgaataaaaaaatggcttccaagagaaggaactgtaagcattttaaaatttacggacaaacagttcggtgaaattttgacattcatcggtgaaataccccaaaagagagaaaaagcaccgcaacaactccaattattctaatcccggaacgtgaaaaagttacaaggaaaggctaggttgcaagtaaaaaaacaaagaaaagtaccggaaaagttgacttttctccatttttttacactgcaaacccgtctaattccttgcataatatggtcttagacgactcatattattttacattaaaaaaagaaatcaaaccacaaccatgagctttgtaatatgagcttgaaatccattattttacatcaaaaaaagaaatcaaaccacaaccaggcacggcgtggagtttgaccgattcggattattttacatcaaaaatagaaatcaaaccacaaccctgcaaagcaggggagccctggtcgaagcattattttacatcaaaaatagaaatcaaagcataactttaattcatttttttgttcggcggtacagcggatataaaggctttccgttttggttatttcttttttggtacctttcggtcgtcctgtctggttttctctttttccgccccatccgttatttgccatatcgcgccctcattataatcagcatgatccggcacagtgcggaaaccccaagacaaacaaccaacgctatttttagtccaatcatttgacatctccttatgttttggttagtattgaagcgaaggttgagcactaaccttcgctccgcttattctacttcttaaaaagcagaataagcgcaagaattaagcttgcgattgaagttatgtcagctacaatcgcaagcagctttctaagcttttccatagcctttcctactctgcttatttatcaatacattttagatacttaaagtaacaaaaaacttcacgaatgtgaattgttaatttattatatcatctatggtataataaaattatcttgaaggaaaggagtttttgtcaatggttacaaaaatgcaggtgcgtattctttcgcttattttcagagtggcggctcttgcgatactgatactgattttggcggtaaaatgacggaaggaaaaagcactcacgggggaaaacggaaaggcgcaggaagaccgaaagggaacgatggcactaagaaattttccgtttctgcaagaatgtcggagtatgcgattattgaaaaggctgccgcagacgagggaaaatccataagccgctatcttgtggaacttgcccttcaaaaaagccgctcaagcgtaaggctcgacgcggctcttggattcgggaattgctgaccatcttagccgaagtctcagcaatcgccggatttattcttgccctgattaaaaagtaatcaggaaaggaaagcggatagctccgctttcctttatactaataaggcaaagaggatttgtcaaatggaaataaaactaaaaggaattaaagcgtatctgtacattatcattttggtactgggcgttataaatcttatcgttcagcttgtaagacttttgaggggatagtatgactaccgaagaaattgcaaggcgggcggaatgcgctacggttacagcccgcaagtgggctaaggacaacggcgtttcttatgcaggaagcgacagggctaaaatctacatctggacggaagaggactttaatatgtttcttttgcgtgcaaagccaggaaagcggacaaaaaagaaacagagtgaatgacgggttatccgccggaagaaacaaaaatgcttccggcggattttttgttttaaatgcgggatccgcgtatcttctcgctcttgaacaaagtcaaagccctctcgctcacctttccgtcccacatcgtgcaggacggttcaaaggataatgtatttgagttcataaaaaatcttgcgattttcaaaaatatgtacaaaaaacagaagcggatgctgtcggcgctcaattacggattttcggtctcggaacttgtctggagcgaagccggaggctattggattccggattccatcataactcggaagcccgaacgcttttccttcggctcggactggaagctctacctgcatcagaatgcgggacgcatcgagctgaaccatgagtacaagtggctcatctaccagcacgatcccgacgacgaaaatccgtacggcacgagccttttgcggagcgtctactgggcatggatgttcaagcaggcgggctacgatttttggcttcaggcgaccgaaaaatattcggtgaagtcgattgctgcattgttcaaggcggacggtgcagaagaggagatcaacaagcgggcattcgacatcgctcaaatgcttttgggaatcgaatcaggctccgccgccgcggtcggaaatgtggaaaaacttgagcagatcggcatggacgggcatctttcagacttcaaggagctggtcgaatgttgcgacacgcagataagctacgggcttacaggacaggcgattgcgacatctacggtaaacggcggaagccttgcgctcggcgaggtgcaggctgaccttctgttcgaggattgcaagggcatcgcccttgagcttcaaggcgtgattcagaaaatcatcgactggacagtcgcactgaacttcggcgaggcggaaaaaccgccgcttttccagttcgacatcgagcggaaggcgagctttgagcaaatcatgcaggcggttgaccgaaagattcccgtaagccgctcggaactctactcttcctacggacttcctgaaccgaaggacgatgacgacgcttttataaaggaagattccgcgatgcttttaagcgacggggtgcgcaattcgggcgtaaaaaaaaacttttcattcatttaagtgattccgacgcaattcggaaagaaagggcgaacgcaaaggagcttgactcgctttgcgatgctgcaaaaaagggcgttcagccgttcgttgaaaaggcagcgaatgcctatttaaatgccgtaaaaacgcctgacgacttgcagtccgacgctttgccgtctcttccgccggacagggattttattaaatctgtagagacgcttgtctcaagcgcatttatgctggggcttttccatgcggcggaggagcaggacgagactcgcggcagaatcaacgcaggcgactatgacattccgcccattccatttgccgaagcggtcggctttttgaaatcaaaagtccccatgacaaagaccgaatggctttcgctcgaaaaaaagatgcgtttccgggcgttcacgatggcgaaactcggagaggtcaaggtcatcgagacggtaaaaaatcagctggtgaaggctatggagagcggcgagggctttgcgggttcttttgacaccataaaggcgattgcaaaagcgagcgatgcgacgctcactccgttctattgggagacggtgttccgcacgaacgtgcagagcgcatacgtcgcaggcaagttgctgcagtatcaaaagttcccgcctgcggcataccggcttcttgtcatcgaggacgtacgcacaagcgacatctgcaggcatcttctgacgcaatcaggctacggcgtggtcatgccggtagaccatccgttctggaaaaaatacggttttccgccctaccacatgaactgccgcacgggaatcagcgcagtgtatgactcgcaggtaggcagacatggcaacaacgtcgaaaaccgcagcatgaagtccttcagtaagttcaaggtgcaggacgggttcggcggaaatccgattgagaatggttctttttggcttatgagtgatgatatgaaaaaacgggcaaaagaattcggacttgtaccggatattgtaaaggtagcgcattctttaggattgaataactttgattttgaaaaggcaggaaacttcgggaaacccatgcaattgcaagggagtaaatacaaagtcaaagttattgacggtgcaaaaccgttgcaaaaagaaatattaacatcacgcattcttgaagaaaacgggcattcggttgtcatgctgcctgaatgcggtgggcagcatatcagtaatccggatgcgcttatagattacgattttgttgctgactacaaagtcccggatggagatagttttaatgctgttcgaggagccattcatgatgctgactcgcaattggtgacacacatgattttttatccgcgcactcacaactatacaaaaactcaggctttgagagaaataaattatcgcttaaagactacaaaacgattaaaagaagtgtggctgctttgggatggtgaagaaatcataataaaaaaatgacctcagcatgcggtcgcgtacgttacatacttgatagttccacatctggaggtctcttttaatataacactttttacaaaaaatgcaagtttttttgcgcaaaataaactgcaaatctttgaaaatccgccgtgcctcaattagtttttcaaaaatcaatccgccgtaaaatgtgcgtaatgattatcacgaaagaagagttttacgatagcaacctatggcgtttgtttccggttttggaaatcccttgtttcaaggacattccgtccgattatttgggcgcaatgggcgttcccataagcacactgagcaaattggactacagggatgaagattcgcaatttgaattattggattacatccgcccgtccgtaaacggagtaaaaaaatatatccgacttttagtccgcctccgccgcccaccattgccggatagcttcagtttggactaccttcaggatttgttggacaaatccgggtcgaaatacgaaatcaccggatttgaattattttttgcgccaaaagtgaaaccgtagcaaggcgaattgttccatgcaggaagtgtggctgctttgggatggggaagaaatcataataaaaaaatgacctaagtatgcggtcgcgcctaaagcaggcttgatagttccgcatctgtaggtcgcttttaatataccattttctataaaaaacacaaattattttgcaaaaaaacatcttctttttgcgcaaaataaacataaaaaacaaatccaagaaggagaaaaagatggattattttgaagaatcgggcagaaagctcaagaaaaccgggattgcaagcatctgtattgcgcttgcattgattgtaatgatcaacacatgctcaatcgtccaacagcgggaacggggcgtgaagtatgtcttgggaaaggtcgtgggagatgtcatccagccgggacttaccttccatgcgccttttgtgtcgaagataaaaaagtattcgattgcgccgaaaacttacgacgctgctttctcggtggataacggcggagcgataacgagagatatgcagaccgtcggaacgagcgtaaccgtcaaatacgcctacgacgaaaacaggattatggatattgcgacccggtacggggattccgtagtcgaatctgcgatgaaaagcaatatcatcgccagcgtcaaagagattgtcggtcaatattcgatttatgaactggttgaaaaacagccggaagttactggtaaagtcgcaaaatcaattcttgagcggatgcatgattatccgataacgataagccagaccacgataaccaactgggactggtcggatgattttgatagacaaataaaagagaccgccaatcgcacacagcaggtaaagcaggcggaacaggaagcgaacatcgccgccgctaacgctcaaaaacttgtccgagaagcggaagcgaagaaacaagcgatgcagttggatgcggaggctcagttgataaaggctgaaaacgaggcgaaagcaaagaaagccgaagctgacggaatcgcttactacaatgcaaaagttgctcaaaatatggcggtgcaacagcaacagtggaagcatgaggagcagatggcatattacgaaaaatgggacgggacgcttgttccgcaatatgtgccgcttacggcagcaggcggaatcgtaaatattcctactccgtcgcaggctacaagataacgtgatgaaaatatgagctgtcgaggttttctcggcagctcatgtgcgaactgtataaaggatttaggggtaaaaaatggaatttgacaagtcaaaagtatataccgcagttaatgcggaagagttacaagtaggaagcaaagtctatcttgctgatactattgaaattttacagaagctggtagtaaataaggcggagccgaccatccttaaaaatgtatatgatggatgccggatgcaacgcttcagcaatgacattgatgattatatcctcgcctatctcatttctccgcctaaagagccgcaatacaagccgtttcccgataccgcaacggcattaaaaatcatttccgcacacggcgggtgggtgaaagataaggatggtgtactaaatattatcaccggcatatccaagggggacggtgtggtattggaaataagcgcttattgggaagcgagtgaagatgccttagaaaatttcgttttcgccgatgacggctcgcccgtaggcgtaaaagtagacgacggcacggacgacgcataaggggtggtcaaatgacaaaattggaaaaccaaatactaaaagaaataaaaatcaacagatgga

SEQ ID NO: 3534 - DNA, 17254 bp, synthetic construct
  misc_feature 1..17254: note = Synthetic
  source 1..17254: mol_type = other DNA
tcgggcaaaatctagggagattctgatgaaaaaagatacacatccagagtacaatcttacaaaaattacttgtgtatgtggtaatgtaattgaaacacgttcaacagtaaaaaatattaatgttgaaatttgttctgcttgtcacccattctacacaggaaaacagaaacttgttgatacagcaggtcgtattgatcgcttcaacaaacgctatggaattaaagcagataactaataagtttgctaaaaaaaagagttgcatttgcaactcttttttttatgctttattgtaaaaatgtaattatttttattagttttctatttcttttccgtcactaaaagcatttcctactttttcaccaaagcttatataatcatgattcattgcatcgtaaataattggcttgaattttgataaatcaattttatcgtttgtgagaattgtatcatctattaatgtgtttacaacttctgcaataacttgttcagttgattcatcataacttattaatttgcattccattgttaatggatattcgtttatgattggcgcatctacattttggcttttggaatatgttaggcctgcttttgtaactttatctgtaattttgtttcctgtggtaattccaaaaaaatctgattcttttaggtgatttacatcagcaacgctaacagtgaatgcattgtgttcctttatgttttttactgttttatgatttttatctaatataatagaaatttttgtgtaatcacaaactgcgccccaagctgcgttcattgcgtttgcagttccatcttcattatatgaagcaataattaaaactggttgtggataaattaatggtttgtttccaaagtcttttttcatattttattcctgattgtgttttatttagtttaatttatataaaatttactatataatatttttcgtttcaatatgaaagttatgtttgaaagaagaattgattcaattttagttcagcaaggtttttgttctaagcgaagtgtaaaaaattttgtaaaaaataataatattttgataaatgatgttccttgtgaaaattctaaacaattggttgatttagaaaaagatgtgatatgcgttaattccgtggttttgccaaaaattgaatatacttatgttttgatgaataaacctttgggatatgtttgttccacggtttcggatagaagcaaagttgtttatgatttgttgcctttggaatttcagaagttgaatttacattgtgtgggacgattggataaagatacagaaggacttttgctttttacaaacgacggaaatttttctgattatcttatgcgaagtgaaaatcatatttttaaaacttattatgtggaattagaaaactctgtaagcgttgatgaacagcaacaatatgttgttcagtttgggaatgggatttttcttgaaggcgaaaaaaaagcagaaagttttgtgacattacctgctactttggaatggatttctgataaaagttgtaatatcacaatttgtgaaggaaaattccaccaagtgcgccgaatgttttttgcaatgaaaaatgaagtgacttttttgaagagaattgcaattggaaaattgtttttgggttcttgtgttcagttgggaaattgcgtgaaattaacaaaagaagatattatgaatttactgtaatagattttttgcttgttctagtaacaaaaaattatataagtcaaaatgtgtgttacaatagtatcatggcaaacaaaaataatagagatgaaaaaattagaaatcagcgtttatttcagcttgtggaatttattcgtaatgggaattatccaaatgttcctatgatgaaaaaggaatatgaagtttcccgtagtacaataatgcgtgatttggaatttttaaaaagtagatataatgctccaattgaatattctgtggaacataaaggttattatttttctgatccaacttttatgataaaaactcttttgttgacagaaggggagctttttgcagttcatacgattcttccgttgatggaacagtataaaaatacaccgcttgaaactacatttaaatcgataatttcaaaaatgatggaaatgcttccgaataaagttcaaattgattcattgatgaacagaaataatattcattttattaaagatccgcttccgcaaattgatgaaaaagtttttaattccatttttttagctattgataaagaatgttctgtggaatttgcatatcgttcaataaaaaagaaggaatattcaattagaaaatttgatccttatgtggttctttgtcaaaaagggaattggtatgttcttgggtattgtcatttgcataatcgatttaatgtttacagtcttgcacgaatgaaagaaataaacataactgatgaatcgttttgcgtaaaagaggaatttgatataaataatcatattgatcctgattttggaatttggagcaatgaatcagttccgatgaagattgaattattgtttacttcagatgtgaatacttatattttggaacgcacttggcatgtgaatcaagaatgtcatcaaaatgaagacggaagtgtttatttaagttttatgtcgaatcagttgcaagaaacttttcattgggttttaacttttggatgtcatgttactgtgctaaatcctcctgaattaaaaaatctagttcaggaagaaataaagaaaatgtgtgaagtttataaataatttttttttaagtaaaagaaattacaaaagtttaattttagatagagtataatagaagaaagtttatgaaatataaccatgttgtgcctgcaacatttttatctcgtccaaatcgttttattgcaaaagtatgtctttgtgatggtcgggaagaaactgttcatgtaaaaaatactgggcgatgcaaagaattgttaattccaggatgtaatgtttatcttgaaaaatcagaaaatcctaatcgtaaaactttgtatgatttgattgctgtggaaaaacgctatgatgaaatttttgattggggaatttttccttttgcttttcggaagcgaatgaatgatggaaaggaaaaaactcttttatttaatatcgatagccaggctccaaataaagttgttcttgaatggctaaaaaaacaagattattctgtaataaaacctgagttcacttttggaaaatccagatttgatttttatttggaaaaaattgattctgttacgggaaaaacagaaaaaattcttatggatgtaaaaggctgtactttggaaattgatggcgttggatattttcctgatgctccaacggaacgaggcgtaaaacatttgaatgaactttccgacgcaattggtgaaggttataaatctgttttggcttttgtgattcagatggaaggtgtgacagaagtttttccaaatgtaaaaactcatcctgaatttgcagatgctttggaaaatgcaaaagcttctggtgtggaagtgtggtttttgcagtgtggtgtaacagaagatactttggaaattgtggatgtaaaaaatcattaaaattaaacaggaggaacattatgggaaagttaataatcactcaaggtgatattacagctttttgcggagatgctattgtgaatgcggcaaattctagtttgcttggtggtggcggcgtagacggtgcaattcatagagcggcgggaagggaactttttgctgaatgtgcaactcttggtggctgtgaaactggagatgctaaaattactaagggctataatcttaaagcaaaatatgtgattcatacagttgggccaattttttcggaaaataaggcagatgaatgtaaatcacagttggaaagttgttataaaaaatctttggaacttgcacaacaaaataattgtaagtctgtggctttccctttgattagtgctggagtttatggatatcctaaaaaacaagcactacaagttgctgttgatatgattcagatgtatggcaaaaatttggatgttgaaattgttctttttgataaggaagcttggggaattgcacaagaaaatttttgggatttattgaaataaaaaaaaacgatatattggaaataaatataacaaaaatctgttaaaggaagatattatgcaaattgatgtaaatgaattattcaaagaattcggaaatattcctcaagtggaagctattgctcttggtgggtctagagcgactggtcgaaatgatgaaaaatctgattatgatgtgtacatttatatttcagaattaattgatgaaaatattagaaaagagattttgaataaatattgtaagtatatggaaattggaaattcattttgggaattagaagatgatgttacattaaatgatggaatcgatatggatatcatttacagaaatatgaatgaatttgggaatacagtaaaatctgttgtggaagattgtaattcctggaatggatatacaacttgtttgtggcataatttgataacttcaaaaattataattgacaaaaatggaaaactttcggaattgcaaagtagatttgatgttccgtatccaaaaaaattaaaggaaaatattgtttctaataatttaaaacttttgaatggaatgttgccttcttttgatatgcaaataaaaaaggctcaaaagcgtggtgattttgttagtgtaaatcacagggtaactgaatttcttgcaagttattttgatgtaatttttgcattgaacgaaatgactcatcctggtgaaaagcgtatgcaaagtatttgttctgctgaatgtaaaattttgccaaataattttgatgtaaatctgaataaactttttgccaatatgtttggtggcgatgcttcatctgttattgatgaaattgttcaagaaattcaaaagttgtgtatttctgaattgcaaaagtaaataagttattttgtttgtgtgtggggatattttctttttggaaatatccctttttttttacagatgtagcgtttattgcgacagtagatgtggtataatggaaaggatgccacacggattggaaaatgctatgcattttcttttgcggggattaattttttgtaaatgtggatattataatatatgtgatggaaggaaataaaaatgattataaaatattaatgtataatcttttttgagagtaattaatatttgaattttgattgagaagttttatatattttttttataaattaattatgggctcgtgagcctgtgaaaatatgtagcgaagcggaatattttcacaataaaccacctgctattgacgggtggttatgattgtgtaaaattttttatcttatgcaactcaaaatctttttggcggcgccttgggggccagagcagtttttgaagctgtctgatatgatttttgcgttttgtgaatatgttgaattattcaaaacttgtgttacggtgtcaaaaattgtttttggattttcgttttttaagaaaattcctgcgccaacttggtttacgcgatttgcaacacctttttgttctgttgtttgtggaatcataactaaaggaactttgtaaaataaactttcatttacgctattcattccgcagtgagaaacaaacacatccgtttttgataacactgcaatttggtcaacagtttgttccatttgaatattttgtggaaactgtgattttgattttttttcataattttgaataaaatcttctatattaatggcttttcctgtggaaataattacttgaaaatcttctttattttggaacgccttaataaaattcataaaaaacttttcctgtttattaattacagttcccatggaaacataaatcaaatatttgcgattttttgtaatttcagagtttgcaggaataattgaaggcccaacaaattcatatttatcagaaaaagttttgctttctggctggaactctggggaagtgtaaacgatagtgtttgtgttttcatcattttgaataatgtctaaaacattgtttacaggatagcctttgttttgcaaacgaattatttctttttgaatttttcccattgaaataatcatttttaccacttgcccaaaactttgtttcataatttttgcagaatgctgattaaaggcaaaagttgttgtacttgatacaaaaggaattcccaatttgagcgcaataaattttccccaaattgccatggaatctgcaactatgcaatcaggttgaatttgtttcatttcggtgcaaactttttcatctaaagcaagagttgtatccacaagaatttttgtggaaaaagctaaatcacttcctaatctgctagtgtcttcctttgataatttttgttccatatcgtaatcatcgcaggaaataaattttgctccagtattttcaattttttcttttagtaaattgtaggaataataaattacttggtgaccttgtgaaattaattcttttacaacttgtaatgtaggatttgtgtgtccaaatgctggaatacaaaagaaaacaatttttgccatattttgtccctattttttttgatgttttgcaatgaaatgaaaaacaacatttatttcattgaattaaaaattgaagaaatatattcttgcatcatttcttttggaggaattgcaattcctctgtctttgtctgccataactagtaatgtatcacctggtttaattccaaacatatcacgggcttcttttggaattacaaattgtcctttttcgccaacttttatagaccatgcgtttctttgttctgtcatgatttcttcctttggtatgaaaagtatgactaatcatactagtaggaaataattttgtcaatgttttatgttagcaaaactgaaaaatcaaaaattaaaattcaaaatgaaattcggtaatggaattatattcttgatttggttttaaaatcgtacttggaaattctggtctgtttggtgaatctgggaaattttgtgtttcaaaacaaattccgcaaaaaggagtgtaaattgctccgttttttcccaaagtgaattttacataaccagaagtatacaattgcattccttctgcatttgaaaagactgtcatttttttatttgcttgggaatctgttaattgtgcaacttttacaaggggagtgtcttttgttggaattgcagtttctggattatacgcagcagttacatagcaagtgtcgtatccatattccaatttatcagtgtgagttccgatttttttaggctgcaaaaaatcatattcagtattttttacatcaattaattttcctgtgggaatattgtctttgtcagtttgaataattttttcacagaaaagttgaagttcattttctttaacatttccgtcaccgtttaaattaaaataggaatgatttgtaatgctaattggtgtttctttatcagaaattgctttatatgaaaaagtaagtttgttatcgttggaaattaaatattcaatagtgacttttaagtttccaggaaatccctgaaatccgtcagaaaaagttttttcaaagcgaagaccaattttgcttttttggcgaataatttttccattccaaattaaattttcccaacgaggaacgccaccgtgaagacaagagccttgaatattttcagaaagtttgtattcagttccgtttagagtaaattttgcattactaattttatttgaatatcttcctatgattgctccaaaacttccccagttttttgagtaggaatcaagagtttcaaaacctaaaacaatatcagtttctttgttgttagaatcttttaaaattaagcttgtaattgtagctccgtaatttgtagcttttaatgtgatgttttttgtagaaacagtaaataaagttgctttttgccctgaataaatagttccgaaatattgcttttttgtcttcatatttaaactataaaaagtcatagataaagtgtcaactttgtagaaaaagaattattcaaaattgtgcaattatcttctattataatgcttgtttttgtaaatatatttggaaaaattgactgaaagaatttttaatttattttcaaaagttgcagaattaaattttcaaaagtataattggaatatgttcaataggaaaaagcaaaaagaagaaattgaaatttcaaaattaatatcacatctaaaaaatgcggaacaaaaatatgaagatttattaaaatatgtagaatctgtggaaaaaagatttgattcactaaaagaaatattttttttagatttgaataattatgtaaataataattttgaagaagttccaaaggtaaataacaaaattacaacgctagaaaatttagttggcgattctaatatattatttcagattgattcaagtgaaagtcaaaagaatcaagttcctgctgaaattgaagttgttctaaaaaatatggaattgtctttttctgataaattaatggaaataatcagaactaaaaatttgaatgaagttgaagtttacaaaaaagcagatatagatagaagacttttttcaaaaataagaagcaattctaattatcgtccaacaaaagatacaataattttattatgcctttctatgaaattaaattttgaagaagtttcagatttatttttgcgggcaggattttcattttcaaaaagtgataaacgagacttaattgccgaatattttttcaaaaaagaattgtacgatatttttttatataaagacattttgttcaaatacggttttataaaagaataaatgtctctttcaaagcgaccttttttgcttgttttgggattaatattaaaaaagctaacaaacaggtggcgcttatgaaaaaacaggaacttgatgttaatttaattaattctaatataatcgctgacgaaaattattctttttctgacatactaaaaagtgttaatctgtttggtcaattgcaacctattattgttaaaaaagacaaaagaaaaacttatacgctaattgatggaagtaaaagacttatatcattaaaaatgtgcggttatactacagtaaaagcaattatcttaaattccaatgaacaaaaggaactaaaaaatagtgatttttgtttgaaggaactttatccactagatgaagcaaaattcatttatgattcaattaaaaaattaggaataagcaaaacttcaaaattacttggcgtttcaaaatcatactgcgtcaggcgatgtgaattattaaagttaataaatgaatttaaagaattattatctaacggaaaaatgaaatttttagatgcacttgatttgtgtcgacttccagaagctgttcaaaaaacaatatttgaaaaatggaatcatgctcatttggatgtaaacatgacctgtcgcagattttctgaaaatttattggaagcaaaattttatgcaaaggaatgtcataattgtgtttacaatacttcttcaaatcaattgttatttggcgattatagaaaatttacatgcgtaaatcccgattgttataaaaaaaagcaaataaaattttcccaaaccaaagttcgcaatttttctccttattatttatttcttaatttatacaaattatttatttccgtagaaggaaaaatactactattcaaaatgcagaagttatcatcaaagtaacgaattcccaaagtttcaaattagaattaaaaaactcaaaaaaaattacatggtgtgtcgttaaatgcgacactaggtgtagtataatttaattaatcgttgggagatgatatagatatgccttctgtgttccgtttgggatgcaggaggtgcggtgggggaatattgttttttgttgttgaaaaaaagaaatggatgtaaaataaaaaaaaaaagccccacggagtacgcgaggcagtagtcaaattaaacttcggcacaatggccttattgtgatttgatttctaaaagaactataccataacttaattaatataacaagtataaaaggagaagttagtgaaaaaattaggattagatttaggaacaaattctattggttggggaattattgatacaaataatacagaaaaaccaatacaaaagtgtggtgtatatatattccctgaaggagtaaataaagatagttatggaaacgatagttcaaaagcagcagaaagaacaggatatcgttctgcaagaagattaaaatttagaagaaagctaagaaaatatgaaactttaaaagttttaatagaatacgaaatgtgtccattaactatagaagagttagaaaaatggcgaaaagaaaaaatatatccaacttcacaggaatttataaattggtatagaacagatgaacttaataattgggaaccatattttttaagaaagaaatgtgtagaagatatagcagaaaaatatgaaattggtagagcattatatcatattgctcaaagacgaggatttttaagtaatcgaaaagaatccacaaaaggcaatgaagatggagctgttcaaggtggaattaatgaaataacagaccaaaaaggggataagaccctaggtcaatatttttatgaactaaaacagaacggggaaaaagttagagcaagatatacatcaagaaagcaacattatgaagaagaatttaataaaatttgtgcagtacaaaatatatcagcagacctaaaagaaaaattatataatgcaattttctttcaaagaaagttaaaatcacaaaaattccttgttggaaaatgtacatttgaaagaaacaaacctcgttgtccaatttcacattttgaatttgaagaatttagaatgttacagtttattaacagcataagagtaaaacgaaatgaagacgagaccgatgaccaaaaatttatagaattgtttgattatgagagaaatgaattaaaagaattattttttagaaaatcaaaatctacatttacatttaaagatataaaatcaaaactttgtggtaaaaaacatgaagattgggaatttaattatatagatgaagcaaatattgctggatgtcctgtaagtacaagtctaaaagaaatattcggtgaaaattggaaagatgtaaaaattggaaattatgatataaatgatatttggcatgttttgtatgattttgacgatgatgataaactaaaagaatttgcaaaagaaaaattacacttatcagaggatgatgctaaaaagttttgtaaaattacattacaacaggggtattctaatttaagtctaaaagcaattagaaaaatattaccatttttaagagaaggactattatattcttatgctgcgtttttagccaatgttccaaaaatgattggagaagaagtttttgcagaaaataaaaaaacaataattgataatgtaaaaaatatttcatcatcaataggcataataaatcttccattgaggttagcaaatgattgtcttgataaaatttcaaaagatgagaatttcgattttagaacagaagattggaataaagagtttatagatatttgtataaaagaatcttacggtcaaaaaaaatggggaaaagatttttctcaaccagaacaagagaaaatcaaatcagaaattgaaaataatgttaatgaagcattgaaaataatgcctacgggaactcatctttctataaataactttaagtatccgatgaaacatattgatgagcttatcgaagaatatttaagagagaattttgaaattaaaaagaatattgatttatatcatccatcatatactgattcaaaatatgatataaagccagctgaaattattaacggaaaaaaatatttgaatacacctaagacatcaagtatcaaaaatcctgtagtaatgagagctctacatcaattacgaaaattgattaattatctattaaaaacaggcgaaattgatgagaatacacatattcatattgaattagcaaaagaagttaatgataagaactggcgaaaagcaattgctgactttcaaaaggataatgaaactaagaataaagaatataaagaaaaaattgaagaaatggcaaaagaagctggattttcaattgttgtcacagaaaaagaaataaaaaaatatcgattatggaaagaacaaaaggaagaatgcccttatacaggaaaaacaattcgttttacagcactttttggagacaatccacaatttgattttgaacacacaataccgagaagtttatcttatgacgattctttagaaaacttaactctttgtgatgttgatttcaataggaatgttaaaaagcaacaaataccacatcaacttgcaaattacaaagaaattgctcaaagatttgaaagatattatgaagaaaaaattgatgattgtttaacaagaattgaaaagtctagaactcacggacggtatatagatcctagtataaaagatgcaatgattgttaagcgacataaagcagaactagaattaagatattatactggaaaattaaagcgttttaattcagaagatgtaacaaagggatttaaacatagccaattaaacgatacaagaacaattacaaagtttgcaaaagactacctaaaaacagtttttgattatgttatgccaataaacggaacaattacaaacacctttaaacatcaatgggaattacttgaaaaagacgagaaaaaagatagaagtacaaatcttcatcacgcagtagacgcattagttgtagcttctgttgacaaatggaagtatgatttattgtgtaaatgcattcatgaaagttcagacggaagaacaataaacttaccaaaaccttgggaaaattttagagaagatgttgttaatgctacagatcaaatcattcctaaaattgtttctagcgataatgctttaaaacaaacaaaaaaaattataagagatagatatggaaaaccaaaactaaataaaaatggtcaaatccaatatgtacaaggagatacagcaagaggaagtttgcataaagatactttctatggttgtattatgactccacctgaaaaagataaaccaagtgaaaaaatctatgttcaaacaatttcttgtgacaaattagacaaatctaaggccgaaaaaattattgataagggaataaaaagaaccttttttgataatcttgataaaaaaatacaaactttgccggatatacaacgagatggaattaaattaccatatcaaataaacaacagagatgtgtatgcaaaaaaagttagaattgcagcacatatttctaatccaattgaattaaaaaagcagaaagatgtttctaaaaaagaatacaaacaaagttattatgtacagaatgaagaaaactatattttggctgtgtatagaggagttaattcaaaaggtaaacaagaaagttcatttagagttctaaatcttttagatgcaacgaaatcaaggcaaaataaagaaattttatacccaaaatatgatgaatcaaaaggaataaagttaaatctatataagacttttaaggttgggcaaattgttattttaaaagaaacagacgatgaagatgtatttgctttgcctatagaaaaattaagaaataggatttattctgtaataggaatggcaaacacctccggttctttttatttaaaattaactcatgtgacaatatctaaaccatggaaatatataacaaatacacactttgaaaatatttctgaatttagatattatagtatttctcaaatttgttgtttaatagaaaatacggattttaagatttcaccaacaggagaaatcttaaaactgtaaagaaagaaaatcatactgttgaaaaatgactttcttgtcgaaaataacagtatgattaaacgaacactttttcttgcaaatgctgtttgtttaacaactaggaacaaacagcttgttataaaaaacaaagaatctcaagatgaaaagacagttcctatagaagatataggatttgttattattgaaaatcagcaaatttatgtttctatcccgtctatcacagaattaactaaaaataatgtaagtgttattttttgtgacgaaaaacacatgcctctttcaatgaatcttcctttagaatgtaatagcatacaaaatcaactttttacagcacaaattgaagcgtctttacctacaaagaaaaattgttggaaacaagtgattgaacaaaaaatatataatcaggctttagttttagaaaagtatggacataattctagatatcttgaaaaaatatcaaaagaggtgaaaagtgatgattctacaaatcgagaaggtgttgctgccaagatttattggaagtctttatttggacaagattggaatagagataggtttggagattatccgaataattatttaaattatggttatgcaattttaagagctgcaatggcaagagctatcgtaggatctggtttattaccaactttaggaatacatcatcataataaatatgatgcttatgctttagcagatgatttaatggaaccttatcgtccatttattgatgatgaagtaatagaatatataaatgaaaatcctgatactggaaaaataacaatgatttttaagaataaaattatgcaagttttaacaagagatgtttctattggctgtgttacgcgtcctttaatgatagcgttgacaatgacatctgcatcactagttcgtgttttcacaggagagcaaaagaatttggttttaccagggttcatttaatatgagtttttcaagatttaatgcttataaagttatgtggttattttgtttatttgatttaccaacaaatacaaaatctcagcgaaagcgtgcatctgattttagaaagtatttaattgaagatggatttgatatgatgcaatttagcgtttataaacgtcactgtggaagtgttgaatcttgtaatgttcatataaaacgaataaaacaaaatttacctaaagaaggaactgtgagtattttgaagtttacggataaacaatttggagatatagaaacatttataggattatctaataagaaaaaagagaaagtgcctcaacagctagaattcttttaaaaaaatgggataattcactaaaaattttactgaattaccccattttttttgatgtaaagtgatttaaatgtttacataatatggttttacacaactcacattattttacatcaaaattagaaatcaaaccacaacgggtctggtgcttggctttactgttttttaattattttacatcaaaattagaaatcaaaccacaacaaaaaatcgtcctggagcttcgacaattttattattttacatcaaaattagaaatcaaaccacaacggacttactcgaaaagctcgacaacttcgaattattttacatcaaaattagaaatcaaaccacaactgtctacacagacatttgtttatcgacataattattttacatcaaaattagaaatcaaaccacaacgcttcttctaagctcaatttagaatcaaatattattttacatcaaaattagaaatcaaaccacaacttgtggacagtgtatgtcatgcagaattagattattttacatcaaaattagaaatcaaaccacaacacaagtggattttctaaaaatctctggctcattattttacatcaaaattagaaatcaaaccacaaccatttgccacatttcttttaagttgttctgattattttacatcaaaattagaaatcaaaccacaacttaataggaggaaatatgactcaaacaaaaattattttacatcaaaattagaaatcaaaccacaacacaaatgaccctgaattgatatattcaaaaattattttacatcaaaattagaaatcaaaccacaacataagttcttgattggaagccttttccagtattattttacatcaaaattagaaatcaaaccacaacttactgataagaattctgttctaacaaaatattattttacatcaaaattagaaatcaaaccacaacatgactgtatcaacaatatttctgaaccatattattttacatcaaaattagaaatcaaaccacaaccacattacataaactccttgaaagcatttcattattttacatcaaaattagaaatcaaaccacaacggattgtgatttttctactggggaatcaatattattttacatcaaaattagaaatcaaaccacaacagttgacatcctttcctccttgtttaaggattattttacatcaaaattagaaatcaaaccacaaccaagttcttcaagcgtgcatttcaaattgtattattttacatcaaaattagaaatcaaaccacaacaatttctaaactcatgcttttgttattttcattattttacatcaaaattagaaatcaaaccacaactaaaacatataagttctaacattgataaaaattattttacatcaaaattagaaatcaaaccacaactgcttaaatatgtataattattttttactaattattttacatcaaaattagaaatcaaaccacaactagaagttttaatctttcttgcataataagattattttacatcaaaattagaaatcaaaccacaaccgtcttcagtaataaaagtatctccaggttattattttacatcaaaattagaaatcaaaccacaacttgcccatttataaccttcttgtatatataattattttacatcaaaattagaaatcaaaccacaacaagctcgttggagtaaatctttgttaacttattattttacatcaaaattagaaatcaaaccacaacaaattgcctgaaaaggacgaacccatcgttattattttacatcaaaattagaaatcaaaccacaacttgtaacctgctcgcaataaactactaaacattattttacatcaaaattagaaatcaaaccacaacgaagcctcgcatacaatttctgtacaagatattattttacatcaaaattagaaatcaaaccacaacagtgtttattttttcaagtgccttttcaatattattttacatcaaaattagaaatatattcctcatttttttataactttttcaaaaaaaaatcttcaatttttgccgaaaaataatctttttgcgaatatgttatatagaacgtatttgtaaaatagaatgaaaatgtaatgaatgttatatttttggttttgcgttgcaaaaaattctattagctatatttgcaggttagtagcagttgcatgacttgtagatatttaaaaa

SEQ ID NO: 3535 - DNA, 16479 bp, synthetic construct
  source 1..16479: mol_type = other DNA
  misc_feature 1..16479: note = Synthetic
gacagtatgggcgctatgttctgggatacgcagccgtatatgccgccctctactacaaggattcccctgttcaagttgcaaaaaaaatacttgaataatcctctgttttttactatcttttaatcaatcacagacagaattaatttaggagtcctccatggcagatcaatctcttgaagaaaaagtaaaggaaacattggaagcttttcgtcctcagcttaatgcggacgggggcgatttggaatatataaacattgatgaagaaaacaaagttcatatccgccttacgggagcctgcggaaattgccccatggccgtaatgacgctaaagatggggattgaacgctacctgaaggaaactgttccagaagttgctgaggttgtgcaggaattgtaatatggtcattcaaaaagataaagttgtcagtattcattatgtgttaaaggacaaggacggttccctgattgactcaaccgaaggaatggagcctctcgaatatattcagggcaatggattccttttgccaaagatagaaagcgagcttgaaggaaaaagttccggcgataaagtttccgtctttgtcgagccaaaggatggctatggagaatgggatgcttcccttgtaatggacattccccgctcaaattttgcaactgatgcagaaataaaagagggtatgcagttccacgcaggagacttggcaggctccaggattgttaccgtaaaaaaggtcggaccggattctgttaccgtagacgcaaaccatcaactggctggaaagaaccttcagtttgagatagaagtcgtttccgtccgtgatgcaagtgaagaagagcttgcttcagctttgtctggcggttgcggcggaggatgcggtggttgtggaggctcttgcggtgatggcggttgtggtgatggttgcggcaacggtggctgcggttcttgtggctgcggatgcaattagcggcagggctagtcttggattatgcccttgccttttagcatagagataatctggtttgtattgacgcttttggttgcgtttttcatgctaacggaaaaatctgctatgcccttgtacattcgcactcgctcttcaaagaattcatgaaagatagaccgcacttcggaaagggagtgcggatttttttttgctatgtaagctggcatgttgctaagactgccgtcttcttccgtctttacttccgaaaggattctttttgcagcaatagcttcccttgaatttaggaatacaaatgtgctgactttatgaagctcaaagagcgcgtccgaattgttgcatattccgccgccggttgcgatgacagctggtgtctgtgattctgtaattcttttcgccaccagctgacaggcatttttttctgcggccttgaaaccttcttccccagcctctgtataaatttggcgaggtgtctttcctgtctgttccgtaatgacatcatccgtatcgaagaaaactgttccgaatttttttgcaaggatttttccctgtgtggactttccgcagtgctttattcccataagtgcgattgttttttttagcatctgattcattccttgttttactgctgcttaaaaagcaagaagattgccgggattttttgtatgcgctcggcatcaaagtttttccacgcctcaacggtctgtgtctggatgaattcatcctgacaggtaatgccgcatgcaatgcaaagcatggtgttttttttgcagacgcggataatcgtttcaagcatttttgcattgcggtagggggcttctataaagagctgggtctgatcttcgttccatgcgcggctttccagctgccttagcttttttgcacgctcgtcattttttacaggaaggtagccgttaaaggcaaagctctgtccgttgaatccgcttgccattacggaaagaattatggaagaggggcctgttagcggaacaaccttaaggtgctttttgtgtgccattgcaacaacagctgctcccgggtctgccactgccggacatccagcttcggaaataacgcccatcggctgcttgtgtttttgcaggggttccagatagtttccgatgcttttaaggtcagtgtgttcattcagttcataaaaagttagtgaatcaatgtcaatttctttgctaaggctaaccaaaaaacgtattgccgattttttgttttccacgatgaaatattttatttctttgatgatgcccaagttgtaggaaggaagcacttgctcgttggcgctgcccagagttactggtattagatacagtgcaagatctatatttgcattgttggaatttgagtcttggttcatttttaatattatacacactcaggcttttttttcaatgcaaaaacttgaacaaaaatttgagcatacacggaaatcagttttgtgcttcactacagaagcttgattatttcgccaattacgcccttcatgcggtcatcgctaagaccaaagtccattagtttgtaggaccaggctgcgcggccaattccgcattcaataaatgctgcgtgaatatccttgtaccaagcgagcgcatctttagggtttgcgcggtctattactccgtattctccgcagtaaactggaactccgcgttctttgcaaacattaaggcctgcctgccacttctggatgaaaaagtccttgctgtagagcttgctttcatcgcttgcaggcgttataaagtccgtcatgccaaaggtgcgggctgcatcgttgtgtttcttgaaggtggttggatattccagccggaagtcatgcggcatggctgctacccagggtgctccttggtgggtaaagagaagcggatcgtagcagtggaagttgtagacgatgttttcgtcagcgggtttgtccaaatcctttagcgcatcgattgaattgttccagtatccgccaacaaggatttttatagtgggtgaaaagcttctgattatttcgattgcgtgtgcggcgattttattccaggcatcgctgtaggaaggcagagttacttcattcagaagttcaaaggaaaccatgctttcgttttttgcaaagcgtttggaaaattctgtccaaagggtgtaaaaatgctcgtgaagtttaggctggtcaaaaaaattgtttttggcaatgtccgcatcaaatgaatagcccagtgtcttgtgcaagtctagaattaaattgagcttgttttttcttgcccattcgattgcattttctacgtagccaaaaccttcttcgattaatgagccgtccttatgctggaaaacctgccagtcaacgggaaggcgcacgtggtcgcagccccaacctgcaattacggcaaaatctttttcgctgatgtaggtcttgtaatgctccgtagtgtattctgaacactgggaaagccagcctcctaaatcaacacccttttcgtaaccagtaaattttttcatagccattcaattcctattctgtcttaaagctgtttatttcgctgccaatctgggtaacgctttcgttcatgcgggtaacgctttcatccagagcggcaccgctttttactatgctctgtgcgttttccgacatttccaatatgcttgtgcggacggcttctgcactgttgcgcaaacggttcatttcatcaagtacctgggcacttccttccgccatctgcatggatgcgttgcgaacttccttagtgttgctgtccatgagtgagagcgaagaaacaacttcttttgaatctgcctgctgctcttcaagagaagcctgcattgtgtgtacgattccgttggttgactgaatgcgctgtgatacgccaaggaatgcgtcgctagaagcttgggaagcggttacaatttccttgatactttcctgaatgttcctaagctgggtaccaatagtctttgactgtgtggatgaagttacggaaaggcttctgatttcgtctgcaacaacagcaaatccctgtcctgcagcaccagcgtgagccgcttcgatagccgcgttcatagcaagaaggtttgtctgtccggcaatggatgcaatagctttgtttgcagtctgaagcatttgtgactgctcttcaatctgggcaatacgctcgtttacatgcttctgcttttccataccgttctgtgttgcactgtcaagctggttgaatgattccgtaagctccttcatggactggcttatgttgcttatgcgctgaatctggcctccgattgccgtagaagattcctgaatgctaaggctctgggagtcaatcatcttgttgagtgtagaaatgttggacgtaacttcctgtacaaccgccgccgcttccgtaaagccagttgcctgggaagaaatctgtgactgaacgttatcaatgctaaggcggatgttggtcattgaatcggatgtctgttgaacactctgcttcatgtcgtcctgtacctggctaaggcgctgtcctgaaagcttaagttcaccgatgatagaattcagcttttccataaatgcgttgaatccgtttacaatctcatgtatggccttgaaaggcgtgttgatgttggtgttaagacggctggtaaggtctgcctctccgcttgcaatgtcgtgcagggttgagcggatttccataatagggttgaagatgttccgcattgtaaaaattaccagcagggctattacaagaagcagtattacggaaattgggaacattgcatttgacataaaatcgctgaatgtgaagggcttgtacaagaccatgtgccagcgaagggaatcaacagggactataaggtattcaccgcgggcagttgaatgaatggtgttttctttaggaaagaggtctatatcaccgtcaagttccggcagaacggaagtaataagagctgttttttcaaggtccactatgtctggagatgcggatacttcgcggtcgccgttgtacatgtacattgtgcagcccttgataagcgttttatacatgtctgcgacaaaatctgaaatttcaataccggttcctgttatgccggtaactttatgggcctggttgtaaacaaggacgtttacccacatgtaggtcttctttaaaccaatgtcatagtctacgtaaaactgaaagggaaggtttgcgtctatggttgcctggaaccagtcgtttgcaggatcctttttgtcaagattgtagatgaattccatgttggaatagtacttaaggtctgtgtccgaaatccagaaggtacgatgtgaggcaaaagagtcctggaaggctgcaaattcacggcgtgccaaacttacaatttccgggtcatctggctgtgacatgtaatcaataactgcgggagattttgcaagttgcaaggcaagctttcgttccggcaagagatatttttcaatttctgcaagctttaactgcgcaacggtttccaactcagttttggctttttttctgaacaatgcacgggaagaaatattgacaatacataatgcagcaaagcaacctactgcagcagcacaaatttttatagccgttaacttcattttttacctcgatttggcacaacagttttagttaactttttgacattataatagataagtatatcacataatcggaaaagggcaagcagaatttaagaaaaaagtgctttttaagataaatttaattacgcgggggcactttttcaatttttgtttacaaccgacttcatccagtcaaaggcagtctcgtctccgcgcccggttttatccttaagctcaacgtggaagtggtagcgggacttgtactgaacatagcgcgaattcctgcaccaaaaggcgcacctctttccggtgggacttccctgctcaaaaatgcccttgtcgttttccgaagtagcaaagtagaaattgaccggcagaaccgtcaaaagttccttcaaagacatctggtaaaagccgctgcccgaaataacgcccctaaaaagatgcggctcgtagcaggcaagctcaaccgcatactttgccccctgggaaaatccccagcctacaatgtttgtcgggtcaatgcacttgttttgcaaaaggacgctctgaatcaaaaggctcatgctgtgggggtctgtaaaatatccaatccgcgcaaccaccgccagaaccgcacagccttccgggtaaatgttgcgctggaattcctccgaaataaagggccttgcataagagatagccttagcctgctccatggaaccgtggaaggttacaatcaggggaatctttgcagcctcattgtccttgtcattcctgtatttttccggcaggtacaaaaaatacttgtggccagtcgcatattcacggtaaagccagggagaggcatcaaattgctttgtagtccagtaataggcggcatcaaatgtaagcttcagtttctttggcgcataaagccataccgcaagcgacgcaatcaaaagcaggactattgcacaaataatacaaatccgtgtgcacaattttatcttcatataataaggatagcactagaaaacatatttgacaattaaaataaaattttcataatttttttgcggcactttctttgtcggacaaatatttcattaaagaacatcttgccatttttttatgggctttccggggttgcgcctttcggctccattaccgcttcgcggcaacgggctttcgcccgcccctacaatccctgccgtgcttttttttgcaaaaggggcaggttttttattatcaaacttggttcaacagtatgtaatttttatcttcgtacatacgttcttccgtcgatatatactacctgggaataagcactgtttgttgtagccgttccaataagactccctgacatgtatatatcgatattagttccagacaaagaccattctccggactgtgttgtgccggactgtccgttccaagtaaaagttccattgctattaaaagaaagatccatataagttcctgctgcggtagtatacctgtaggttccacctgcaacagaagtgtaagttcttgttccagaaccgccagaagaggaagagccgcttcccgagccactgcttcccgaaccgcttgaatagcttacgccgtcatcatcggaaccgccgccgccaccgcctgagcatccaattgccccaaacagcacaaaggcagaaagcaaaagtcctgcaaccaaaacaatttttttcattagataaatctccttgcgtttaagcccgccggcattattttacaatgttccccaaaagcgaaaggcctgccttgtccagctgggcattggtctcttctatgcttttttccagaaggatgcactcctttacaatgcggctaaaagtgtcgtccggtataaaagagtgccctgccgaagccagaagtttttccgtctcttcaaaagtaaggccaagggcaaatgcaatggctataaccgtttccctcttaggaaaaaccttgccagaaattatgtttgaataaacctgcttgctaacgtttgcctttttgtaaagttccacgttggtcatttttttatgctcacggaaagtgtttaccagctcagaaaaagatgcctgtgaaggaattcttttttgcctgggggattttttttcgggcgaagaaaatgcggaactgcaatattcctgaataaaattcatgccaacttcaatgttgctgcaaaaactgtagacatttgcagaaatatccttttgggctgctatgagcatgcggtaatttttaattatcgctataagctgacttttcttattcatggaaaaagtatagcaaaagacaaaaggcaagtggtcaaacgcaaattgacattttctttgtttgaaaaatatggtaagatttagggagttcactttgcttattaataggaggattatatgaaaagcgtttacgattttatcaaagcctgcgaaacttattatcttgccactgtagaagacggccagccccgcgttaggcccttcggtacaatcaatatttttgaaggaaagctttacattcagaccggaaagtcaaaggatgtttccaagcagattcaggcaaacccaaaggtggagctttgctgctttaacggaaagacttggcttaggctttctggcacccttgtccgcgatgacaggattgagccaaaaaaagacatgctggaaaaatacccttcactaaaggcaatgtattctgcggaagattccaacacggaagtcctctattttaaagatgcgaccgcaactttttctagctttacggaagccccaagggttgtaaaattttaggtagtcaaaatggcaattcaaatatttggcacctcaaaatcctttgacacaaaaaaggcggagcgttattttagcgaaaggcgcatccccttccagaaagtggaccttaaggaaaaaggcatttccaaaggtgaactagaaagcataattttatcccttgcaaagcgtgaaggcagcagggccttggctgtagaattgctggcagacaaaaagggcaaagactacgcttcttttgcttatcttgacgacagcgaaaaagaagacaagcttttggaaaaccccatgcttttagcccagccaatttgccgcaacggaaagacggatgccactgttggctatgcacctgacgtgtgggcaaagtggaactgattcgcgctaaactcaaccaatggttcgtgtacattttccttgtttaacattattctgctggaagaaagattaacttggaggtttcagatggacatgattaagacaggaaaattcattgcgcagtgccgcaaagaaaagaatttgacccaggctcagcttgcagaaaaatttggaattacggacagggctgtttccaagtgggagacgggaaattccttgccaaatgcttccatcatgctggaactttgcgaacttctttctataaatgtaaatgaacttttaaaaggagaacgtattgccatggaaaacatgaacaaagaatcagaagccaacatcattgccctaaaaaaagaaagcgaactgcaaaccaaaaaacttcttaaactggaatgggttttggtaggaatttcgcttgcgggctttttaatcttgtgcctggcaggtgaatatgttgcaagacgctataatgcaaaattgctttcgaactttctgattggaggcggaactttgcttatactttgtgccgcccttgttggcgtttggattgaacagactgccggttactacgaatgtgcctcctgctcccaccgctacaagcccacttatgccgcagttctttttgctccccacatgagccgcacaagatggatgaagtgccccgaatgtaaaaagcgtacttggcaaaaaaaaaaattgtggaaaaggaattctaaaatacccggataattaaataaaattcaaaatcttcttccattccccgcagagtttttcaaaagtccatgcggcgtttgcggggcttgttgaaggaaggcaaattgaattgcgccctgtttgcggaagcaggtattttttgtagagggagtccgctgtttttccgttggtaaaaacctgggcaacttctgtggattttagaattggcaagatgtcgtttggcacaacgtcttttatgcttgcgtcgcttgaacctgttatgctgcaagaagctatcacgtcccagagggcaatgccgtgcaaaagaagaaatgcgcgtttatcttctatattattgggaaggctgtcttttagcaaggtggccaaaactttccaaaagcggttctgcggatgcccatagaaaaatccagcctccctggacttaaccgaaggaaatgaccctaagatgaggatttttgaattgctgtcgtagaccggcgggatggggtgctgcatgtttataaaagtatattaaatataaaaatagccccacggagtacgcagggctgtagtcaaatgacttcggcacaaggccttattgtgatttgatttcttaaattcagaatatcatgttataatagtaattgcaatatagttttagtttttttcatcgagggctttttatgaaaactttgggacttgatattggtactaattcaattggctggggaattgttgatgaaagcgcacaaaaaatacaaaaatgcggtgtttatatttttccagaatgtgctaacaaagatacgagtggaaatataagctcgaaagctgcagaaagaacaggctttcgctctgccagaagactaaagtttaggagaaagcttagaaagtatgagaccctaaaagttttgattaaaaacggaatgtgtcctcttactttgggtgaacttgaagaatggcacaaggaaaaaatatatccaacatcaaaggattttataaattggtatagaacggatgaagaaaaaaactgggaaccgtactttcttcgtaaaaaatgtgttgagcaaaagtgtaagccttatgaaattgggcgagcattgtatcatattgcacaaagacgcggatttttgagcaatagaaaagaggcaagtaaagaagcggacggaaaagtaagcgaagggatttctgaagtcacacaagcaaaaggcgataaaacgcttggccagtatttttatgaattaaagcaggctggcgaaaaagttcgtggaaaatatacagctcgaaaagagcattatgaagaagagtttaacaaaatttgcaagatgcaggaaatttctgtaagtctaaaagaagatttgcacaaagctattttttttcagagaaaattgaagtctcaaaaattccttgtaggaaaatgtacccttgagttgggaaagccacgttgccctgtttctcattttgaatttgaggaatttagaatgctttcctttataaacagtattcgcattaaccgtcagattagtgagtcggaaacattaagtttgtttgaagaggcgaatgaaagctttcctaaggatggaaaactaacaaacgaagaagtagaattaataaagcctcttttcttccgtatttcaaagagtaattttgattttaaggacattgcgaaaaagcttagaaaaaatcatgaagaatggacttttaattatcgcgatgacacgaatgttgcagcatgccctgtttctgcgacattgaaatctatttttggtgaagattggaaaaatacaaaaatagataattatgacatttatgatatttggcatgttctctttgattttgatgatgatgaaaaattacacgagtttgcgctgaacaaattgcaccttgattctgaaatggcggataaattttgttcgattcactttcagcagggatatgcaaatcttagtttaaaggcaatccgaaaaattcttcctttcctgcgtaaaggctatgtttatgcccatgcagtattcttggcaaatattcctaatatgataggggaggatgtttataataagcatgcggatgaaatagaaaaggctgttgaaaatatcataacaaacttaaaagataaaaataacagagttacacttgctaaccgctgtatagaagctatctttaaggatgaaaaacatgacttccatagtgaagaatgggataaagcaatcgtcgatgctcaaatagtagatttgtttggcaagagaaaatttgcagaaaagtcactggcagagcagaaagagataagggaagatgtgattgcgaaagttgaagcaactctgaaaattgctgtgtccaaaaatcctaatgattggaaaatatcagctttgcggactgacgatttgattttggaatatcttgaaaaacaaggttttaaaatcaaaaagaatacaaaaatttatcatccgtcagacagtgaatataacttagagcggccgatagaatctgatgacggaaaaacttatcttgcttccccaagaacgccgagcgtaaaaaatcctgttgtaatgcgggctttgttccagcttagaaaactggtgaactatcttataaaaacaggcgaaattgacagtgagaccagagttcatgtagagcttgcaaatgaagtgaatgataaaaactggcgcaaagctattgaagatttccaaagagagaaggaaaagaaaaatgcagagtacaaggcacggatgattggactttgtaaagagtgcggatttgaaattgagccaacagattctgatgttaaaaagttccgcttatggaaggagcagaatgaaacatgtccgtacacaggaaagaaaatcggcatctgtgatttgtttggcccgcatccgaaatttgattttgagcatactattcctcgaagtctttcgtatgatgattctttggaaaatcttactctctgtgactctgattttaacaggaatgtaaagaagcagcacattccgtttgagcttcctaattttgaggaaataagcaggagattcgagcgaatgtacgaagccaaaattgatgaatgcctttccgcaattgagagaaacaaaacacgtggtggctatattgatccagaaattaaaaattggaaaattgttgcccgccataaagcccagcttgagcttgattattacaaaggcaaacttaggcgatttacggcaaaggaagttacatctggttttaagcacagccagctcaacgacaccagaatcattacaaagtttgctttgcagtatctaaagtccgtatttgaacatacattcccggtaaaaggctctatgaccgacatttttaagagacagtggggcttgctcgatagggcggaaagcaaagaccgtactaattaccgccaccatgcagtagatgcattaacaattgcttgtgttaaccgaactaaatttaacttgctttcagaggccgttcgggcaagtgctgatgggacgcatttaaaatttgcaaaaccatgggattcctttgataaagatgttctatcggccgttcaatacattgttccaaagtattatgtggatgacaattcgctcaggcaaacaaagaaagttcttcgtgatccgcgtacgggaaagccgaagttagacaaaaatggaaacaaaatctatattcaggggaatacggcacgaggttctttgcataaagatacattctatggctgcattatgacgccatcggagaaaggtgaaaatttacaagataaaaagccaatatttgtccagcgtgtttctgttgatacgcttacaaaagattccgctgacaaaattgtggataagggaattcgcaatacttttataaacaatcttgaaagcggaaaacaaactcttgctgaaattcaggaaaagggaatccttttaccataccagatgaacggaaagaatgtttatgtaaaacggataagagttaaagcaaaaccaacttctccgcttgtcctcaaaaaacataataatgttattgaccacaatccaaaagattacaagcagaattattatgttgtaaatgatgagaattatctcattgctttgtaccgaggaaaggatgagaaggggaaatttcaaagtgactatattgttttgaatctgctggatgctgttcataaaaagcaaaatggggaacaactttatccggctgtaatggagaaaaaaggtactaagttgaaattgtataaggcactaaaaaatggacagataataattttacaaaattttcttgatgaagatgtatttaacttgccagcaaaagaccttttctctcgtgtttataggatttcaactcttgaaagtgatggtagggttaatctttctcatatagtaatagccgaagcaaaaaataaaaataataaaaatgaatgtattgatgaaggaattgacaaatacaagcggctttcaaattctggattatattgcctcgttgaaggcactgacttcaccatatccccaataggcgaaattattccccgaaactaaaaaaaacggtacaaatcgtaacttgaacttgcgatttgtaccgttttgcactataattcaattatgaatgagataaaacgccttatagattcagaattaaagcggtgtgcggaatttttccccgtggttactattttaggaccgcggcagtctgggaaaacgaccctggctaagacatttttttcagattactcttacataaatcttgaagaccctgaatactttgaacttgcaaaaaatgacattaatgctttttttagtacggtaaaaatgcctgtaataattgacgaagttcaacgtgttccagaagtgctttctaaaatacaagtgattgtggacaaagaaaaatccaatggccaattcattctgaccgttagttttcagcaggggttaaaatctgcaatttcacagtcgcttgctggaagaacggctatcttaaatctcctgcctttttcaattaaagaagttaattctgtgggattagacttttcaaaagatgaatttttgtatcagggattcatgcctcgccattattcagaaaatcagcctgttgatttgctttaccgctcgtactttcagacttatgttgaacgcgatgtgcaaagcttgttgaatgtaaagcataagaatttatttgaaaaattccttcgcttgcttgcgggtagaattggccaggttgtaaattatgaatcccttgcaaatgacactggtgtttctaaaacaaccatcagcgagtggatttctgtccttgaatcttcatttataatttttaagcttgaaccgtattttgaaaattatacgaagcgacttgtaaagtcaccaaaaatttatttttatgaaccaggacttgcaagctatcttttaggaataaaaaatgcagagcaggtttcccgcgatcctcttgttggaaatctttttgagaatatggtgattcttgaaatcttaaaggcgcaatatgccaaaggccttgaaaaaagtttatattatttccgtgacagtaaaggttttgaagttgatttaatcattgcaaacggcagggatattattcctgtggaaataaaatctgcttcgacatttaacaaagatttctgcaggaatctaaaaaaaatgtgcgggtttgcaaaaaatgcttattcgccaacagttgtgtacagcggtgatattgaattagaatcagaaggcataaggtttataaatttcaaaaactgtggaaatctgattgaatagccgataataaaggcatgattaaacgaacgctatttttttcgaatgctgtttgtttaactatgaagaacaggcagcttgttattcagaataaagaatctcaagaagaatcttcggttccaatagaagatattggatttgttgttattgaaaataatcaggtttatatttcaattcctcttataaatgctttgacggaaaacaacgttgccgttattttttgcaacgagaaacatctgccttttaccatgaccttgcctttggattgcaatacggttcagaatcaaattttttcggcacagatagaagctggcctaccattaaaaaagcaatgttggaaatctattattgagcagaaaattagaaatcagtcaaaagttttagagaagtattcaaagagtgcggtagagttaaaaaggcttgcttgtgaagtaaagagtggggatgttacaaaccgagaagcggtggccgcaaaaatttattgggattcattttttgaagaaaattggactcgcgaccgttatggggaatatccgaataatttgctgaattatggatatgctatcttgcgggcagcaacagcgcgggctttaagcggttcgggacttttgccaacgtttggaattcatcatcataataaatatgatgcctatgcacttgcagatgacatgatggagccatacaggccgttcgttgatgatattgtaattgaatatgtaaataaaaatagtagcgaaatggaacttacaaaagaattcaaaagcgaaattctaaaaagtttaactggagatgttcatattgggaaaatgacgcatccattgatggttgccctttcaatgacgagtgcgtccttttcaaaagtgttgacaggtaaggctcagaaacttgcacttccggagttttgttagatgaattatgaaaggttcaatgcgtataagattatgtggttgttctgtttgtttgatttgccgacaaatacaaaatctcagcggaaaagagcatcggaatttagaaagaatcttattgatgacggttttgacatgatgcaatacagtgtttacaagcgtttctgcggaagtcttgaagcttgcgatgttcacattaagaggataaaaagatggcttccaaaggaaggaacggtgagtatactaaaatttaccgataaacagttcagcgatattgaaacgtatatcggagaaactgttgaaaaaaagccaaagcacccggcacagctggaattttattaaaaaatgcagactctctaccaattttgatagaaagcctgcattttttttgatgtataatctgtatatttctttatataatatggccttgtgcggctcatattattatacatcaaaaaaagaaatcaaaccacaactacgccttaccagtggtttgcgtgggctggattattatacatcaaaaaaaga

SEQ ID NO: 3536 - DNA, 16224 bp, synthetic construct
  misc_feature 1..16224: note = Synthetic
  source 1..16224: mol_type = other DNA
ggcatgagcgccgtgatgacgaaaaaagacgtaagcaaaagcagcgcgaacccttcggacaaaagattcatctgaggagccgctcgagcgaggattcccatacagatattgataagcaaaagcgtgcccatgagcggaagcgcgatgacgagcgaagaagcgaaaagctcggtgaggcttccgaccaaaaatcgcacgatgcgctctttcgcatcgaggagggcaaatacgttcatcgacgcaaagcttgaaacgagtcctcgcaaaaacagtttttgaaaccacttgctctgcaaaaaaagcagcattgcaacgagattcaaatactgccccataagcgggttttcgacttgcgcgagcgcgtcgtagacttcggatgcgctcaagcccatttgaaacgcaaaaaattgacctgccgtgctaaacgcggcaaagaggatcgtgataaaaaaaccgatgatgagtccgatcatcgcttctcccgcaagcaaaaacgcgtatgacagatcgaaaaggccgctcgacgaaatatacggagcgtaggatgaaaaatcgacgtgcggaatgagggcgtatgccatatagcctgcaagcgcgaccttcgccgccctcggcaccgatcgcatcgaaaagagcggcagcgtcatcaaaagcgcaaaacagcggacggcaatgagtaaaaatatcggcgcatgacttacgatacgatcgatcaccgctttcgtccttatcgctagcgcgccatgagcggtatgagattaaaaagagaaaccgtgtaatttctgagatgcgtaaacatccagcctccaaggagcgccagcatcgcaaggatcgtcaaaactttcggcaaaaacgtcagcgtctgttcctgaatcgacgtcgtcgcttgaaagatcgcaacgacgagcccgacgaggagagcggcgccgagtacgggagctgcgaggataaaaatttcaaatacgccgccgcgaattaaattgacaagctgtcctatcgacatcgctttttatcatcctcctaaaatcgaatcaccgattttttcagcgcaaaacggaaacgaaaagctgctgcgtcaaaagcccccatccgtcgacgaggacgaagagcatcagtttgaacggcatcgaaatctgcaccggcggcagcatcatcatgcccatcgacatgaggatactcgcgacgaccatatcgatgatgataaacggaatgtaaagcagtacgccgattttaaacgcgacggtaagctcgtgcaaaatgtaagcgggcacgaggatatgcgtcggaacgtcggcgagcgtattcggccgatccatcctcgccatagacataaaaagagaaatggaactcgtatcttcggccatctgcgtatacataaagatgcgcatcggagcttcggcttcgcggtacgcctcttcgacgccgatctctccgctcgaaagcggacggaacgaattgtcgtacaccctcgtaaaagtcggccacatgacaaaaagcgtcataaaaaacgcgattccgttgagtacggcggtcggcggcacttgctgcagagagagggcgcgtttaataaaatcgaggacgatcgaaaaacgcaaaaagcacgtcgtcaaaatcaaaatgctcggcgcaagcgtgagcaccgtaagcaaaaggagcacttgtaccgaaaacgcgacttccctgcccgtttgaggctgcgtaacccttatatcgacgttcggcacgacaggatttcgcacattgcgattcatctccgtcgtacccctcgccgatccttcgggaaaattattattctgctgagcggaaagattcgcgccgcataaaaagagagcaagaacgaccagagtacgaacaatgcgcttcgcccgcattcgatacgttttttttccggcacacatagatgactcactcatatcacttttccgaatcgaggcggcgtctctgcgttcgaagcatatcgcgcgctttatcgccgtcgccgctgaaaacgctttcgcctttttttgttccctgcggcataaagatcgaaaggatatcgccgaaattccgcggcctctttacattttgacgagtatccgcatagaggttcatcgcgtgaatcgtctctttgtcggtaacttcaccgatgaggttgaccgcgttgtcggtaacgccgatcaaatacgctttatcgtcgaggagcgaaacgacgtgcaccgattttccgggcgcgatcgatacggaagagacgacgcgcaaaaattgatcgccttctccgacatctttattcatgctgcgcttcatgaggtagacgaccgcgtacacgcaggcgacgacgacggcgaggacaaggatcatgcggataaaaagccaaagcgtcgatgcgggccgctctgctgcggcggatgaaagcgcgggatcggctatcggaagagacgattcgtcgacggcagcagtttcagtccgctcgatgcgcgtatcttcggtcacctgtgcttgcgcgtacggcggaaaagatacggcgacgagcaaaaacgaaaacgccgccgtttttaataatttcgagtattgcaactgttcccccaccctgtaaaagtatcagtgcagttccgtcaccctctcgatcgaagacaggatttcggtaacgcgcacgccgaagttttcgtcgatgacgacgacttcgccctttgcgatcggcttatgattgacaaggatatcgaccggctcaccggcaagtttgtcgagctctatgatcgtaccttctcccatgccgagaatgtcttttatctgttttttcgtacggccgagctctacggtcatctccatgtacacgtccatgataagaccgatattgccctgttcgccgctcccggccatattgccttgaagcatcgggtactgcagcgactgtacgttcggaatgccgcttcccatctgccccatcatgggcatcgactgtcccatgttcatgcctcccatattcataccgggagatgccatcgttccgacggatgcgatgtcggcggcgctgagcgttccgcccgtattcatctcgggagccgaagttccgcttccgagcgctctgatcatctgttctgcggccgtcgctccgaccgcttcccacaatgtatagccctgcccgtcgagcgaaagaggataattgaaaaggacgaattgattttgcggaactcgtatcatcgctttcggatcgttgcgcgcagtgggcggattgcacgaaatcccggaaatcttgcccgtcttttcgagggcttggatttcatcgttcgtgtgcgtcgacacggtttcggcgataacggaaagcgccatatcgtcgatgtccgcgttatcctctttattcataagaccgacgatcttttgcgcaaactcgggtgcgagtatgtacaggtgatcaccgaccaatccgcttgaaaagtcggcgagaacattgacgacgacttccggcagctttgccaataagcgatcgcggtcgagctgctcgacgacgggagtatcggccgaaaaattcgcaccggtcattttgttgagattttctgcgaacggcgttttgagttcatccgcaaatttctgcagaacggcggtatccagctgtacggaaggcattcctccgactctgccggatgaattgaggccgtctacggacacacccgaaagcagagcatcaatctcatcctgcgatattgcaccatcactcatacgaatcatctccttctacagaaagttcttcaaaatcatccgccgaaatatcttccaatttaccggttatctgcaccgccatcttttttccgacaacgcccggctggcaatagaatttctttctgttgcccacgctgagcgtaagcggatcgccgacacggatattcgacaggcgcacgacatctccggcacggagagagagcacttcgcgtatcggcaaatcgatggagccgacttcggcgacgacgtccatttcaaccgacgaaagtttttctttcagcgttccgaggtactgcgtcgtcgaacttctgcgcaccgaactgaaccaaaattgagaggacagctttgaaatgatcggctcgatcgtcaaatacggaatgcagaaattcatcatgccttcttcttcgccgactttcatttcaagggtaacgagaacgaccatttccgaaggaggcacgatctgcgcaaactgcggattcgtttcgatctgtccgagccgggggcgcaaatcgataacctgcgtccacgcttcccgcatattcgcgaggatgcgtacgatgatgccttccataaccgactgttcgatatcggtcagatcgcggtttttatttccggttgtcgaaccgcggccgccgaacaggcgatcgatcatgcaaaacgtgatcgtcggatcgatttcgagcaccgcatttcctttcagcggatccatattgacgacggcaagcgtcgtcggcgtcggaatggatcgtataaactcttcatacgtaagctgatcgacggaagcgacgtgaacgtgcacgaggctccgcagctgagcggaaagactcgtcgtcgtcaaacgcgcaaaggtttcgtgcatgttcgacacggtgcgcagctgttctttcgaaaatttgtcgggacgcttaaaatcgtaaatcttgattttacgcgtatcgctgaccggcttaaaatcgtcggtgtcggaatcgcccgaacttatcgcggtgagcagctgatctatttcatcctgtgacagaacttcgttcatgctttttcctaatcaaaccgccgtactattgctcgatgacatcgagctgttgaaacgaaacgtcgcggatcttcgaaccgcttaaaatttcgtcgttgatcgcattgcgcaattctattttcaatttctgttcgttttgcggcttcaactcgtcgatcgtcttctgtgtaaaatatcggcgcaaataatcggtgagttcaaccctccgttcggttatttccgtcgccgcaaccctgtcgtcttttttataaccgaggaacacgttgacgacgacgctcgcagggacgtcgtcgctcgttctcgttctgatggctccgagcgatgagtaccagtcgagcacttcccgctgcgcatggtattcgtcgctcatcgggatcgccgtctgcgccgacgtattgctcgaaacgacacgcaccgtaacgaacacgacgacgacgatgaggatcaccgcgccgagcgctatgagtatccattttaataatccgggaacaagtccgccgattccttttcctttcgcaccgcttccgccgtcggacgcgctttcgtcgaaattaatatcgttgtctgccatgatccccacctatacaaacgcacggtttacattctaaggaatatttaattatatattgtatcatcaaaagtgtccttcgtctaggataattatatcgacccgccggttgtaggccctgccttcgggcgtatcgttcgaaaacatcggacgcgtatccgcatagcccgctatcgaaaaccgccgctcgtctacgccgaagtctgcaagatagtgaagcacgttcatcgcacgggcggccgaaagctcccagttgcttgcatacggggaagacgaagaaacgggcgtatcatcggtgtgaccttcgatgcggaatctcctcgctttcagttcggggtctctgaaaaattccgaaagccgcaagagcgtttcgcgcgtttcgtcgatgtcgagcgcagcgcttccttcggcgaaaaaactgtcggatgcgagcgtgatgacgagcccccgctcgtcgctcgttatcgttatcctgttcgatttgacgtcgggtgcaaagaggcttaccgctttttttcgcgcgtttgcaagcgagcggcctttttccatcgccggaagcgaattgatattgtttcccaaatccgcaagccgtcccgtcgaaagcgctaagccgcccgccgtcgtttccgtttcgcgcatttggagcgcctgcgtgatcgtcgcaagctgcgtgatatcgacttccgtcggattgtacagcatgacgaaaaaacagagcatgagcgtgatcatatcgccgtaagtcgtttgccacgcggttgacggcttttcgggctgtttgcttttccgcgccatactcaatccttcaaaacgtcggcttcgatcgcgtgccgtgcgacggggtcgaggtacgtgagcagcttttgcgccatgatacgcgggttttctcccgcctgaatcgcaagcacgccttcgatgaccatctctttcgtccgcatttcagcggcgttgtgaccgatgagcttttgcgcgatagggccgatgatccagttcgccatcaaagaaccgtagagcgtcgtgataagagcgaccgccatgttcgggccgatagccgatttatcttccatgttgcgcaacatgccgataagaccgacgacggttcccatcataccgaagcccggcgcaagacccgcccactgatttacgagacttatccacgtcatgtggcgtgcttcgcattggttcatttcgttttccataatcgaacggatgacctgcccgtccgtaccgtcgacgacaaggcgaagaccgttacgcataaaggtatcttcgatatcgtcgaggccgtcttcgagggcgaggatgccttcacgcctcgctttttcggagagcgcgaccatattttggatgatctgtttttcgccgaaatcgtaaattctaaaggcgcgccccatgatgcggaagatgccgatacatcgggaaatcggagcgcagagccacagagaaaaatacgaaccgcctatcgtcataaagacggaaggtacgtcgaacacgcctctcaacgaaccgccggaaaagataaccgacaccataatacacgcgccgccgccgatgattccgattattgtcgctatatccataattcctcacacctcttgcgtattgatgccgatcttttttcgataggctatgatcttttcgatgatatcttcgggtttgtcttttacgacgatttttctgcccgacagcatcgcaagcgtcaaatcgggattttcttccatgctttcgatcatgtgcggattgatccaatacttttttccgtttaaacgcatcacttcgatcatcgttatataatgctccgattgcttcgagccgtcaagtatttcaacgaatcggcagactgccccttcgtcgaataaaaaaatcgcgtcatttcattatcggctaagccgatatacttgtttacggataattttccgttttttgagcataaaaaactgttattaccgcgtaaggtcacgcgtttccgttgcgcgtttttccgttttatattaaattattaaaaggtcgaatgccgagttttgaaagcatttctaaataaaactgtgctttcggcgagaacttcgttcgctgcgctcactaccgagtttgctctgcaaactcgccgtgtatgccgcagtcgaacttgaaaggaaagcttatgggcgcccgtatttttattatagaagatgtttccgaaattgccaatctcatcgcgatgtatctttcaaaagccggcatggatgccgtatcgttcggtactgccgaagaagcgcttgaaaaactgcggtcggctcccccgcccgatctcgtcatcctcgatttaaaccttccgggcatgagcggcttcgaattccttaaaaaattccgcgccgaatacaaaacgacgatacccgtcgtcatcgtttccgcgcgcgacgccgacgaagacatcataaaaacgctcggcttcggagcggacgaattcgtcacaaagcctttttctccgcgcgtcctcgtcgcacgcgttcaggcaaacttgcggagacaggcggcaacagaagccgctgccgaagagacgatttcgttcgggccgtatacgctccttttaaacagctgcgtactcaaagaaggcgctcaaaaaatcgccctgtcggcaaaagagtacgccgtcctagaatacctcgtcaaacatgcgggggaaacgctttcgcctgaaaaaatctacgcggacgtgtggaaagcgcagtacggcgacataaccgccgtcgcagtgtacatccagcggcttcgcaaaaaaatcgaaaaggatccgtcgaatccggaatttattaaaacggtgttcggactcggctattgcttttcgaaagaatcgatcgccttcaggcagggagcgaaaaaagacgcatgacgatcaggcgccaattccatatccttctcgcggcgatcatcgtcattccgatatgctgcgcgctttttattccgtcgtatcactattttacgtctccggtacgcgcgctcatccacgattacaaagagctgcgcaaaagcgatacgttcaaactttcggtacgcgaatggagtaagctccacgattatatccgccgcctgccgcccgacatggaagtcgccgttttttcgctttcaggatcggccgatattttgatctcatcgatcgccgaactcaaagcgggcacgtctctctctccgctcgcgctgtggggcttcgcctcttcgacgagcgatacgtatttttatcaatttacgagttttcgtttttccgggcgaaacgatacgatcgtcattttaacccgcgtcgataaattcaacaaacgcgacaggcacggcatggattacgtcaattatctggtcggtattttgctgtgctttgcagtcctcgtactcatcatcatcgcaaaaatttcgggcgacatatttacgtcgatcacgatcctcgaacagagaacgcaaaagattgccgacggagatttaagcgttccgatcaccgacgacgcgaaacagtcgaaagcgaagagcaacgaaatcatttcgctgaccgaaaatcttgaaaagatgcgaagcgccctcctcgacgcgcacgagcggcgcacgcgatttatcatgggaatcagccacgacctccgcacgcccgtcgccgtcatcaaaggttacaccgaagcgatttcggacgacgtcatcaccgataaaaacgaaatcaaaaaatcgcttgaaataatcgcaacgaagacgaaccggctcgaaagcatgatcgatacgctcatcaattttgtaaaactcgacagcgcggattggcggcaaaagctcgttcccgaaagcgtctttacagtcgtttccgaatttgtaaaaagcgccgaaatgaccggagcggttttcaaacgtaaaataaagtcggcgatcgccctctctcccgaatgcaaagtgccgatggacaggcagcttttttcccgcgcgctcgaaaaccttttgagcaacgcgatacgctattcgaaagaaggagacgaaatcgcgatttcggctgcggaaacggatgacgcatgtatcgtgagtgtcagcgacaccggaatcggcatagcgaaaaaagacctcgatcacatattcgatatgttttaccgcgcgaccgattcgcgcagggaagaaggcatggggatcgggctttccgtcgtaaagagcatcgtcgacacgcacggctggacgatcggcgtcgcatcggaagcgggcaaaggttcgacgtttacgataacgattccgaaaaaagcggagaggggcactcactgtttttcgtagagagcgtcgactttgcagctcatcagcaagccggactcattcgccgctttcgctcgcggcgggaatgctgcgcgaggatgcaatccgacgtaagcggatagatgagcgatacgcacgtgtcgtcgtatttgtcgcctttatacaccgatttgatttcaaagcgcagcgttaccggacacgaaagctcttgggagaggacgatttcctgcagatcgggcgtgttttcgagttctccttattttgcaaattagagcaaagtcttttaaataaatatccccgaaaataaattcctgtgatataataaaaaagtcccacaagatgcgggactgtagtcaaatgacttcggcatttagccttattgtgattcgatttctgcgttcagtataacattgcctgcgattttttgcaagcacaatttttttattattgaggattttacaaattttatgaaaacacttggacttgacataggaacaaattcgattggctggggaattgttgacgaagcagcaggcaaaattgaagactgcggagtttacatttttcctgaaggcgtaaaaaaagaaaaaggaaacgaaagttccaaagcggcggagaggacgagttttcgtcttgcaagaagattaaaattcagaagaaaacttagaaaatacgagacattaaaagtcctcatcaaaaataaaatgtgtccgctaactatcgaagaacttgaaaaatggcgaagacaaaaaatatatccgacttcaaaagattttttaaactggtatagaacggacgaactaaaaaactgggagccatattttctcagaaaaaaatgcgtggagcaaaaagcggaaccgtatgaaatcgggcgttcattgtatcacattgctcaacggcgtggatttttaagcaacagaaaagagactacaaaagcgtcggaaggagaagtctcaaaaagcatagacgaactttcctcacttatgggtgacaagacgctcggtcaatatttttacgaattaaagcaatccggtgaaaaagtgcgaggaaaatacacatctagaaaagagcactacgagaaagaattcaataaaatctgtgaagttcaaggtttttcatcggaattaaaaagcgatttatacagggcaattttcttccagagaaaactgaaatctcaaaaatttcttgtgggaaaatgcacattcgagccgaacaagagccgctctccaatctctcattttgagtttgaagaattcagaatgctctcgttcatcaattcaataaaactcgcaaaaaattcaagggaagatgaaaacagcgattttgaattccttacagacgaagaaaaagaaatgataaaaccgcttttcttcagaatttcaaaaccgacgtttcagttcgctgacatcgaaaagaaattaaaaggcaaaaacgaattctggaagtttaactacagaaaagagactaacgtttctggctgtcctgtttgcgcaggattaaaaaatattttcggcgacggctcttccgatgaaagctggaaagacaagaaaatcggacaatacgacatgaacgacatctggcatgtcctttttgatttcgacgacgaagaaaaactgcttgaatttgcaaaggaaaaactctttttgagcgatgaaacggcaagaagattctgcacaatcagaattcagcagggatatgcgaatttaagccttaaggcaatccgaaagataaatccgtttttgcggaaaggctacatctattcgactgcggtttttcttgcaaacataccgacaatgattgggcaagacgcatttttacaaaacgagaaagaaatcgaagattcggtaaaaaatataatcggaacgctaagagacaaaaataatataatcgttcttgcaaatcgctgtattgaatcggtgttcaaagataaaagcaatgatttcaggtttgaagaatgggataaatctgttgtggaaaattccgcgcaggatctgttcggaaagaaaaagtggaacgaatatgacgaagagaaacgtaaaaatataatttcgcaagtttctgaaaaggttgaggacaatctgaaaatcgccgtagggaaaaatccaaacgactataaatatccgcttttacgcactgacgacttgattttggactatctcaatcaaaaaggatttactgtaaaaggaaaactttatcacccgagcgatacggattacaattttgaatcgccggttcaagccgacgatggaaaaatatatcttgcctctcctcgctcgcaaagcgtcaaaaatcctgttgtgatgagggcattgcaccaactccggaaacttgtaaattatcttataaaaacaggaaaaatagacagtttaacaaaaataaatgtggaacttgcaaacgacgtaaatgacaagaaccggcggaaagctctcgcagactttgtaaaagataacgaaagaaataatgcggatgccagaaagaaaatagaagaactttgcaacgaggccggctttaaagtcgttccgacggaatcggatgtcaaaaaattcagactctggaaagaacaaaatgaaacatgtccttacacgggaaagcatataagttttacagacttattcggtccgcttcctaaattcgactttgagcacacaatcccaagaagcctgtcttatgacgattcccttgaaaaccttacactttgcgacagcgaattcaaccgaaacataaaaaagcaaaaacttccttcggaactaccaaattttgaagaaataaacaagcggttcaaaaaattttatgaagataaaatcgacaactgcctgaaaataattgagcgcagtacaaaactcggaggctcatacgaagaacctaccgccaaagattcaagaatcgtaaaaaaacataaggcagagtacgagcttgactattacaaaggaaaattaaggcgtttttcggcgacagaagttacttcaggttttaagcacagccagctcaacgacactagaatcatcacaaaattttctctttcgtatttgaagagtatttttagctatgttcagcctgtaaaaggttctatgacagacacattcaaaaggcagtggggcttgatggagcgaaatgaggtaaaagaccgctcaaaccatatgcaccacacagttgacgctttgacaattgcatgcgtaaaccgcggaaaattcaatctgctgtccgaggcaatcaaaaacagtcctgacgggaagcatctgaaatttccaaaaccatgggcgacatttgacgccgatgttctgaacgccgttcaatatataatcccgaaatatttttcagacgaaaactccttgaggcagtcaaaaagaattatgagaaatcgggatggaaagcctgttttgaaaaacggaaaacctgtctttgtccagggagcgacagcgcgaggttctttgcacaaggacactttctatggccgcataaaaaccgttccggaaaagggcggaaaatccgagatgatattcgtgcagcgtgtcctggtttcaacattggatgaaaagagcgctgaaaaaatcatcgacaagggaataagagagacttttgagaaaaatcttttgaatggaatacaaacgctccaagaaattcaaacaaatggaatcctgttgccgtttaaaaaagacggaagaaatgtttttgtaaaacggattaggataaaggcacagcctacttcgccaatcactttgaaaaaacaccaaaatgtgattgaaaagaatccgaaagactacaagcaaaattattatgttgtaaacgacgaaaactatcttcttgcgatttacagaggaaaagacgaaaaaggaaaggatgtttcagactacaaaatttgcaatctgcttgacgctgtaaaaagtagacagaacaagactgaactctatcctgattttaaagagaaaaaaggcatcaatttgaaattgtacaagattctaaagcccggaaaaatcgtgatcctgcaaaacgatattcaggaagacgtgttcgccttgtctaaagaaaaactttggaaacgcctgtacaggattgccgggcttgcaacttcagggaataatattcaaataaaactagtgcacattataagtgcaagaccttggaaatatatgaaaggtgaaaatgataaaaaagatttgaatgcagggactgaatgtcttatgtatctaacatcaaattttaagggacttgttgaggggcaggactttgccgtttcgcctataggagaaatcatacgaaagtaagagtttggtaaaagatgtaacttttcgcacaagaataaaactgaacatatcgagtttttcgtccgatagttaaagtatggttaaacgaacactgtttttctcgcatgctgtttgtttaagcgtaaggcacaagcagcttgtcattttcagtaaagaaactcaagaagaaacacttgttcccatcgaagacataggttttgtgattgtggaaaacgcactcgttacactgacaattcctttgataaatgagcttactgacaataattgcgcgcttattttttgcaatgaaaagcacctgcccttttcaatgactatgccgcttgattgcaatgagacccagtcgcaacttttttccgcccagataaacgcgaaacttcctgttaaaaagaaatgctggaagcagattgtggaatttaagataaaaaatcagggacttgttcttaaaaaatacgatttggattttacaaggcttgttgatttttcaaaatgtgtaaaaagcggtgacccgacgaacatggaaagccaggcggcaaaattttattgggacaatctttttggaaagaaatggtgccgaaatcgttttggagattttccaaataattatttaaattacggatatgcaattttgagagccgcgacggcacgcgcgttggtcggttcaggtcttctacctactttgggaatccaccatcacaacaaatataacgcatattgccttgcggatgatttgatggagccttacagacctttcatcgacgatgcagtcatagaatacatctcgacaaatccagatgaaaaagaacttggactggaattcaaaaagaagattttacaagtccttacgcgcgacgtaaaaatggaaaacttgacaagaccgatgatggtcgccctttcaatgacaagcgcatcgctcgcggacgctctttcaaacgaatctgaaaagttgaaactcccgaattttgtatgatatgagttttgaccggataaacgcctataagataatgtggattttctgtatgtttgatttaccgacaaacacgaagcctcaacgcaaacgagcgagcgaattcagaaaaaacctgttggaagacggttttgaaatgatgcagttcagcgtttacaaaagatgttgcgggagtagagaatcgtgcgaagtccatgaaaatcgaataaaaaaatggctcccgagagaaggaactgtaagcattttgaaatttactgacaaacagttcggtgaaattttgacatttataggcgaaagcccccaaaagaaagaaaaagcaccgcaacaactccaattgttttaatacttaaacttgaaaaagttacagataaaaagaatgggcagcaagtaaaaaaaacaaagaaagatataaaaaaaagataacttttctctattttttttacactgcaaaccaatctaaatctttgcataatatggtcttatacaactcatattattttacatcaaaaatagaaatcaaaccacaacctatggctgaaacttccgatgctctccgacattattttacatcaaaaatagaaatcaaaccacaaccgctggcactggcgccgctaaattggtttcattattttacatcaaaaatagaaatcaaaccacaactgttaagcctcgcactgtcgatagctataaattattttacatcaaaaatagaaatcaaaccacaacatctcaactttcttgctacccgcgaacttgattattttacatcaaaaatagaaatcaaaccacaaccagcgtggcgatgctccaaccgctgatgtattattttacatcaaaaatagaaatcaaaccacaactatacttataaaaataattcgaacgaagccattattttacatcaaaaatagaaatcaaaccacaacaaacatcctcttaataatatcacctttagcattattttacatcaaaaatagaaatcaaaccacaactgttggttctaaccagtttacatctgatgattattttacatcaaaaatagaaatcaaaccacaactcaccgtgtcatacgctttataagcgttggattattttacatcaaaaatagaaatcaaaccacaacaatacgtgtgtgcgcgtttatcgcgcgcgcattattttacatcaaaaatagaaatcaaaccacaacaagatgaagaatcatgagtggatgctcgcgattattttacatcaaaaatagaaatcaaaccacaaccatacaacccaacggggtttatatttttccattattttacatcaaaaatagaaatcaaaccacaacttatcacccccgcgcacttgaacgccatcaattattttacatcaaaaatagaaatcaaaccacaacagccaagtcatgattataatatagcacctcattattttacatcaaaaatagaaatcaaaccacaacccgacgataaaaagc

SEQ ID NO: 3537 - DNA, 12408 bp, synthetic construct
  misc_feature 1..12408: note = Synthetic
  source 1..12408: mol_type = other DNA
ctgaaatccccgatccgctcgtccaccgtcactggttgtccaaatctgtacgtagcgcaaaaatcgttctaaaaggtcatttctttctttttctgacagtatcatacggcatggtctcgcaaatgcagaatccgctggtttgatgagcccctaaagtccagagtcaagtccagcaggtcttcgataaagggtccgtccaccagaacgtcaatgcaggccaacattcttcccgtcacttcgcatcgtttttttccgtcggaggcttgcaagtctttttcgtagacgtagccggtgtagcaccagatgtctttttgaggataggttgcccgtactttttccagaaaaggggtcagtacgcgctgattttcttcttcaaagggttctccgcccagaatcgtaaggcctgcaatgtagtctggagcgagggcatccaaaatttccttttcggtttctggtgtgaactgctttccaaagttgaaatcccaagtctctggattctggcagcccttacagtgattcctgcagccagagacaaagagagagacacggacaccaagcccgtcagcaatgtcgaatttcttgattgcgccgtaatacatagttcctacaggtgcaagacgcgttccttgatttcctgggtgcgtccttgattccagaactgagtgccgatgtaaccgcaggtgcggcgggcaacattcagcgtgctctggtcacggtttccgcaggagggacattcccacaccagtttgttgtcgctgtcggtgacaatctggatttcgccagtgtagccgcacttctggcagcagtcactcttggtgttcagttctgcgtacatgatgttttcgtagatgtgcttgagcagggccatgactgccggaatgttgttttccatgttgggcacttcaacgtagctgacggcaccgcccggagacagtttctggaactgagactcaaaggtgagcttgctgaatgcgtcaatgttttcggtaacatggacatggtaactgttggtgatgtagttcttgtctgttacgcctggaatctcgccaaagcggctcttgaggcacttggcaaatttgtaggtagtgctttcaaggggagtgccgtaaagtgagaaatcaatgttttctttttccttccagaccttgcatgcggcattgagcttgtgcatgatttccagggcaaagggggtggcttcggggtcagtgtgaggcttgcccgtcatgtagcgcacacattcgcagagacctgcatagccgagagaaatggttgagtagccgccaaagagcagtttgtcgattttttcgccttttttgaggcgggcaattgcgccgttctgccacagaatgggtgccacgtcagaaagagtgcccataaggcggttgtggcggaccatcagtgcgcggtagcagaggtcaagacgctgctccatgatttcccagaaggcttccttgtcgccgccagaagagcatgctacgtccaccagattaatcgttacgacaccctgattaaagcggccgtagtattttggctgaccgttttcgtcaatgtagggagtgaggaatgagcgacaacccatgcaggggtagcagcgaccagttccagtcttgtccactttgagttccagcatcatcttttctgagatgtagtcgggaaccagacggcgggcggtacactttgccgcaagttcagtgaggtagtaatactttgagtccttttcgatgttgtccggttcaagcacgtaaatgagcttgggaaaggcgggggaaacccagtagcctttttcgttccgcacgcccttgtgacgctgcttgaggacttcttcgataatcatggccaggtcggctttttcctgctcgttctttgcttcgttcaagtacatgaaaaccgtaacaaagggagcctgtccgttggttgtcatcagcgtgaccacctgatactgaatggtctgtacgccacgggtgatttcatcacgcagacgcatgtccacgattgcctttgcctgttcctcagtgtattttacgccggtacgctcctcaacgtccttgatttcgcggatgaatttctggcggcttacgtctacaaagggagcaagatgagccagggatacgctctgcccaccgtactggctggatgctacctgagcgataatctgagtggctatgttgcatgccgttgagaaagagtgggggcggtcaatctttgtctcactgatgaccgtgccgttctgcagcatgtcctcaaggtttacaaggtcgcagttgtgcatgtgctgggcaaaatagtcagcatcatggaagtgaatcagtccttcatcgtgagcctttacaatatcctcatccaaaagaaaacgtttggtgatgtccttggaaacttcgccagccatgtagtcacgctgtacggaaacaacgatgggattcttgttggaattttcctgcttgacttcctcattgttgcattccaaaaggctcataatctgcttgtcagtagaatttgccttgcgcatgagttggtgctgatagcggtaggtgatgtaaatttttgcaaggtcgaaggcacctgctttcatcagttctttttccaccatgtcctgaatcatttctacgttcatttcatggttgcttttgctgcattcgttttcaatgtgttctgctatttcgcggatttttaaaatgtccagtcggccgcctcttggaacttcatcgttgtgatttgcgttcagaatagccgtgatgattttttcgcgatcgaaaattgcttcttcgccattgcgtttgataatcttcatatcccataccctaaagaaaaatagacactagatgtagtgtccttgtgaattaaatcatactagagatagcgtttttgggcaatatgatttgattaaaaaaaataggaaaaaagcgaagttattttgccccttaccgaccaatgattttgtccatcaccatgaagacgagggtagtggcaagtcccatgcagccgattgccacggaactcatggcaccgtagacttcgccgatttccagagcagttgccgtgccgatggcgtgacttgaggtgccgattgcaatgcccgctgcctcaggatgcttgacgtgaaagagccggatcagcttgggagcaaagatgccgcctgtaaagccagagcagatgacgctaatcatggtgatgggaagaataccgccaaagtcccggctcagactgagggcgatgggcgtggtgacggattttggcagcatggaattgaccacctgcatgtctatccgcaagagtttgcccagaaggaagaccgttgccaccgatgccacggctcccccacaggttcccgcaatgaccgggataaggttttccatgaggactttgcgctgattgtacatggcgatagccagcactgccgttactggtgccagaaaactcatcagaatgtcgccgccctttttgtaggcggggtagggaatgcccgtagccttgagcagcaggatgatgagaatggtggcgactaaaagggggttcatgataatcagttttgttttttcccgcacaatcagaccgactttgtaggcaaggatggaaagcacaatgccaaaaaagggcgtgtcgatacatgcggcatatacatggtagagtaaatctttcattctgcgtcaccttctctgcttgatacttctgcggatgtctcttgctgcacaggcggaatcttttttttgcggatggcgttttgaatttcaatggcaagggttgccgctcccgctgccgccgcaaatgtgaccacagcacttgcaactccgataaagagcagttgcagccagagttttgagatgagtccgaattcttccatgatggaaatgtttgcgggcaaaaagaaaaaggccatgttgtgctgaaaccaagtgcctgtgggcgcaagctgctccgttttgatgaccttggtgcataaaagcagaagcaggatgagcatggcacaaatactgcccggaaatacgatgggaagcatggcagaaatgccctctcccacaaggcagatgccaaaaatgagtgcaagttgcaggagaacggtcatttatttttgcgccttgtcggtttttgcaatttccgccagggaagcgactacgcccgcaagattctgaaagtctgccggaacgataatctttgttgcctgaccgtttgcggctttttccagggcttcaaggctgcgcagtttaatcacgctttcgtctgcggcggcttccttaatcatgcgcaggccgtctgccgttgccttctgcacttcctggattgcctgcgcctcaccttcagccttgcggatttttgcttctttttctgcctcagcctgtagaattgccgcctgtttctgggcttctgcctcaagaatcttagcctgtttttgtccctcggctacgaggatttctgactgcttctgaccttccgctacgagaattttttcacgccgttcccgctctgctcgcatctgcttttccatggcttcgcggattgcctctggcggcatgatgttctttacttccacgcggttcaccttgattccccaagggtcggtggcttcgtccagaatggagcgcatcttagtgttgattacgtcgcggcttgtgagcgtggcatccagttccagttcgccgatgatgttgcgcagggtagtcgccgtgagcgtttcgattgccgtcatgggattttccacgccgtaggtgtagagcttggggtcggtaatctgcatgtagactacggtgtcaatcttcatcgttacattgtcttttgtgatgaccggttggggcggaaagtccagaactttttctttgagcgagacgtgatttgcaatcctgtccaaaaacggcatcttgacgtgcagacccgtctgccaggtagcaacataggtgcccagacgctcaatgataaaggcatgagactgaggcacgatacggatattcgtgataatcagcagaattgcgataaaaatcaacgcgatgatgacatacatatgcatagtttactcctatattttctttacgacaagcgtaacgccttcaatttctgagaccctgcattcagaaccttttgcaatttccgaattgtcttcgctgcgggcagaccagatgacaccgtttaccttgacggcacctttttccagttccgtgattttttccgttaccagaactttctttccaatcaggctgtcactgttggtgggtgtttttttgacccttagttttttgaccgcaagggggcgggtaaaaatcaagagcagcagcgacagcaccgcaaaaatcaatagttgccagcggaaaggaatgggtaggaaagaaaggaaaatcatcacaaaggcaccgcagccaaaccaaatggacgtgagcgtacccatcgaaattccttcaattatgatgcaggcaaccgttaccgcgagccagaaccagggcaggttgtttatgacgagcattgaaaatgaatccatttagacacccccatttttgttatcgttgcacatgacaatcgccgcaatggctcccggtacccagccgcacaaagtaagcagcgtgacaagaacgattgacccgcaccccttgtccagtaccgcaagcggcggaaagattatgcataaaaggacacgaccacaacccatagaattctcccataaaacttcttttagtatagtatagcacggaatgcagggaatagggagactacgactcctatttttgaaaaaaaactgccttttcagaaacagtcacccgaaatcaaatgggggtgtcgcattatttgagacagtggtgtggtaggataaagatatcacttttgggaaaagcgtggtataataaaaatgccccacggagtacgcggggcgatagtcaaatgacttcggcacatggccttattgtgatttgatttctgaatttatactagcatgatttttattttgcgacaagtaagaaggagcaattttgatgaaaactttgggacttgacattggaacaaactctattggctggggacttgttgacgagcatgctcagaaaatcgaaaaatgcggcgtatatatttttccggaaggcgtaaaaaaagaaaaaggaaatgaatcttctaaagcagccgaaagaacttctttccgttctgccagaagattaaagttccgcagaaaactccgcaagtatgaaacgctaaaagttttggttaaaaacgaaatgtgcccgctttcaatggaagaactggaaaagtggcattgtaaaaaagaatatccgacttcaaaggcatttatcgactggtacagaacagatgagaccaataactgggaaccatattttttgcgaaaaaaatgcgtggaagaaaaatgcgaaaagtttgaaatcggccgtgctttatatcatattgcacagcgcaggggatttttgacaaatagaaaagactattccgaagaatccgaaaatgcagaaacgaaaggcataaaaggacaaataaatgaactgactgcattaaaaggcgacaaaacgctggggcagtatttttatgagctgaagcagtctggcgaaaaagttcgcggtcgttatacatcacgaaaagaacattacgaagaagaattcaataaaatctgtgaagtacaagggatagccgattcttttaaaactgatttgcacaatgcaattttcttccagcgcaagttgaagtcgcagaaattccttgtaggaaaatgcactcttgagactgacaagccacgctgccccatttcccattttgaatttgaagaattcagaatgttgtccttgataaacagcattcgcataaatcgcaagtcaaacaatgacaatgagccaagtcttttttcagatttagattttggcgaacactatcctgacgacggaaaacttacgaaagaagaaatagaatcgattgtgccgctttttttcagaagttctaagctgaattttgactttaaagacatatccaaaaaactcaaaaaagatgatgaatggactttcaattatcgtgatgatacaaatgtggctggctgtcctgtttcaactgcattgaaaaacatttttggagacgactggaagaacataaaaattccgaatgatgattccagctcaaataaaaagtattatgatatttacgacatctggcatgtgctttttgattttgatgatgaccagaagcttcacgaatttgcgttgaacaaacttcatcttgattcagaaaaaactgaaaaattctgcaagattcactttcagcagggctatgcgaatttgagcctcaaggcaatacggaaaattcttccattcctgcgaaagggatatgtttattctcatgcggctttccttgccaatataccgacaatgatagggcaaagtgtgtacgatgctcatgcaaaggaaattgaaaatgcggttgaaaatgtactttcttccctcaaagacaaaaacaatgtgattacgcttgcaaatcgttgtatcgaagctgttttcaaagatgaaaatcacgattttcattcagaggaatgggacaagacgatttttgatagtcaggttgcggatttgttcggaaaaagaaaatggtcagagaagccgctttcggagcaaaagcagatccgtgatgaagtgatttccaaagtcgaagatacgcttaaaattgtgacaacaaagacccccaatgactacaagtacaaagcgctcagaacagatgatttgataatggaatatctttcggcacagggatttgaaataaagaaaaacgcaaagctttatcatccgtcagaaatgggaaaaccagaccctcaacaaggagaagacggcaaactgtatctcggctctccaagaacgccaagcgtaaagaatcctgttgcgatgagggctcttcatcagctaagaaaattgataaattatctcattaagataggtgaggttgattctgatacgcgcgtccatgtggaacttgccaacgaagtgaacgacaaaaactggcgcaaggcaattgaggaattccaaaaagacaacgagaagaaaaacgcagaatacaaggctcgaatcattgaactttgcaaagaatgtggctttgacattgttcccaccgatgacgacattaaaaaatatcggctttggaaagagcagaatgaaatgtgcccttacactggaaaaaaaatcaatattaccgatttgtttggccctaatccgaagtttgactttgagcacactattccaagaagcctttcttatgatgactctcttgaaaaccttactctgtgtgattctgactttaaccgcaatgtgaaaaagcagcatattccatcagaacttgcgaattatgaggaaataagtaaacgctttggaaagttctatgaaacaaagattgatgaatgtctttctgccattgagcgcaacataacccgcggtggttacattgacccaagcgtaaaagatatgcggattgtaaagcggcacaaagcccaactggagcttgattattataaaggaaagttgcggcgcttcaccgcaaaagaagtaacatctggctttaaacacagtcagttgaatgacactagaatcattacaaagtttgcattgaactatctgcgttcagtcttccagtacacatacccggtaaaaggctcaatgacagatacttttaagcgtcagtggggcttattggacagagcagaaagcaaggaccgctcgaattaccgccatcatgctgttgatgcccttaccattgcctgtgtagacagaagaaaatttaatcttctttcggaggcaatcagagccagcacggacggaacgcatttaaaatttgcaaagccatgggagagttttgacaaagatgttttgaatgcggtgcaatatatcattccaaagcattttgttgatgataattccttaaggcagagtaagaaagttttgcgtgacagagacggcaagccgagactggataaaaacggaaacaaaatctatatcaaaggagatactgtccgcggttccttgcataaagacaccttctacggtcgtattatgacaccgccagaaaagggtgttgagcctcagaagatttttgtgcagagggttgagacaaagtctcttgttatagagaataataagctttgcaaaaatatatctaccataatcgaaaagaacagtgataaaattattgataaaggtatccaaaagacctttattgaaaatctaaaatcagggaagcaaactccagaagatatttttgagaaaggaatattgttgccatacaaactcaacggaaaagactcttatgtaaagcgggttcgggtgatggcacgaacaacatctccaattattttaaagcaacatcataatgtaattgacaaaaatccaaaggattacaaacagaattattatgttgtaaatgatgaaaattatctgattgcactttaccggggtaaggatgcaaaagggaaagatactgcctgcagcctgactctaaatttgcttgatgcaataaaagcaaaaaacagcggaaatgagctttatccagataataaaaacggaatggatttatataaagttcttaaaataggcaggattgttattcttcaagataattatgatgaagatatatggtctttgtcttatgagcaggtatggaaaaggatgttcagagttgcaggacttggtaaatctggaaacagagtatttatttgtcttgctcacattactcaaagcggtgcctggcagtatattcctggaaaatttgacttaaatacttttatagagtctcgtcgttatcaagacaatcaatttatcggtctcgtcgaaggtgaagatttttccatctccccggcaggcgaaattataaaaaaataagctacagtatccaaaaatggtacaaatcgtaagtttaacttgcgatttgtaccattttgccttataattcagttatgaatgatgtaagacgacttgctgaaaacgaattacagcgatgtgcagaccattttcccgttgttacagtgctgggaccgcgccagtctggaaaaacgactcttgtaaaatcatattttaaaaactattcatacatcaatcttgaagacccggaattttacgaccttgcaaaaaatgatgtaaatgcattctttagcatgataaaaggacctgttattttagatgaagttcagcgcattccagaactcttggataaaattcaagtaatcgttgatgaaagaaaagaaaatgcgcaatttattctgacaggaagttttcagcagggcttaaaatcggcaatttcacaatcccttgccggaagaactgcaatcatcaatcttcttcctttttccattcaggaattaaattctgtaggtattgatttttcaaaagatgaatttttataccagggctttatgccccgcctttattcagaaggtcagcctgcggatttgctttaccgctcatattttcaaacttatgttgagcgcgatgtgcagactcttttgaacgtaaagaataaggctctgtttgaaaaattccttcatattcttgcaggacggattggacaggttgttaattatgaatcccttgccaatgatacaggagtttctaaaacaacagtggaacagtggatttctgttttggaatcatcctttattatttttaagcttgagccttattttgaaaattacacaaagcgtcttataaaatcaccaaagatttatttttatgagactggtcttgcttcatatcttttaggaatcaaaaatcctgaccaaatttccagagacccccttgtgggaaatctttttgaaaacatggtcatagtggaaatcttgaaaagtcagttcaataaggggatggaaaaaagcctatattattttcgcgacagcaagggctttgaaattgatttgataattgccgacggaagaaaaataattcctgttgaaataaaatctgcgtcaacttacaacagggatttttctaaaaacctgaagaaaatctgctcgtttgctccaaatgctttttctccgactgtcatttacagcggcaatctggagattgaatcggaagaagtgaaatatattaatttcaaaaactgtggaaatctgattgtttagccgataatcagaacgtgattaaacgaacgctgtttttttcaaatgctgtttgtttaactctacgaaacaagcagcttcttattcagaataaagaaactcacgaagaatcttcagttcctgtcgaagatattggctttgtcatcatcgaaaataatcaagtctatgtttccgttcccgtcataaatgctcttgccgaaaacaatgccgcggtcgtattctgcaatgaaaaacatctgcctttttccatgaatcttccattggattgcaacacgatacaaaatcagctttttacagctcaaattgaagccaaacttcctgtaaaaaaacaatgctggcaacaaattatcgagcagaaaatcaaaaatcaggctcttgtcttggaaaaatacaaaatcgactctatcaaattaaaagaatacgcaaatgaagtaaaaagtggtgactcgacgaatcgtgaggcgatggctgcaaaattgtattgggatttactgattgatgtcgattgggtgcgaagtcgttttggcgattatccgaacaattttttgaactacggttatgccattctccgtgcggctatggcacgggctttggtcggttcagggcttcttccgacttttggaatccatcatcacaataaatacgatgcctacgttcttgctgatgatatgatggaaccgtatcgtccttttgttgatgatgaggttcttgcttacataaaagaaaatcctgagcaggacgagattactactgattttaagaagaaaattctgaatattcttacacgggatgtgctgataggaaaggtaacgcgaccatttatgattgcgctgactatgacgagtgcttcattggcgaaaatctttgttggtggtgaaaaatctctttctttaccggtttttgtgtaatgagttttgaaaggtttaacgcttataagattatgtggttgttctgtttgtttgatttgccgacgaatacgaaaaagcagcggaaagttgcttccgaattcagaaaaaaattaatagaagacggttttgatatgatgcaattcagcgtatacaagcgattttgcggtagttcggaagcatgtgatgttcattctaaacgaatacgacagtggcttccaaaggaaggaatggtaagtattttaaagttcacagataaacagtttggcgatattgagacttttataggtgttattcctcgcgaaaaagaaaaagttccgcaacagcttgagtttttttagagaaaaacggggaaagcatcagaaaaatccaatgttttccccgtttttattcaggtgaaaaaggtgtaagtctttgtataatatggtcttatgagactca

SEQ ID NO: 3538 - DNA, 7464 bp, synthetic construct
  source 1..7464: mol_type = other DNA
  misc_feature 1..7464: note = Synthetic
tgacctaaatccaatcgagaaattctgggcgaacctcaagcgctacgtcaggaacaatgtcctcaaatacaagacactggaggagtgtgttttgtcttatttttcaagttaattgactatataacgcgctttatttttagacctatcaaaaatccatcctgcagaacatcattgacaaggccgactgtggaagcaccagccttataggtaaacttgaatccgacggaggcatcaagcagaaaattctttgggagcgagaacttgtatcctatgccgctgtaagtggtaaggttcatgccgtcaggattcttttcaaagtagtcgtccttctttttgtcagtgtcaaaatagctgatgtaatcgaatccggttcctacatcaaaatacaggccgcgaagctcttggctcaaaggataccacacactgtgaatttccagtgttatcgatgtgcagtaaaagtcatgccagccagaattaaatgttgcatgaccgaaatagcctttttcagcaaaatgcggcacaatctgacgttcatattgcactccaagcccaatgccaccgtgctgaagaccacggagcagaatgccgcagtcaactgagaaaaggctctttagaacaggtcgttcttcgctcgaatctgtacagaatgcaagggaacaacccaagcacagcattgcaatgatgaggatgcttcgaagtctttttctaactgcccatttcataaacgcccttgcaaactccattctgtcatcatatcagattcaaaatgaaaatgccatattatttttgtacttaaagggcagtataaaaaagcaatcatcgtatgagaggaaatgattcaaatgtaccttccagtaacgctttccttgcaagagcggattgtttcaggagtgccgcatgcaacaatttgtcctccatcttttcctcctccgggtcccatgtcaacgatatagtctgcggtgcggataacgtccaagtcatgctcaatgacaatcaccgtggctcctttttcaatgaggtgacggaaaactgaaagcaacgtaatgacatccaacggatgcaagccgatagttggttcatcgaacacaaaaatggtgttgtcctgaccgcgccccatttcacttgcaagtttgagccgctgtgcttcacctccagaaagtccaggtgtttcttcgcccaacgtgaggtagcctaagcctatgtcgtgaagcacttgaagtctggtgcgtacaaggggaaggtctgaacattcctcgattgcttcgtctacgctctgttccataagggatggtagtgaaatgcctgtgttggttaccctatctttcttttttcgtagcactctgaatgcttctttgccatagcgagatcctcggcaatctggacagggaatgtctacgtcaggcaaaaactgaacgtcaagacttattttgcctgtcccgtcacaggtaggacaacgaagcgaacctgtgttgtacgaaaagtctcctgccttaaatcctttttcctttgcaagcggtgcatgtgcatagattttccgaagctcatcatgtatgtttgcataggttgccaccgtggagcggatatttattccgataggggttgcgtcaatcagtttgatttgagaaattccttctgcatggatttctttgacatgggaaggaagctgttttccatcaagctgtgcctgaagggcaggaatcaaactttccagaatcatcgtggttttgccgctccctgacactcccgtcacgacagaaaggcgacctttgggaaagcatacggaaagtggatgaacggtgtgaatggtgttggtttgcatggaaatggagccgagtgaaaaaaggttgtcagatgaagcatgtgttgtcatgggaaatagtatatcataaaagacacatttgttcattagtacaaggcaaccttggttttacgtcgagtttttcactgtaaattatttttctgtcaaagtttaaattccatggtataataaaaattgaccccacggagtacgcagggtcgtagtcaaatgacttcggcatatagccttattgtgatttgatttctaaaaagaatataacatggttttgttaatattgcaagtctcaggagcaatttttatatgaaagtattaggtcttgacatcggaacaaattctatcggctggggaatcgttgacgaacgaaatcaaaaaatagaaaaatgcggtgtatatatttttcctgaaggtgtaaaaaaagaaaagagaaatgaaagttcaaaggcggcagaaagaacatcttttcgttcgtctcgcagaataaaattccgtcgcaaacttcgaaaatatgaaaccttaaaagttttaattcagaacagtatgtgcccactttcatttgaagaattggaaaaatggcacaaggaaaaaatctatccagtatcaaaggaatttgtaaaatggtataggactgatgaaagttcaaactgggaaccgtattttttgcgaaaaaaatgcgtggaagaaaaatgtgagaaatttgaaataggccgtgctttatatcatattgcacagcgcaggggatttttgagtaatcgaaaagaatccacagaagcagtagacggaaaggtaaacgagggaatctctgaactttcacaggcaaagggcggaaaaacgcttgggcaatatttttatgagttgaagcagtctggcgaaaaagttcgtggtcgctatacatcacgaaaagagcactatgaagaagagttcaataaaatctgcgaagttcaagaaatttcagattcattaaaaactgatttgtataatgcgattttctttcagcgcaagttgaagtcgcagaaatttcttgtaggaaaatgcactcttgagacagataagccacgctgccccatttctcattttgaatttgaagaattcagaatgttgtcctttataaacagcattcgcataaatcgcaagtccgacaatgacaatgagccaagtcttttttcagattttgattttggcgaacactatcctgaagacggaaaacttacgaaagaagaaatagaatcgattgtgccacttttcttcagaagttccaagccgaattttgactttaaagatatatccaaaaaactcaaaaaagatgatgaatggattttcaattatcgagatgatacaaatgtcgccggatgccctgtttcaactgcattgaaaaacatttttggagacgagtggaagaatacaaaaatagacaactacgatatttacgacatctggcatgtgctttttgattttgatgatgaccagaagcttcacgaatttgcgttgaacaaacttcatcttgattcagaagaaactggaaaattctgcaagattcactttcagcagggctatgcgaatttaagcctcaaggcaataagaaaaatccttcctttcctgcgaaagggatatgtgtattctcatgccgttttccttgcaaacataccgacaatgataggtcaaagtgtgtacgatgctcatgcaaaggaaattgaaagcgcggttgaaaatgtactttcttccctcaaagacaaaaacaatgtgattacgcttgcaaatcgttgtatcgaagctgttttcaaagatgaaaatcacgattttcattcagaggaatgggacaggacgatttttgatagtcaggctgcggatttgttcggaaaaagaaaatggtcagagaagccgctttcggagcaaaagcagattcgtgatgaagtgatttccaaagtcgaagatacgcttaaaattgcgacaacgaagaatcccaatgactacaagtataaagcacacagaacagatgatttgataatggaatatcttttggcacagggctttgaaataaagaaaaacgcaaagctttatcatccgtcagaaatgggaaaaccagaccctcaacaaggagatgacggcaaactgtatctcggctctccaagaacgccaagcgtaaagaatcctgttgcgatgagggctcttcatcagctaagaaaattgataaattatctcattaagataggtgaaattgattctgacacgtgcgtccatgtggagcttgccaacgaagtgaacgacaagaactggcgcaaggcgattgaggaattccaaaaagacaacgagaagaaaaacgcagaatacaaggctcgaatcattgaactttgcaaagaatatggctttgacattgttcccaccgatgacgacattaaaaaatatcggctttatgaggaacaaaaaattggtggggtttcaatgtgcccttatactggtaagactataaatattaccgatttgtttggccctaatccgaagtttgattttgagcacaccattccaagaagcctttcttatgatgactctcttgaaaacctaactctgtgtgattctgactttaaccgcaatgtgaaaaagcagcatattccttctgaacttgcgaattacgatgaaattgcaagacggtttaacaagttttatgaagaaaaaataaacaatctattgtttgaaaaaaacaaaaagttttttggaaccacaaaggagcaaaaagataaattcctcgtaagacgccacaaagctcagcttgagcttgattattataaaggaaagctgcggcgcttcaccgcaaaagaagtaacatctggctttaaacacagtcagttgaatgacactagaatcattacaaagtttgcattgaactatctgcgttcagtcttccagcatacatacccggtaaaaggctctatgacagatacttttaagcgtcagtggggattgcttgaccgggcagaaagcaaggaccgctcgaattaccgccatcatgctgttgatgcccttaccattgcctgtgtagacagaagcaaattcaatctgctgtctgaagcaatcagagccagcgcagacggaacgcatttaaaatttgcaaagccttgggaaaactttgacaaagatgttttgaatgcggtgcaatatatcattccaaagcattttgttgatgacaactctctgcggcagagtaagaaagttttgcgcgacagagacggcaagccgagactggataaaaacggaaacaaaatctatatccaaggaaacaccgcccgcggttccttgcataaagatactttctacggctgcataatgacaccgccaggaaaatggggtgaatcgcatcagatttatgtgcagaggatttcttgcgatactcttacaaaagattcagcagataaaatcattgatggcggaattcgcgcaacctttttgaacaatcttgatagcggaaaacaaagccttgccgacattcaggaaagaggaattctcttgccgtatcaaatgaatggaaaagatgtgtatgtaaagcgagttagaatccaagcaaaagatgtaaaagatccaatcaaattaaaacctcacaacaatatttttaaagataatgcaaaagactataaacagttttattatgttaaaaatgatgaaaactatttgattgcgctttacagaggtaaggatgagaagggaaaagatttaagtggttatgatgtttctaatttgcttgattctgtgaaaagtaaaaagaaaagggaagagccttatcgaaaggaaattgaaaaaaaaagaacaaaattatctctatacaaagttttaaaaaacggaaaaattgtaattttacaaaatactaaagatgaaaatgtgcttaatttagctccaaatgaattgttttcccgtctatatagggtttcaacaattgaaagtgatggacgagttacattcactcatcttttggtcgctgatgcgaaaaatcctcaaaataagaatgaatacattgataagaacattgcaaagtataagcgtgtttcgcattctagtatttattgtctcgttgaaggtaccgacttcaccatctccccagcaggcgaaatcataagaattccgcaaaaataggagaattccgaagatagtcacgcatacaaatgctaattttgttaaaatcactctcaaatctggacaaatccacttttcaaaagtggatttgtccattattatataactgtggtaaacagaaaaattgcaaatcagctaaattctcttctttcaatgtatccgattgtaaccataacaggtccgcgtcagtctggaaaaacaactcttgcaagaatgttgctccccgactggcaatatgtttcactggaagaccctgagataagggaattttgtatcagcgactgcaagggctttttaaaaacatttccaaacgatacaataattgacgaggctcagagagttcccccacttttttcctaccttcaaacacatgtagaccttgcaggagaaaaaggcatgtatgtacttacaggttcccaaaacctgaacatgatggaagcaatttcacaatccttggctggccgcacatcaatattaaaattacttcctttctcctatgaagaacagaaagaagctggaattctaccaaataatgtggaagaacaaatatttactggcggctatccgcgcatttttgacgcacatattccaccacagcagttctaccgcgactacataaacctgtatgtagagcgtgatgtaagacagcttaagaacatcggaaatctggaaacttttacaaggtttgtaaagctatgtgcaggaagaatcggtcagttgctcaactatcagaacctggctgatgactgcggaatcggagcaaccacggcaaaagagtggatttctcttttggaaacaagttttatcatctatctcctaaagcctgactacagaaactatacaaagcgtcttgtaaaaagcccaaaactctattttaccgacacaggacttgcctgctctttgctggaaattcagaatgcagaacaactcaaatcccactatatgcgtggcaatctctttgaaaatcttgccataaacagatttagggcagcaagctataataatggaaaggagccaaacctttccttctggcgtgacaaaaacggcatggagattgacttaataacaaacaccattctgcaagacggaaaagagcagcccattgcatgggaaataaaggcaggtgctacatattcgactgattacttcaaaaaccttaagtactgggtaatgctagccaatacaagtaaagagttttgcaaggttatttataccggagataccaatattcaaacacaatttggcgacttgttgtcatggaatcattctttatcttaacgaatgtgtgccgacaaaggccatggaatttaaaacctgtggaaatctgattgtttagccgataatcagaatgtgattaaacgaacgctgtttttttcaaatgctgtttgtttaactctacgaaacaagcagcttcttatccagaataaagaaactcacgaagaatcttctgttcctgtcgaagatattggttttgtcatcatcgaaaataatcaagtctatgtttccgttcccgtcataaatgctcttgc

SEQ ID NO: 3539 - DNA, 6878 bp, synthetic construct
  misc_feature 1..6878: note = Synthetic
  source 1..6878: mol_type = other DNA
ttttattatgttaatgggaacggtaaaacaggagttatatgtttctttgctgttaagcggtatcgacggctttatacttaccgtccccattcttgcagcatataccatagtgtcccgtattcccgagttgaataccgcatgtacggaaccccttacagctgccgatgttattcggtactcagtgattatgattgcttgtgtcattttaagaatagtaatgcgctactacgtgcaacgcttacgctccggagcgggatataaagttatgtgtaaagaacggaaaatactgggaaaggaattacgttccgttccgatgggcttttttaacgaaaagaatctcggcgacttggtttctaccgtaacatccgatgcagcctttatcgaaattgaaggtgccggtgttctggaaaaagcggcggtcggccttccttcatttattatcggcttgggtattctactgtatatggattacaggattttctttgcaacgcttttattgttgattccggtatggttttcgtataaacattttgcctcattacaggacaggctcggtattaaccgccaacagtttatcggaagcgttaccgaagatgccgtagaattcattaaggggctgcatgtacttaaaacctgcaatatggcggaaaagcaattctttaaaacacaaaacgcctttaagcgcttacaggaattttcatttaatgcggaattggtacatattaaagcgggaactgtttttcaattttgcttccgtttagttacggcggcaatcgttattctctccgcattttttgtattgcgcggggaaaactcttttcctaaagcctttttgctcatgatttcatctttcagtctttttgcaggagcggaaacaatgggtattttcagcgtttttgcaaaaatgactcaacagtccatcgacagaatcaatcaaattaaaaccattaccaaaatgcaggacatgagcggtcggcaaacgcttagccgctttgatattcaatttaaagacgtaacgtttgcttacgaaacaaagcccgtactgaaacatatcgattttaccgttaaagaaaacacactgaccgcccttgtcggtctttcaggcagcggtaaaacaaccgttactaatcttattgcacgcttttgggatatacgcgaaggagaaattcttatcggcggtaaaaaaataaaagagctttcgtatgaaaatcttcttaaaaatatcggttttgtgtttcaagatgtgtttttatttgatgacacggtgatgaataatatccgcatcgggcggcctgaggcaagcgccgaagaagtctatcaagcggcatacagagcaggctgtaccggttttatcgaaaaaatggaaaagagatatgacacggtaataggtgaagcgggggtaaaactttcaggcggagaaaaacagcggctttccattgcacgtgcacttataaaaaacacaccgattgtactcttagatgaagttaccgccaatgtcgatgccgataacgaggtgcatattcaaaaagcgctgcaagaactgttaaaagaccgtaccgtcattatgattgcacataaactttcatcaattcaacatgcagatcaagttctcgtctttgaatcgggcagcattattcagcgcggtactcatgccgagcttatcggcaaagacggcttatacaaacggctctgggatatgcaataccgtaccgcttcatggcatgtatagtatgggtgttgcggcagcggttttaaatcctgattgtttttcgctttctccccctgtgcggaaattgccgcacagggggattttccggcaggttttttaaaaacctgccggaacttttaatgtgcccaacgcgggtcttacgactgccccgatttttttaagatattcttacatcatcaatgaatatcacttgtagattattcaagtataaaaaacaacctaagttaaagtctaaaagttgcggctatccttaaagtaaaaacattaccgaagccgactgtcccgccgactttattattgccgtcagcaatattcggtttttctatgctgcgtaaaagtcctgaaaaacttatcatatcatgtaagcctacggtaataccgaaatgttttgtaaaaatatattgaactccgagatgcaaggcaatcggtgtccatgcatgataaaaattttccaacacggaaatttttaaggcttttttgcataataataaaaatttcgacttgttttaacgaaatccgttggaaaaaaaagctctgccgacataattttatacaatgttttaattgttttattatttaaatcgcactgtaaataagtgaaaatttaattatatcctttgtacttgcggctgctatgcagtggagcagtctgcatagtatgatgaaaaaacaagtgttacacagatgtgtcatttcgaaaaatttttgcaggtctctttacataagggagaataatatggtaatatacgcttgtttttatacaaaaatataaaatataaagtatagtgtacttattaaatgagagttataataaggcaaaaaaaagctccgcagaagcggagcagtagtcaaaatgacttcggcatatagccttattgtgatttgattttaaaagataatagcatatatttaaaatatatgcaagcggtttggaggatttttatgaaaactttaggacttgatatcggaacaaattccatcggttggggcatcgtagatgaaaaagcggaaaaacctattatagactgcggtgtgtatatttttcctaaaggggtaaaaacaaaaaataaagaagaaatttcaaaagcagcggaaagaacgggctttcgctccgcacgaagattaaaattccgccggaaactgcgtaaatatgaaaccttaaaagtgctgatacaacatggaatgtgcccgctttctttggaagaacttgaagtgtggcgtaaagaaaaaatatatccgtcatcggaagcgtttgtacgctggtaccggacaagcgaggcggaacaatatgagccgtattttttaagaaaaaaatgtgcggagcaaacgtgtacgaaacacgaaataggaagagccctgtatcatattgcacagcggcgcggttttttaagtaatcgtaaagagacgggaaaagaaaccgaaggcggaaaagtaacggatgcaattgacgaactttcaaaggtcatgggagagaaaaccctcgggcaatatttttatgaattgcgcaaaaccggcgatagagtcagaggcaggtacactggaagaaaagaacattatgaaaaagaattttataccatctgcagtgtccagggcttgagcgaggagctcgttaaacagctttatcgggcaattttctaccaacggaaattaaaatcgcaaaaatttttagtcggtacttgcacgtttgagccgaataaaccgcgttgccccgtatctcattttgagtttgaagaatttagaatgctgcaatttataaacagtataaaagtagctaaaaatatagatgaggatgaccggcaggactttgttccgcttacacagattgaaaaagagattattataccgttattttatcgagtaagtaaaacgaaagttaaatttatcgatatagaaaaaaagctgcgcggtaaaaataaaaacgagagttggaagtttaactatcgcagcgattcgaatgtcgaaggctgtcccgtttccgccggattattgcatattttcggtgaaaactggaaagagattaaaatcgataattatgacagctatgctatttggcatgtactttttgattttgatgacagggataaattacgcgagtttgcacaaacaaaactgcatcttgatgaagaaaaagtagaaagttttttaaaaataccaatccatcaaggatatgcaaacttgagtttgaaggcaatcaaaaagattttaccgtttttgcgggaaggtatgctgtattctcatgccgtatttatggcaaatattcctaccataattgggaaaaaggcttttgaagaggataaaacaaaaattatagcagggtttgaaaacattattaaagctacgccggagaaaaaccgtgaaattgatttggttaatagttgcatcgacaggatatttaaagataaaacccgcgatttcaggtcggagcaatggaaccgagcaatacttgaagagcaaatagcggatatgtacgaaaaaaaatattgggaaaagaagccccaagcggagcagcaggaaatcagacggaatgcggcggagaaaatcgacgatgcccttcgtattgccagaacaaaccgtgcaaatagctataaatattcgcatttaaagacagttaagctattagaagaatatctagagcagggatatacattacatacgaaaaaaaagctgtatcacccttcggatcccgaatttgaaactctgaagaaagcggaagacggtaaaatatatcttgcttcaccgcgtaccaaaagtgtaaaaaatcccgttgcaatgcgcgcattatttcagttaagaaagcttatcaaccatttgataaaaaccggtgcgattgacagatcgacaaaggtagtaattgagcttgcaaatgaggtcaacgataaaaatatgcgggcggcgattgcccgtttccaaaaagaaaatgaaacgaaaaatgcaaaatacaagcaagcgattattgaaacggccgcagagcacggatttaccattgaaccgaccgacaaagatattaaaaagtatcggctgtggaaagaacaaaaagaagaatgtccttataccggaaagaaaataagttttacggatttattcggttcaatgccgcagtttgattttgaacatacggtgccgagaagcctgtctttcgatgattcgcttgaaaatctgaccttatgcgatgttcattttaaccgtaatgtaaaaaaacaacagctaccttcgcagcttgcaggaaaagaggatattatcaaacggataaaaggatattacggagaaaaaattgaccaatgccgtgcggcgattgagcgaaataaaccctgcggcgcatacatagatccttccaaaaaagatgctatgattgtgcgacgccatatggcaatgaaagaattacactattacgaacaaaaactgaaacgttttaccttagaagagataccttcagaatttaagaacagtcaattaaacgatacgcggctgataacgaaatgtgcgcttaagtatttaaagagagtatttcccaatatttatccggtaaacggttttgcaacggatctttttaaacgtcagtggggacttttggaaagaaacgaggcaaaagatcgctcttatcaccgccatcatacgattgacgcactgactatcgcttgcataagcagaggaaagtacgccgcactttgtgaagcggtacgaaacagtgccgacggacgtcatcttacatttgcaaaaccctggaaatctttcgatacggatgtacttacggcaaccgagtatttggtaccgaaattttataatgacgataatgccttgcggcaaaccaaaaaagttgtacgggatacccgcagcggaaaacctattttaaaagacgggaaaaagcaatatatacaggggcatacggcacgaggaagtctccatgaagatacgttctatggctgtattatgacacctcccgaaaaagatcgtaaacctaaaaatatatttgtggcgcgggtttcggtcttgaaattaactacaatagataagaaaaagaagaaaacaccggatgaacaaattagagaaaatataggtgaaattattgataaaaagataagaaatatatttctcaaaaattttgaatcgaagatacaaactattgaagagatacagactcaaggacttttgttgccgtataaaataaacggtaggacaacgtatatgaaaaaagttcgtatcaaagtgcaaaaaactaacctgttacaaataaagaagcatcctcaggctgaaaaccgtaaagattataaaaattatttctatgcgggtaatgatgaaaattatctgtttgttctttaccgcggcgtatccgatgacggtaagacggtttcggattaccgtgcagtgaatctgttggatgcggtacatgcggttcagcaaaaaaagaaaatgtatcctgccgagatggccaagaacggtacggtactcaaggtgtataaaactttgaaaaaaggtaaaacggttattttaaaagagagcgaagaagaaaatatatgggaattgcctcatgatgccgtttggaaaaggttatacagaatagctggattagctgttaccggctcaggtatacagataaaactggttcattgctcttgcgcagataaatgggagtatccaaaaggacaaggtagcgtatccgaaatgatgaaattcagatgctataatacacccggaggtcttgtgtgtcttgtagaaggttgtgactttgcgatttcacctgacggaaagataataaagaagtaatgatattataaataattaccgataatcacagtgtgattaaacgaacattatttttttcaaatgctgtttgtttaacggtaaaaaacaaacagcttattattttgaataaacatactcaagaagaagcgtccgttccgatagaggatatcggttttgtagttattgaaaataatcaatcgtatatttcaatccctgttatcaatgagcttacaaagaacaatgccagcgttattttttgtgatgaaaaacacatgcccctgtcgatgagcttattattggacggtaattcggttcaaaatcaaatatttgcagctcaaataaatgcttctcttccggtaaaaaagaattgctggaaaataatcgtctgtcaaaagataaaaaatcaggc

SEQ ID NO: 3540 - DNA, 15974 bp, synthetic construct
  source 1..15974: mol_type = other DNA
  misc_feature 1..15974: note = Synthetic
tcgaaggcaagcgcctggtcgtcatcgacgactcgatcgtgcgcggtaacacgcagcgcgcgctcgtcaagatgctgcgcgaggccggggctgccgaggtgcacatccgcatctcgtccccgccggttgcgtggccgtgcttcttcggtatcgatttcccgacgcgggccgagctcatcgcctcgtccatgagcgtcgagcaggtccgcgaacacctgggcgccgactccctggcctacctgtcgatcgacgggatggtcgcggccaccggacagggcaactccctgtgcctgggctgcttcaccggcgaataccccgagacgatccccgccgggacgcccgtgcccggaacccccgaagccaccccctgctaacctccacgcccgcgacgcaacccctgcgccgcgggcgtcgttctcaacccgaccacccagacacggcctcgtcgagcgccaccttcgaaaggcaccacccatgaccgacactcccctggactacgcgaccgctggcgtcgacaccgctgcgggcgaccgcgccgtcgagctgatgaagagcgcggtggccgccacccacgactccaccgtcctgggcgcgaccggcggattcgccggcatggtcgatgcctcggcgctgctgggcatggagaagccgctgctcgcgacctccaccgacggcgtgggcaccaagatcgcgatcgcgcaggccatggacgtgcacgacacgatcggccaggatttggtcggcatggtcgtcgacgacatcgtcgtgattggcgcgcgccccgtcctgatgaccgactacatcgcctgcgggcacgtggtccccgagcgcatcgccgcgatcgttaccggcatcgcgcgcgcctgcgaggccacgggcacgcccctcatcggcggcgagaccgccgagcaccccggcgtcatggagcccgacgactacgacatcgcgggcgccgcgaccggcgtcgtggacgcctccaagctgctgggccccgagcgcgtgatggacggcgacgtcgtcatcgccatggcgtcctcgggcctgcactccaacggctactcgctggtgcgctccgtcgtctcccgcgttggtgcctcgctggagtcccacgtggccgagttcggccgcaccctcggcgaggaactcctcgagcccacccgcctgtacacgcgcctgtgcctggacctggtcgagcgcttcggcgttgaggggattcacgcctactcgcacgtgaccggcggcggcctggccgcgaacctgtcgcgcgtcctgcctgtcggcgcggtggcgacggttgaccgctcgacgtggaccattcccgccgtgttcgactgggtgcgccgcggcggcgacgtcacctgggtcggcatggaggactccctgaacctgggcgtcggcatggtcgccgtcgtctccgcgtccgtggcctccgaggtcctgtccgcgatcaacgaggccggggtggccgcgtgggtcctcggctccgtcacgtcggccggcgccgacggcacggttgctggtttcggatcggtgtccgacctgagcgcggattcctccggcgtgcgcctcatctccggcacgaagggtgtccaggcgggcgccgtgctgctgcacggcgagtaccgcgtgggctgagcgttgcgtgagctgagctgagcttcgctgaacggcgcgcccgctctgaatgagcgtgaggggtcgaggcctgcgggcctcgaccccttattacgtgcgggcgtgtggatgggcggatgcgcgtgcgaaacctcggtggccctcaataaaccagcggtgatgagaaaacgtgtttcgggcacgccaaagcggcggaccggttctcggtccgccgtgtggctgagccgttacttggtggaggatccacccgtccagaaggactcatcgagctgcttcgggtcgatgtcgtcgtcttctgcgggaatctcggcgaagtcggcgtatttcgagtagaggtcgtcgtcgattgcatcgtcctcttcgggctcgtccgccggcacgtgtgccaggtacgagtcctcatccgccagctcgcgctgaagtgcgtttaggtcggtgtcggggctgaaatacttcagcttccgagcgactttcatctgcttagccttttgacggccgcgccccatggcgtcgaccccctccgcgtcgttcgggtccgcgtaaagcggttccctgggtgttcaaaatgtttcgtgggaccatcatagctaatgacaggccttgacctcaccttggattgggttttgcgcgctcagcggagcgttgcgatgggcgtggatgcccacgaaaccggggaaatagaaccggcgcaaccctcggccggtgtggccggagttacgccggttcgcgtcagttgatgcttacagagccttggtcaggtcggacttgagggcctcgagcgtgcgcgcggcggcctcgtgggcagcgcggcgggcctcgcgacgcgagcgacgcgatgagcgggtcgccagcaggacgatcacgccgatagcgccgaccgcggacagggcgacgatgccgaccttcttgatggcgtcagcgttaccgccggcggcgtcctgcagggtcagcgacgcggactccttgagggacgcgaaacgggccgtggcctcgtccttcgcctcctgggcgagggcggcgggctggacgcgcgcgtacagctggtcgatcgtggcggccagttcggcgcgctggcgctcgaggtcggccgcgatctgggcctccgtgcgcggctcggcgggggtgacggcctcgccgatggtcacgttgcgcggatcgaggttggtgctcacttgcccagtcccttctcgatggcttccttggtggcggcgacggacgcggccgggtcggggcggtgggcctgcgcgctcttgagggagcgggagccgactagggcgaggatcaggacgatcagcaggaggatcgcgacgacgatcagcgacgccgcccacgcggggacgacgagcgcgagcgcgatctcgatggtgtggaagatccatcccagcaggtacagggcgaagaccgcggcgaccaggaggagggcgatgcccttgccgctcttggatgcgaaggcgcgcagcttcgccttgttgagctcgatctcgccgcgaatgatcccggagatctggccggtcacggacgcgaagagggcgccgatgctggggcgggcctcgcctgtggcctgtgcggtgttgacgggcggcggcgggtactgcccgggctggggggtgggctgagtcatggatgctcctgcgcgttcgggtgaacgaggcgatgcctcgcctgatacgccctagtgtctcatgaaggaggtcggctcgcagtgaccgttacgttactcctgcggggcaatcgagcccgggaggtcggagaggatcttgcgtgcgcgcacgaccaggtcggagacctcgggctcggccatggccgggtcctcggcttcgacgacggggatgcctcgctgcgcggtttcggtgcggggttcgggcgaggcctgggggatctcggtcgcctgggttgcttgggcgggcgctgcctccacgcgggtggtcgcggcgtcgagggcggcctcggcggggtcctgcgtagctgcatcctcgggttcggaggccggctgcgcgttcgcggtctgtgccccggcctcgtcggtcgtgccgagggcgtgccacgcgggggccgcggcggcctgggtgggggagatgacctcgtcgaaggaggcgggcagggccgaggggatcgggccgaggagggccttcgggtcctcggggttggcctccagggaggcggcgatgatcgcggcggacgggcccggggcgtcgagggcgacgcggccgttcgtcagcaggattgcgcggtccgaggcggcggcgacctccacggacggggtggcgatgacgaccgcgcagcccgcgttcgcgagggaacgcaggagcggttcgagctcggtgcgggcggccgggggcagggagatggggtcttcgatgaggaagacctcggcgccggacacgatcgcgcgggcgatgagggctttgaagcgctcccattcggagagctcggaggggcgcacgtcgacgcgctgggcgaggcctgtgatctgcagggcgcccacgaggttgtcccagtcggcgacggagcctgtcgcggacaggggcgcgaggatgttctggcggatcgtcagggactcgtcgagcggggagtccgcgcggatcagtgcgaccgagccgatgcggcccgcgaggcgcgccgccagcgagggcgagggtggggggacaatgcgccccgcctgcggctcctcgaggcccgcgaggatcaggaagagggcgcgggcgcggcggcccgtcgggtccaggatcgcgctcagcgtgcgcgcgcggaagcccaggtcgatacccccgaggaggaccgcgccggttacgtggtccgtgtaggtgatgcccaggccggcgacctggacgcggccgccgcggcccttcgcggagaaggaacggcgcgagcggtaccaggggcgaggctcggcgggcggcaggtgcacgggggcggcgacgacgaggtcgttgcgggtggcgctgttggcgttcgttgctgcgctgttggcgggcgtgagctcctgggcgggctggtcgggtgcggcctgcttggtgggcgcggtctcgggtgcgacgtcgctgacggtctccgcggcggtctctgctgctccggcagcgtcggtggcgagcgcggcgggggtggcctcggcctcgtcggttgtgacgaggggggtggaggacacgagggtctcctgcaggtcctgcgtgccgtcgtcggcgagcgtttccgcggtgttgtcggtggtgggggcgtcggcctcgtgggtggtgccgctgaggatctcctcgaacgacgagagggcgctgcgctgggcgggtgcctcgtcggaggtgtgggcgggggtcgaggcggctcgctcggcgccggtgcgcgcggcgtcggccgtcacgtcggccagctcctcgctgtccgagccatgcaggttttcacgcgggtcattcgacatgcccccattgtttcaggatcgcgccccatgtgtcgcagtggcgcgcggaagtgggtggggtggcctcgccgaaaagtcctcgcggatgtggcttgcatctctggaatcggagaggtatgctgtaagcgattgattctcagtaagagccgactcgttagcggctccgaatgctccactgcatcgcagtaacgccgggtccttctccgcgaagggcccggtaattttttaaagcagacacaaatgtatgtgcggtgtgccactatgtgtccatgactaattcctcagaaaacattccgggtatccgctaccgcgtcggcattgacgtcggccttcgttcaatcggcttctgcgcgatcgaggtggatgatgaagatcatccgatccagattctgaactccgtcgtgcacgtgcatgatgcaggaactggtggaccgggtgaaaccgacagcctgcggaagcgatcgggcatcgccgcgcgagcgcgtcgtagggggcgtgctcagaaaaagcgcttaaagaggcttgatgctctcctggaagatctcgggtggggagtcgtatctaatgaaatgctggaatcccacgcgccttggcacgtacgtaagcgcctcttgaatgaatacatcaccgatgaggttgagcgccggcaatgcctgtcgatcgcggcggcgcatattgcgcgccaccgtgggtggcgtaacccctatagcaaggttgacaccctcatgctggagcatgagcccagcgatcgcatgcgcggcctaaaaaatagagttgaggagcaaatgggactttgcttttcggatcaagcgacacaaggggagctcatagcgacactgttggagcatgacaaggacgtgactgtgcgcggctttgtgcgtaaaggtggcaaggcgacaaaagagcttggcgtattgcagggaaagtacatgcagtatgatctcgtagccgaacttcgtcaaatttgcgtcaagcagaaagtatcggatgaagtcttcacgcagctagtgtcaacgatcttctactcgaaggagccgcaggctgataagaagaatcagcgtaagcgagttggtatcgatgagcttcagcttgcggtagatcctcaagctgtagagctacgagccgaacgtgctcatccggcattccagaaattcaaaatcgttgcgacgctcgcaaatatgcgtattcaagaagatggagtcgcggagcgtgctctcaggcctgatgagttgcgtgctgttactgcctatcttctcgatgagagtggagttggaatacctacatgggaggaagtggcaggtcaacttggtgtgccccgtcatcggctacgtggagcctcgaaagcttcactcgagaccggcggtggacttaggtatccaccctttgacgagacaactgcacgagtcgcagagtctgagattgactggttggttgactggtggatgcaagcagatgatgaatctcgtgggcatatgatcgacgagatttccaacggttgtggatcagaaacaaacgatattgaagatgaagaggtcattgaactcatatctagtgccgctgcggaagatacggcaaagctggagctgcttgcaaagaagctgccgtcgggcagggccgcgtactctttaaagactctccgtgaggtaacgtcctcgatcctagagacaagtgatgacctctctcgggtaatcgagcgcctgtacggagtggagcccgggtgggcgccaactcccgcgcctatcgaagacccggttggaaatccgagtgttgaccgtgtagtcaaacaagttgctcgatggctcaagtttgccgaaaagcgatggggaatcccgcaagcggtgaatattgaacatacgcgcgaagggctgaagtccgcttccctccttgaagaagaaaaagaaaatagaattaaatacgaggagcgtcgcgaagagcgccttaagaaaatgtatgcgcaattggggattagtggcccatttaggcgaagtgagcagacgagatacgaaatcctatatttgcaagaatgtgcttgcctctattgtggttgtaaaatcggcttcgaaacttttgaaatcgatcatattatcccgcgtgttgatgcttcttcagatagtcgaagagaaaatctggctgcagtgtgtcataactgtaatattgccaaaggtgggataccttttggacaatgggtgaaacttaatgactgtcccaatggagtgagtcttgaagaagctatcaagagagtgaagagatgggataaaaatcgagttggtttaactgagaaggcaatgcgcaagaggaaaggcgaagtaattggccgactcaaggcggagaagccctatgaagagtttgatgggcgttcgatggaatcagtggcctggatggctatcgaattgaaaaagcgcatcgagggtcactttaactcagattgtgtaaccggtaaggtagtgaaggtaaatgcctatagtgggcgcctgacggcatgtgcaaggcgagctgctcgtgttgataagcgggttcgtctgattcgtctgaagggcgacaatggcgatcacaagaatagattcgatcggcgtaaccatgcaatggatgcgctcgtcattgcattgatgactccagcaattgctcggaccattgctgttcgtgaagatcgtcgggaagcacagcagttgacacatgctttcgagtcgtggaaaaactatcttggctcggaagagaggatgcaggagcgttggggatcttggattggtgacgttgagtatgcatgtgatcgattgaatgaactcatcgatgccaacaagatcccggtcactgagaaccttcgactccggaactcaggaaagctccatgccgatcagccagaaagtttgaggaaggcgagaaggggatcaaagcgtccacgccctcgacgctatgttcttggcgacgcgcttccggccgagattattaaccgcgtcactgatcctggcttatggactgctcttgtacgtgcgccggagtttgatgaccaactaggtttaccagcggatccagccaggagcctaagccttcgcggatcacgaatctctgctgatttcccgatcaactacttcccaaccgattcacctgctctcgctgttcaaggaggatatgtcggtctggagttccatcatgctcgcctgtaccggatcatggggccgaaggagaaagtaacgtatgcgttgcttcgggtctgtgcaattgatctgtgcggaatcgaccgttcgaatctattttcggtcgaactgaaggaatcgagcataagtatgcggacagcagatcccaaactgagggaagctatgaaggaaggaaacgctactcagattggttggctcgtcttgggagacgagattcagatcgatccttcgaagtttcctaagcaatctatcgggaagttcctcgatgaatgtggtcctatctcgagctggagagtttcggcattaaatactccgtcaaagatcactcttaagccacggctgctctcgaatgaaccgctgctcaaagataggagtggggcgcgtaagaacgatttcacagtttctgagtgtgttgagaaaattatgaagaagaccggctgggttgttgaaattaatgcgttgctcaagtcgggttcgattcgtgttatccgacgcaatgctctcggtgaggttcgtacatcgccagagtctggtctccccatcagtgtgaacttgaggtagtgacatgaactcgcagtggcgcgtgattgacctgtgtggtttcgaaggtgagcttcgatcgacgcgtggtggggtcgaggtgctctctggcgagggtgtgccgacgatcattcccgttgctgaggttgcagtcatcctcgtgggcgtgaaggtcgctctcagcgccgctgttctgcatcgcctggcagaagctgatgtcgctgttcttttctgtgattggaggggaattccggagggtggctgctactcgtggtcagatcatggtcgagtagcagcccgccaccgagctcaggcggaggtatcgctgcctcggaaaaagaatgcgtgggcgcgtctggttcgggcgaagatcgaggggcaggcctcggttctggagagtctcaggattcggggtagtggggaactgcttgcgctcacggatcaggttcgttcgggtgaccccggaaatgtggaggcccaggcggctcgcctgtactggtcgcgcgccctcggaaagggtgttgggcgtcaaccggcagccggccaactgatcggtgcgaacgcctgtttggattacgggtactcagtgttacgcgggcacctgatgcgcgctgttctggcggcgggactggcgcccgcactaggagtctttcatcgtggccgaggtaatgccttcgcccttgccgacgatttgatcgagccgtttagaccggcgattgatgaggtcgccctgcagctcccgcccacggcgtctccttcagatcgcccggtgaagcaactcctagtggcggctgcgtcccagcgctttgatggagatggacacggtatcccggccgtcgccgaggctctggctcagtctttcggtcgttacgtggagggtgacatcgatcgcctcagcgtggtgtcgtggcaggggccatcggccgtgtgcgtgggagattgacatggcggatgatgcgatgtggtgcctggtgatgttcgatctcccggtggagacgaagaagcagcggcgcgaggcaacccgtttccgcaatgaccttttggactggggtttctgcatggtgcagttcagcgtgtacgtgaagtattggccgaccggcgggcaggaccatgcgacgctgcgggcgatcaagactcatctgccggagggtgggcaggtgcgggtgctggcgttgactgacaggcagtggtcgacggggctccgttttgagaacgcgaagcctcggaaggagcgtggctcgcctgagcagctcctgattttctaacgaagatcccctggttttccgctatttttcagggaaaactaggggatctcagtatatcaaaggggattggtgattgattcccagccggatggtgtcgacacggcggcggggcccagtatatcaaaggggattggtgattgattcccagcatcaccgacgagaccaacgccctgcacgcagtatatcaaaggggattggtgattgattcccagctcattttgtttctcctttctgtcgtgctcagtatatcaaaggggattggtgattgattcccagccctccgtcgtgttgccctgcaggaagtccagtatatcaaaggggattggtgattgattcccagccatgccctgtactggaagggcgatttcccagtatatcaaaggggattggtgattgattcccagccaagccaatcagagagactatcgggcgtcagtatatcaaaggggattggtgattgattcccagcaaaccagtcttgccaagcacttggacaccagtatatcaaaggggattggtgattgattcccagctccgctatcaccagtgtaccgggggggacagtatatcaaaggggattggtgattgattcccagcggcacgcctccgggtccgctcgcggaggcagtatatcaaaggggattggtgattgattcccagctagacctcagtaggttcgaggtagcggccagtatatcaaaggggattggtgattgattcccagctggacgaggaagtcgagctgctcctgcgcagtatatcaaaggggattggtgattgattcccagccgtctactgcgtcttgttcggggattcgcagtatatcaaaggggattggtgattgattcccagcttaccgttgataacgtccgctgcaaactcagtatatcaaaggggattggtgattgattcccagcgccctatgcaagcggtgcctcggccaaacagtatatcaaaggggattggtgattgattcccagccgggacgccgcgcagccgaagccctcatcagtatatcaaaggggattggtgattgattcccagctccgcgatagcctgcttgccggtgttgtcagtatatcaaaggggattggtgattgattcccagctcgtgtctgtggcagagttagccgctgccagtatatcaaaggggattggtgattgattcccagcggatagccatcgtaaaaacctcgtctcacagtatatcaaaggggattggtgattgattcccagctcgctgcgactcaacgggcatcgcgggtcagtatatcaaaggggattggtgattgattcccagccccgacttcgggatctgcagggtctgcccagtatatcaaaggggattggtgattgattcccagcctagtatcctagtatcattgtgtgcatgcagtatatcaaaggggattggtgattgattcccagcgccgggttcctggtgtttcggagtacgtcagtatatcaaaggggattggtgattgattcccagcgccgcccagtggctcctcaacgccgctacagtatatcaaaggggattggtgattgattcccagctggggtggctcggcgatcccgcccggcccagtatatcaaaggggattggtgattgattcccagcttcgcgttgatgttgacataggggctatcagtatatcaaaggggattggtgattgattcccagccggtataggtggcgccgccggtcgggtacagtatatcaaaggggattggtgattgattcccagcccaggcatgagctcagcggtgacgtgcccagtatatcaaaggggattggtgattgattcccagccatccgtatcgctggcattgccagcattcagtatatcaaaggggattggtgattgattcccagcacgctcgctcgcacactcgggtacacgccagtatatcaaaggggattggtgattgattcccagcgccctgtgtaagcgttgcctcggccagacagtatatcaaaggggattggtgattgattcccagccaatcgcgggcggcaccaaggagactttcagtatatcaaaggggattggtgattgattctcagctggagggacggggggagtggtgggggcgggggggagtctagggggttgggggttgagtccaagggaggaggagacggggccgatcttgccttcagtatatcaaaggggattggtgattgattcccagcttccggcgcgcgccgggcgtggcgtctacagtatatcaaaggggattggtgattgattcccagctgagctgcgcagtgtaggcgctctcgttcagtatatcaaaggggattggtgattgattcccagccaatcgcgggcggcaccaaggagactttcagtatatcaaaggggattggtgattgattcccagctcatgagccatcactgccgccgtcgacgcagtatatcaaaggggattggtgattgattcccagcggcatgcacacagcgacggtgatgagagcagtatatcaaaggggattggtgattgattcccagcgcggatgcggcggcgatcaggtggtaaacagtatatcaaaggggattggtgattgattcccagccacgaccaacgtcaggaagggcctgaaccagtatatcaaaggggattggtgattgattcccagcaggctcgcgcgttgactatgaggtcacccagtatatcaaaggggattggtgattgattcccagccgccgcctgcgcgcgaagatcagcgctgcagtatatcaaaggggtttggtgattgattcccagctgacgaaatcaggtcgagcaagcagctccagtatatcaaaggggattggtgattgattcccagcgctgcggtgagtcgcggccagccaaggccagtatatcaaaggggctcttcgcatttgagggtgtaggggtgttcggtggggttcggcgtgtcgtggccgggtaggggtcgaggtctttcgatgatggagattcctacaccgtccatccgaaagacctcgacatgtccaatactacctttgatcgccctgacctgagcgcgttcacgcgcctggatgaccttggcctggaagtgaccggccagcacatgtggccagaccatgcagtgttggcatgccgcattgttgctgaggatcggtggtgccaacgctgcgggtgtcagggcgtggctcgtgacacggtgatcaggcgcttggcgcacgagccttacgggtggcgtcccacgtttttgcacgtgagcgtgcgccgctaccggtgccaggagtgcgctcacgtgtggcgtcaggatatgagccaagcagccgatccgcgcgccaagctctcgcgtgcggcggtgcgctgggcgctgacgggcgtggtcgttcatcatgtgacggtggcgcgtatctcccaggccctgggcgtgtcctggaataccgctaacactgctgtcctggccgaaggagagcgctcactgatcaacgacccgacccggtatgaaggcgtgcgtgtcattggcgtggatgaacacgtgtggcgacacaccccctacggcgacaaatatgtcaccgtcatcttggacttgacgcccatccgagatcgcagtggtcactcccggctcctggatatggtcccggggcgctccaagcgggtcttcaaaacctggctggcctcccagcctgacacgtggcgcagccacattgagatcgtcgcgatggatggattcaccgggtttaagagcgccgccgctgaagagctccccaacgcgagggcggtcatggatcccttccacgtcgtacacctggccggtgatgctctcgatgcgtgtcgcaggcgcattcagcaagaacttcaccatcggcgcgggcgggccacggatcccctctacaaggcccgcaggatgttacacaccagatcctgcctgctcaccccacgccaacaacaccggatcctcgacctgttcgccagcgattgccacgtcgcactcgaagtcacctggagcgtctaccagaacatcattgatgcctaccgcgatcccaacaaaatccgcggcaaggccctgatgcaagccgaaatcaacacgctgacctctacgcgcgtaccgaggggtctgaccgagctcatcacgctgggcaggacactcaaacgccgagccggggacatcctggcctacttcgatcatccccacaccagcaacggtcctaccgaagcgatcaacggccgcctcgaacacctacgcggatccgcactcggattccgcaacctcaccaactacatcacccgagcactcctcgaaacaggaggattcaaaccccaactacacccccaattatgaagagccatcaaaggggattggtgattgattcccagcgaaacagactggtcattcctgctcgacacagtatatcaaaggggattggtgattgattcccagctccgcgagcgcctggtcgtctggggagacagtatattaaaggggattggtgattgattcccagcactgagaaggtgtgggatcgtcagacgccagtatatcaaaggggattggtgattgattcccagctccaagtcgacgcgcatttgcgcgtctgcagtatatcaaaggggattggtgattgattcccagcccaatcgggatagctgatgtgatcgagacagtatatcaaaggggattggtgattgattcccagcgtcacatgctcgtgcgcgtacacctcgccagtatatcaaaggggattgatgattgattcccagcaccgcgagcttcgtcttgtcaacgccgtcagtatatcaaaggggattggtgattgattcccagccagcggttgcagcgatccgaggcggcgtcagtatatcaaaggggattggtgattgattcccagcgaaaccgatcacgagcgccgcagcgacgcagtatatcaaaggggattggtgattgattcccagccagtcgtcgacgtttagtgcgccggtcgcagtatatcaaaggggattggtgattgattcccagcatgaggccgtcacatgccattgcgatatcagtatatcaaaggggattggtgattgattcccagtttgagtagagatgagccttgatcaggaattgagcaaagaaaaagctcctgaacatagttcaggagcaaaggaaagcgagaggaccaatggcagtaaggggtctttgcagcctgaagctgaaggcagtcccgcacccgaagctgctggagtagcttcctttgaacgctctgttaccagacgtcctacagtatcctctcgcggcgtcgatattagtctgaaggttggttttggtcaagaagggtatgcgaacaacattcttggactgaaactggtttgatcaaagttctcctgtgagcggggataagcctcgatcaggaaatgctcaaacaaagtgctcctgaacatcgttcaggagcacttgaaagcgagaggacttcttggtacatggggtctttacagcccgaagctgaaggcagtcccgcacccgaagtcgctgaagcggcttcctttgaacgctctgttaccagacgtcctaccgtatcctctcgctgcgtcgatactagtctcaaggttggtttcggtcaaggaagacatgaacaacgctctcctggtgacacaggttgatcaaagttgtccctgtgagcagggatgagtcgttctcgaaatagtgctagggtgcgtacgagggtggcagccagcccaccagggagtgatccccgggcaggcgggccaccctccttgttttctcgtcggagtggttgtgaggccgtgtagaacgcgactgcgagaaagacgtgatcagtggtgatcagaatcgtgcggtcgcttcctcgagcacgccggcccgcgacggattggggttaaaggacaaaaagagttggtggagggttagtcccagttgtttcggtgggggcttgtgtggtggaggtcgtgccaggcgatggcgtcgccccatctggggatgacaccggctgcggggtgtgt

SEQ ID NO: 3541 - DNA, 11275 bp, synthetic construct
  misc_feature 1..11275: note = Synthetic
  source 1..11275: mol_type = other DNA
acgccggaagcacgagggccaggaggacctcgaccgtgtggagagtccaacccagtaggaaaagcgcgaagacggcagccgtgatgagcaggcccgcacccttaccactcttggcggcgaaagcgcgcgccttcgttttattgagctcgatctcgtcacgcagaattcccgacagctggctggtcaccagcgcgacgaggctgccaatgctggggcgcgcctcggatgcgggagccgcgtgctgcggcgcgtgctgcgtgggggcctcgggcggcgggtactgcccgggctgggggatagactgggtcataggggctcctgcgcgtgcgggggtaacgaggcgtcgcctcgcctgataagcctagtctctcacgaagaaacgcggctcgcagtgacccgtgcgctactcgtcgcgttactccttgggggcgatcgagccgggcaggtcggagaggatcttgcgggcgcgcacgaccaggtcggagacctccggctctgcgagggccgggtcgtcggcgtcgaccgtggggatgttgcgctcggcggcgtcggcgcgttcctggtccgaggcctgggctgtgtccgtggagatcggcgccatcagggcggtctcgtcggccgcggggtcgccgaaggccgggcccggggtggtggcgggcgcggaggagccggccacgacctcgtcgaagggggagggggtggccgcggggatcgggccgaggagagccttggggtcctcggggttggcctccagggaggcggcgatgatcgcctgcgaggggccgggcgcgtcgagggcgacgcggccgttcgtgaggagaatcgcacggtccgtggaggcggcgagctcgacggagggggtcgagacgacgaccgcgcagcccgcgttggccagggagcgcaggaggggttcgagctcggcgcgcgcgtcggcgggcagcgagacggggtcttcgatgaggaagacttcagcgccggagacgatggcgcgggcgatcagggccttgaagcgttcccaagccgtcagctcaccggggtgcaggtccacgcgctgggcgaggcccgtcacctggagggcgcccacgaggttatcccagtcggcgacggagcccgtggccgacaggggagcgaggatgttctggcggatcgtcagcgcgttatcgaggggtgtatccgtgcggatcagggcgaccgagccgatgcggccggcgaggcgtgccgcccacgagcgcgagggtgcggcgacgatgcggccggcgtggggctcctcgaggcccgcgaggatgaggaagagggcgcgggcgcggcggcccgtcgcatccaggatcgcgctgagcgtgcgcgcgcggaagcccatgtcgacgtcagccaggaggaccgcgcccgtggcgctgtccgtgtaggtcaggcccaggccggcgaccaggaccttgccgccgtggcccttcgcggcgaaggagcggcgcgaccggtaccaggggcgcggctcggtggtgggcaggtgcgcgggcagcggcgcgatgacgacctcgccctgcgtgggctggggcgcctgctgttgcggttgctgttgctgctgttgctgcgccggggtgtcgcccgtggacgaggccgtggccccctcgacggcagcgtcgaccgcggcggcggccggttccgggatggcctgcccggtggtggccgtcaggtcggccacgtcctggccatccgtaccctgcaggttttcacgcgactcgttcgacatacccccattctttcaggatcatgccgattgtgccgtcaaggcgcgcgggggtggggtgggtgagccgggtgaaaatcggttctcgtgtggcttgcgtctctaggagtgtaggtgtatgctgtaagcgattgattctcagtaagggccgactcgttagcggctccgaatgctccaccgggcgtttcctcgcgaaacgcccggtatttttctgaaatggacgcaaatgtgtgtgcagtgtgacacgatgtgtccatgattacttcctcagaaaatgttccgggtatccgctaccgggtcggcatcgacgtcggccttcgttcaatcggcttctgtgcaatcgaggtggatgatgaagatcatccgatcgagatactgaactccgtcgtgcacgtgcatgatgcgggaactggtggaccgggtgaaaccgacagcctgcggaagcgatcgggcatcgcggcgcgagcgcgtcgtagggggcgtgctcagaaaaagcgcttaaagcggcttgatgctctcctggaggatcttgggtggggagtcgtgtccaatgaaatattagaatcccatgcgccttggcacgtgcgtaagcgcctcttgaatgaatacatcacggatgacgttgagcgccggcgatgcctgtcgatcgcggcggcgcatattgcgcgccaccgtgggtggcgtaacccctatagcaaggttgacaccctcatgctggatcatgatcctagtgatcacatgctaggcctaaaaaatagggttgaggagcaaataggactctgcttttcggatcaagcgacgcaaggggagatcatagcgacgctgttggagcatgacaagaacgtgactgttcgtggctttgtgcgtaaaaatggcaaagcagcaaaagaactcggcgtattgcagggaaagtacatgcagtatgatctcgtagccgaacttcgcaaaatctgcgtgcagcaaaaggtgccggatacagtataccgacggctggtcgcaacgatcttccactcgaaggagccactttctgacaaagcccaacaacgtgagcgagttggcattgatgagcttcagcttgcggcagaacctccagctgtggagctacgagccgagcgcgctcatccagcattccaaaaattcaaaatcgttgcgacactcgcaaatatgcgtatccaagaaaatgaagctggagagcgcgctctcaggcctgatgagttgaatgctgtcacgacctatctgctagagcagagcggaaatggaatacctgcatgggaggaagtggcaggtcaacttggtgtgccccggcatagactgcgtggagcctcgagagcggcactggagactggtggtggacttaggtatcctccttttgatgagacatctgcacgagtcgcagagtcggagattgactggttggttgactggtggatgcaagcagatgaagaatctcgtgggcatatgatcgacgaggtttctaacggttgtggatcagaaacaaacgatatcgaagatgaagaggtcattgagctcatatccagtgccaccgcggaagatgtggcaaagctggagcggcttgcaaagaagttgccgtcaggcagggccgcgtactctttgaagactctccgtgaagtaacctctgcgatacttgagacaggtgatgatctctctcgggtgatcgagcgtctgtatggagtggagtccgggtgggtgccgactccagcgcctattgaagcgccagttggaaatccgagcgttgatcgtgtggtcaaacaagtttcccgctggctcaagtttgccgagaagcgatggggaatcccgcaagcggtgaatattgaacatacacgcgaagggctgaagtctgcttctctccttgaagaagaaaaagaaaatcgaaacaaatacgaggagcgtcgcgaagaacgtctaaagcaaatgtatgcgcgcctaggtattgatggtccgtttaggcgaagtgagcaggtgagatacgaaatcctggatttgcaagactgtgtctgcctctattgtggttgcaaaatcggcttcgaaacttttgaaatcgatcatattatcccgcgtgttgatgcttcttctgatagtcgaaaagagaacctggctgcagtgtgtcactcttgtaatagtgcgaaaggtggaatgccgttcgggcagtgggtgaaattgggtgattgtccttcaggggtgagtctcaaggaggcgattaagagagtcaaaaggtgggataaagatcgagcgggcttgactcaaaaggcgatgaaaagaagaaaagcggaagtagaaagtcgtctcaaaacggaaactccatacgaagagttcgatgggaggtcgatggagtcagtggcttggatggctatcgagctaaagaggcgtatcgaaggtcactttaattctaatcgtcccgaaggctatgctgcggtgccagtaaatgcgtacagtgggcgcctgacggcatgtgcgaggcgagccgctcatgttgataagagggttcgtctaattcgtctaaagggcgacaatagtcatcacaagaatagattcgatcggcgtaatcatgcgatggatgcgctcgtgattgcgctgatgactccggcaattgctcggaccattgcggttcgtgaagatcgtcgggaggcacaacaggtgacacgtgctttcgagtcgtggaagaactttcttggctcggaagacagaatgcatgagcgttgggactcttggattggcgatgttgagtatgggtgtgaacggttgaacgaactgattgatgccgacaagattccggtcactgagaaccttcgactccgaaactcaggaaagttgcatgccgatcagcctgaaagtttgaggaaggcgagaaggggatcaaagcgtgcacgccctcaacggtatgttcttggcgacgcgcttccagccgatgtgatcaaccgtgtaactgatccaggactatggactgctcttgtacgtgcaccggagtttgatactcaaaccggattaccagcaaatcccgacaggagtctaagccttcgcggattgcgtatctcagctgatttcccgatcaactactttccgaccgattcgcctgctctcgctgttcaaggaggatacgtcggtctggagttccatcatgctcgcgtctatcggatcatagggcggaaggagaaggtgacgtatgcgttgcttcgggtctgtgccattgatctgtgcggcatcgaccgttcgaatctttttgcggtcgaattgaagaaatcgagcataagtatgaggacggcagatcctaaactgaaggaagctatgaaggaaggaaaagctactcagattggttggattgtcttgggcgacgagattgagatcgatccttcaaagttccctaagcaatccatcgggaggttcctcgatgaatgtggtcctatttcgagctggagagtttcggcatttaatactccatcaaagatcaccctcaagccacggcttctttcgaatgagccgctgctcaaagaaaggtatgggggacgtaacatcgatctcgtagtttctgagtgtgtcgagaagattatgaagaaaacgggctgggtggttgaaattaatgcgttgctcaagtcgggttcgattcgtgttatccgacgcaatgctctcggtgaggttcgcacatcgtcaaagtctggtcttcccgtcagtctgaatttgaggtagtgacatgaactcgcagtggcgcgtgattgacctgtgtggtttcgagggtgagattcgatcaacacgtggtggggtggaggtgtgccctgacgagggtgtgccgacgatcattcccgtcgccgaggttgcggttgtcctcctgggcatgaaggttgctctgagtgccgctgttctgcatcgtttagcggaggctgatgtcgctgtcctcttctgtgactggaggggtataccagagggtggctgctactcgtggtcagatcatggccgagtagcggcccgtcaccgagcacaggcgggggtctctcttccgcgtaagaagaacgcatgggcgcgtctgatccgggcaaagatcgagggacaagcctcggctctggagaatctcaagattcggggtagcggggaactactcgctctcgcggatcaggttcgttcgggcgaccccggtaatgtggaggcgcaggctgcccgcctgtattggtcgcgcgctctgggtaatggtgtgggtcgtcagcccgcggcgggccagctcatcggtgtgaatgcctgtctggattacgggtactcggtgctgcgcgggcacctgatgcgcgctgttctggcggcggggttggcgcccgcacttggggtctttcaccgaggccgaggcaacgccttcgcccttgccgatgatttgatcgaaccttttaggccggcgatcgatgaggttgccctgcagctcccgcccacggcgtctccttcggatcgcccggtgaagcagctattggtgactgccgcgtcgcagcgctttgatggagatgggcatggcatcccggccgttgccgaggcactggctcagtcttttgggcgctacgtggagggcgacattgatcgcctcaacgtgttgtcgtggcaggggccgtcggttgtgtgcgcgggggactgacatggcggatgatgcgatgtggtgtttggtgatgttcgatcttcctgtggagacgaagaagcagcgacgcgaagcaacgcgtttccgcaatgacttgctggattggggcttctgcatggtgcagttcagtgtgtacgtgaagtactggccgaccggtgggcaggatcatgcgacgctgcgagcgatcaagactcatctgccggagggtgggcaggttcgggtgctggcgctgacggataggcagtgggcaacggggctccgttttgagaatgcgaagcctcggagggaacgtggatcgccagaacagctcctgattttctaacgaagatcccctggttttccgctgtttttcagggaaaactaggggatctcagtatatcaaaggggattggtgattgattcccagctcgtttggctggtactgtccgagatggacagtatatcaaaggggattggtgattgattcccagcgatttgtcggtgcctttggttgagacaacagtatatcaaaggggattggtgattgattcccagctgggtgcgttgactgtgatgttgacggccagtatatcaaaggggattggtgattgattcccagcggcgagtagattcctgcgtcgatcgctgcagtatatcaaaggggattggtgattgattcccagcgcggctttctcggaggcgacgcgcaggacagtatatcaaaggggattggtgattgattcccagctccactacgcaaccctctcgcgtcgcctcagtatatcaaaggggattggtgattgattcccagccctcacgctcgaggccccgcacgggtggcagtatatcaaaggggattggtgattgattcccagcacagcgtggcgtgttgtacgcgcatccgcagtatatcaaaggggattggtgattgattcccagcgaccttaacaatttcctggcatcacgtgcagtatatcaaaggggattggtgattgattcccagcctgcggcccatcgggtcacggtacaggacagtatatcaaaggggattggtgattgattcccagcgtcgcgtaccgggtttgcgtgccgtcggcagtatatcaaaggggattggtgattgattcccagcgctgacgcgcagccaatcaggttgtagacagtatatcaaaggggattggtgattgattcccagcaagcggtgaatcttggacctgtccgcctcagtatatcaaagggaattggtgattgattcccagctttgcgcgtggcggggcgcttggcacgacagtatatcaaaggggattggtgattgattcccagcacctgggcagtcgggggacaggccctcccagtatatcaaaggggattggtgattgattcccagcgtgggggacatcgagtctctcgctctcccagtatatcaaaggggattggtgattgattcccagccggggcaggagctggcctgctcctcctacagtatatcaaaggggattggtgattgattcccagcccatccgcagattcttcgcctttgctgccagtatatcaaaggggattggtgattgattcccagccggaagtcgggcttgccgacagcgttcccagtatatcaaaggggattggtgattgattcccagccctgcaccgttcatgtaccgcgaccccccagtatatcaaaggggattggtgattgattcccagccatcgatcaggcggcggcgcgcctgcgacagtatatcaaaggggattggtgattgattcccagctccggcgtgggccacacgctgcctgtcccagtatatcaaaggggattggtgattgattcccagcacttgctcccagaagctgccgtccttggcagtatatcaaaggggattggtgattgattcccagctagaagttcatgcgaggtcctcctcggtcagtatatcaaaggggattggtgattgattcccagcccctgttcgaccgattcctcaccgccttcagtatatcaaaggggattggtgattgattcccagcggcgcgcgcacttcaacgccgcgtgccacagtatatcaaaggggattggtgattgattcccagcttcgcctggttgccgatgcggatgacgacagtatatcaaaggggattggtgattgattcccagcggatgatccagagcgtatctacctggaacagtatatcaaaggggattggtgattgattcccagctcggtccagcgggtgaggacgagacggacagtatatcaaaggggattggtgattgattcccagcgcttgtggggtcggcattagagcgccgacagtatatcaaaggggattggtgattgattcccagcatgagggcggggcatcctgggtgtgggccagtatatcaaaggggattggtgattgattcccagcgcagccgatacgggggcgaggactggcacagtatatcaaaggggattggtgattgattcccagctcggtcgcgtcgaggtagcggcgtccgtcagtatatcaaaggggattggtgattgattcccagcgaggctccagaggtgttgttgtgagccacagtatatcaaaggggattggtgattgattcccagcagtccagagacggcgataaagcgcgcccccagtatatcaaaggggattggtgattgattcccagcagagtcgacagcagctccacgtcgcgggcagtatatcaaaggggattggtgattgattcccagccctcagcggtgtttccctgcaggaagtccagtatatcaaaggggattggtgattgattcccagctcgggccacgggtagaccacgggcgcagcagtatatcataggggattggtgattgattcccagctcgccaccctcacagtagacaaccgactcagtatatcaaaggggattggtgattgattcccagccgcagccccgctggttcactaacgctcccagtatatcaaaggggattggtgattgattcccagcggtgcaggcgaccgccttgcgggcgagatcagtatatcaaaggggattggtgattgattcccagcacatcgaccagctcgtccacggccaccgcagtatatcaaaggggattggtgattgattcccagctctgcgcatgatgcgtggcgtgatagggtcagtatatcaaaggggattggtaattgattcccagcgctcctcgcgggtgtcgccggcgtcgtgcagtatatcaaaggggattggtgattgattcccagctctccgagtgcgtcccagtcgtcctcaacagtatatcaaagaggattggtgattgattcccagctccaggtcgacgcgcatttgtgcgtctgcagtatatcaaaggggattggtgattgattcccagctcccaccgcgcgcgcaaaacaatgtcatcagtatatcaaaggggattggtgattgattcccagcgctgggaatacatgcacctcacccgcgacagtatatcaaaggggattggtgattgattcccagcgatcgcgcacgcggtgcggatcgtgacccagtatatcaaaggggattggtgattgattcccagccgggtgtaggtggcgaggcgtacccaggcagtatatcaaaggggattggtgattgattcccagctcggagaatagcttcgacagtttcgctgcagtatatcaaaggggattggtgattgattcccagccggcgcgggcgacacctccgaccagcgtcagtatatcaaaggggattggtgattgattcccagcaatggaatacacgggcgagcgatggtggcagtatatcaaaggggattggtgattgattcccagccgacgggcacgggggcagcgggtgcaggcagtatatcaaaggggattggtgattgattcccagctagccgacgcggacgtgctggccgctgccagtatatcaaaggggattggcgattggttcccagcggcgacctactcctgtccgaagcagcgtcagtatatcaaaggggattggtgattgattcccagcaagtccgccgtgcgctgcaggagcgtcgcagtatatcaaaggggattggtgattgattcccagcggcggggccgtcgtctgtggtgtcgaggcagtatatcaaaggggattggtgattgattcccagcacggcgcaaacgtcaggtgagaaatcttcagtatatcaaaggggattggtgattgattcccagcggtgcggcggtcatgagcgggtgagggccagtatatcaaaggggattggtgattgattcccagcggcaagccaagcccgcctcggacttcgacagtatatcaaaggggattggtgattgattcccagcccgtacaggttttcccagtggtcgatctcagtatatcaaaggggattggtgattgattcccagcagcacgatggcgagtccagccatgacaacagtatatcaaaggggattggtgattgattcccagcggggtgaacggccagcagcttgcatcgccagtatatcaaaggggattggtgattgattcccagctgcggtcaacggtttccatgcgcttagtcagtatatcagaggggattggtgattgattcccagctgaagcggctcgtgcagcacagctgaatcagtatatcagaggggattggtgattgattcccggccccgcgccgacgggctggccgacgcggggcagtatatcaaaggggattggtgattgattcccagcagaccagcgcgatccaacgcctggcgcgcagtatatcaaaggggattggtgattgattcccagcatctgccacaacgacgcaacccacctaacagtatatcaaagggcattggtgattgattcccagcgtgcggtcggcgtactcctgagcggatgcagtatatcaaaggggattggtgattgattcccagcccgtacaggttttcccagt

SEQ ID NO: 3542 - DNA, 23132 bp, synthetic construct
  misc_feature 1..23132: note = Synthetic
  source 1..23132: mol_type = other DNA
  variation 8462..8463: note = note, n is a, c, g, or t
actgggaacggagacggttgaaggctacaagtgtgacaagtacgaggttacctacaaggaccccgaaaggcagaagatggggaactccgtcatctggatagcccagaaactcaattttccgataaagggagtaaccgatggcgagcagggcaagataaccgttctctacacgaacatcaaggaagggcctcaggacgcgtcgcttttcgagatcccgaaggattaccagaagttcgctttttaaagacattctggtccgatttttgcagggggtgggaagttgtcatcacagatgagttcggtccgcctgagcaggctgaacagtctggtcatggagttctttcatgatccccgaaggagcagggaccatctcctggaggcactcgggtacggcagtaatggccgtgcccttgaaagggacctgaaattcctgagggaggaattcggggtcgatataaggtacaacaggaggacatgcctttacgaatttcacggaaacggcaacttccttctccagcttcaaatgaaccggagggaagtcacatccattgccgcgggactgaacatggtctgtcacttcctcccgcacctgtcggaggattgctccaggttctggagcaaactgaaagcgatgcttcctgaagaacttgcctcgcagggtgagaaactggccaaaagcacagtggtagccctgccggtctcgaagatggacccgatggtcttcgagaccataatcaacgcggtatcggacaggcgaaggatccactttcagtacggatcaccctacagcggtgagggctccaaaccgagggacgtatcaccgtggggggtctttttccttgcccacgcatggtatctctggggcgcttccgccggggagagcgaaccgaggactttcaggatctcgaggatacgctccgtcttttcgatcgatgacggaggattcgcgcctcccccggaggacagcgacacaaggtccttcgcttcatcagcctggtatggatgctccggaaagggcaaacacaggatcctggtgagagtgaggccccccctgtccggagtgatagaggagacggactggcacccatcccaggaaataacacgccttgaggatggcagtatcgatatcggggccgtggtccccgacctgggtgagatcgcgcgctgggtcatggcaagcgcgccttatgccgaagtgctcgagccgaccgccttgagggattccgtttttgagctctgcagaagggtcagcgaagatcattcgtgaagcatctcaagtgtaaccgcgataaagagcccgaaagcttccctgaagtttttcaggtcggccccggttatcctgtgtatcttctccagcctgtaattaagggtgttccggtgtatgttaagcctttcagcgactttccccgggttgcagggtgattcgcaccatgccctgaaggttttcaccatatcatcgccgtcgggcatttttctgagaccagagaggtgtttccttgagaaacggcgccctttcctgatatttaccgtactcaggagatcttccagcaggtagtcgccgatacggtggtttttgccaggctccccctttttcaggcctattgccagggccttccatgcctcgcagtaagagtagtgcagtccctcgggatcccttgcgcaacttccggcaccgatggtgaggttcaggcccatgtcgccgagaagggatcggcatttcccgcatttttcctcgatgggtggggaacaggtgtccacgtccggtttttccacggccgcgaagacgacaaagcgggtatgtcccattcccgagcagaaacaggatggttcgggaaagacggatctgatgatctcctgtgcgccagtgctgatggaaaccttttttattgggtcttccattttttctgctgtctcgggatcatcgggtcccaattccattacaaggcataccctgtgaacgtccatgtcataacccagctctttgaccctggtcgccagaaccgcggaatcgtcctgttccggagcaaatgaagctatgtcggagacaagttcccttagagccctctcccgtgctccagccgactcctggatcaattgctcccttaggaagagctcggcctgcttctggacaagaaggccgtatcttgccacttcacggtgatctccggcgatagctatggatccaacgacctcgccggcgaggaagaccggaagggtgaccccgggtttgacccctttcatttttgaagcttcctcgggttcagtgtaggtctcgcgtttctgtttcatggcaacaatagacggggcatgaacggtgtggaggcggagcgggtcgctgctccctatgatcaccgcgctctcgtcggttattattacgtggtgccctatgatgtcgtgggtagtttcacagatgacctgggcaaaacgtttaagcatctgttttccactccctccagtaagtccttgattgcgaatatagtcccttttatgcaaaagcacaaacaaagtacctgattataagtgtaacttcttcgggatgaacaatgcccctctcactgatatttacttataattactgttgaagtcgacgttatgacggctgagaggggggattgtccgtgagattggaattgcacaaggtttttgtaaaagatgtctcatggggcggcgataccagggttgacggcgggaccttgttcatcaacagggaggaaatgctcgccgtagcgaaacaggatgccaggtttgcgaccgccagccttgaactggcccgcccgggagaaagcgtaaggatcattccggtgaaagatgtcatagaaccccgctgcaagctaaagggaccgggagaggtcttcccgggtttcgtgggtggaatgcagacagtcggagaaggggaaacgctggtccttgatggcgctgccgttgtgacctgcggccccatagtggcattccaggaagggcttatagacatgtcgggaccggccgccgactattcacccttttcggggaccagcaacgtggtgctagtggttgaacccgtcgagggtcttgaccagcacgactacgaagctgcactcagggagacaggcctgaaactcggctggtacctggcagacaggtgcagggaagcaagggtcgacgaggtcaaggtgtatgaaatgggagggccggttgaggagtcggcaaaataccccgaccttccaaagatagtctatttctgtatgtccatcacccagggtttgcttcatgacacattcctgtacggggcggacatgaaacaccttgtgccgacactcatccatcccaacgaaaagatggacggggcaatgatatcggggaactgcgtttcatcatgcgacaagaacaccacatggcaccacctgaacgaccctgtcgtagaggaactgtacagccgtcacggcaaggaaattgtcttcctgggggtcataccgacccttgaggacaccaggcttgcggggaaggagcgcacttcctggttcaacgcgaacctggcaaggatgctgggtgccgacggcgtggtcgtctctgaggaagggtacggcaaccccgataccgacctttgcatgaacgccgccaaatgcgagaacctgggtataaagaccgtgataatttcggacgaggccgccggaacagacgggaaaagccagggccttgccgacgccgcgccggagataacggctttcgtttcggcaggtaacgtcaacgaaatgatcgaactgcccgcgatggacaaggtcataggcttcgaggagtcgatcgcgaacctctcaggaggggcagaggagagccttcgcaaggatgggtcaatgttcatagaactgcaggcaataataggttcgactaatgaactgggcttcagcaggatcggggcccggtgggtctagagaggggtggatgaaatggccaagagggtagtctgctacatcaaccagttctttgccggcctgggaggcgaggagcaggcccatgttcctccttcgtcccgccccggggtcgcaggacctgccatgcagatccagagcctgctcggggaagaggctgtcgttgtcggaaccgtcatatgcggtgacagctattacggagaacacctggaagaggcaagagagcagtgcgtcaggatgatcgccgggttcaagccggatcttcttgtcgccgggcccgctttcaatgccggaaggtacggtgtggcctgtggcgatatctgtgcctcggtcaccggatccctgtgcataccctccctgaccggtatgtaccgggagaacccgggggttgagctgtacagccccaaaacctatatagtcaaaacggccgacagcgcaagggggatgaaggatgccctggcagccatgtcatccctcgcagtgaaaattctgagagatataccgctaggggctgccatggacgaggggtacttcccgaggggcataaggaaaaatttcttccacaagaccaatggggcaaaaagagccgttgacatgctcctgaaaaaaatagccggggagcagttcataaccgagtacgaaatgcctgttttcaaaaaaataacacccgccgccccggtaaaggacctgagcaaggcgaccatagcccttgtcagttccggagggatcgttcccaaaggcaaccccgaccacatccgggtgtcctctgcggaatcttacggtgtttacgatatttccagtcttgacgacctgacccccgataacttcgagtccatccatggaggttacgacagggtttgggccaacgatgacccggatacggttcttcccctggacgtcatgagggagatggagaaagagggtgtcttcggaaaactttatgatcaggtctttacgaccaccggaaccggcacggcagtggcccatgccgaaaggttcggacaggagatcggcgaaaaactcaagaaggacggcgtggatgccgtcatactgacttccacctgaggaacctgcacccgatgcggcgcatcgatggtaagggagatcgagaacacggcggggatcccggtagtccagatcgccacgatagtaccgataatgcttacggttggggcgaacaggatagtaccgggagtggcgataccccatcccgtgggagacccttcccggggagaggaaggcgacaaggccgtcaggcgggaactgctggaaagagccttgcgggcgatccagacgccaatagaggaacagacgatcttcacttcgtaacaacctgaaagtcaatcagcggacgtaagggggagggtggcccaaagggtctgagcccttccccttttttatgcctgtggcaacgaagaagccctggaggttataatggggcatcaatggaaaatgaggctggagattgaaaggtatccttatcgtcacaaacaatccgaaaacttttgaaaaatatcctgatgccaggtttgttgaaggctcgcccgatgatgtggtccgggaggcatcaaggatgctgcttgaagggtatatcctcttttcttccccgctgccgcccaacggcagacttatgaagaaccccttccgctccgtcgttctcaaggagactgttgtttccgaaaggagcggtaaggattttcttctcctcaagaaagcggaagaggtttacggcaggacctcgttcctgtcgatcgatgggcgccgcggggcggacatggcctttatcgacctggatctgatggaaagttccctcagggacatctgaaccgtgataatggtttgaaaagtggctgccagggcggtcctgtaaaggataaggcagaaataacaggagaaagagagggaacaggatgagagatctttcaaggcttgacgagatcataaccaggagacttgaagagaaccccgaaacccctgccgtctggtggaaagggtcatggatgaatggttccgacttcatgcggctcataagggagagcgaggagagcctgaaagagagcggttttcggcccggatcgcggatcgctgttttcatggccaactcacccctgctctggagcatagccgtagcagcctgaagattgggaggggctatagccctcctgaatgccaggagcggggtgaacgcaagcctgaagatagtcgagcatatagaccctgaatgaggaaggagttctgtgggtgaagggtccctcggtgacctcgggctatttccgtcccccggagcttacggccgagcggttccatgatggatggctcgataccggcgatatagtaagtatcgacaaagacgggtacatatcgatcctggacagggctacggacctgatcatcgtgggcggcttcaacgtctacccccaggaagttgagacggtccttaactcacacctgagggagaacgaaaaggttctgggggaaaaccgccactgagcttgagaggttgatcgggccggctggggcatgccatgaggatggggatcggcagcagcgtccatcgatctccggaagggagcaacataatgaaaaagtggcccgatgagcgctctgcattgatgcatcccgggaggatgttgctttcgatattttccaggacggcatctttagttgccgtccttgtcatattgtctctcctgcatgcctcaaggggcgaaacgtccatcaggtctgtcaggacggggatacagcccgaaggtgccagattggccatagatcttgaccgatacgcggactattcgatatccaaagaaggagaccgcctgcgcgtggatgtcaggaccggcattcaaggcgcggtctccgaaagattcccggccaataaagtggccctggctttttctgcgcaacctgaaaatggcggtacgacaatagtgatcgacctcagttccccgggagttgtggccaggcattacactttgcccgaccctgaaaggatagttatcgacctttccccggggggccaaagtgagggccagggtcttcaggcagacggaattatcggccttcacggcctgatcccggcccctgtgacccatggcccgggtccccacacctttgatctttatcttccccgcgaagatatctcaatagggaaaggatctttcgtcagaacctttttcttcgagacatcccctctatggaggatcaaggaagggagtttcctcaaccttgtcctgaaaacaggcgacctggaagaggatgttctcttcaggatcatgctgaccctgaacggtcacccggtggacacagttatcgcagaaccagccggggtcaagccgaccggaacggtgattcccatacctccgcgccttttcagagagggcaggaacgtgatgacccttagcgcctctgccggatcgaaagaccggcagtacgggggcgggataaagaacctcggtatccatggcaacagcctgctgagattgagttacctcccggtaaatgacctccgggtcggggatcttgcctcacctttcaaaaaagccgtgatcactcccggagaagatcttgccgtagttattcccgacagccccgagcccggggaaatagaggcggctttggagatcctgctgtcatggtccagagaggcggggggtgtattcctgcccagggtcattctgctgaatgaactggacaacaggacagcagacaaattccacctggtatatctcggaaggatctccgctatcccacggtacgttctggaatctttcgggacgaaaaacagcgcggggggggagagcaccctttcgtcctttttgaacatccaggggaaagcgagacttttgctgacttcaggttccgcggaaggggttctccttggggccaggtcgttactggaccctgaactggctgaaaagatggataccaggaggatcgttgtcgggccgggtgcggtcccgtcggaagagagcccgggaagacccgggaacgatatcccgttcgggaggttggcaggaggggatgtcctgttcagcggtaccggaagccagggaaaaagcttcgtgatcgggctgccccccgaagaggggttaaaggggaaaccggaactggttctgtcatatcgctattccccggtcctggataacctgaattccacaatttcggtggaattcggtgatgtttcggccaggactgtccccctgggaaagaacaattccggagagggccgactggcagttgagatccccaggaccttgcccgagactcgttcgttgaacttaaaactcaaggtctccctcctggaacttgagaacgaaaaggggaaaagcctgggagatgcggcctggcttgttttcgacagcacctccaggctggtgcttccggtcagggaaggaagcctgcctttacttctcgaaaactttccctatgcctttcacggaaaggcgatcactgtatatgcgggggacgggatgaacggggaaatgatcacagcccttgccaggatgctcatttcctgggaccgtgaccttccccgggatatacgaacaaaggcggaacccnngctgagcttctgaggagcggggcgcctcttgccgtcggttacgatgagacgtcaggaaggatcaggccaggtcggaaagttcctgtcaaaaaggaacatgaggaaggatcggtctgcctccaggttctcggagccaaagggggagaacctgtctttttgatgggatggcctgccaaaaaatccgacgcggagatcttccctgaaagcttcaacttcaggaacctcaggggcgacgtgagttttatttcagatagtggtggatcggtctccttctacgtaaatacccctgaacccggggcggggtttttgagatccagacctggtctcaggatattccttggcctttttgccctgggcctttcactggccctgcttgcccttttcgtctaccatatcaggttaaaataccagccgcgaccaccggcggatgatccaggggcatagaagacggaccttctttcccggccataatttattttctggagctgtgaaacatggacaaaagatcttccgaacacgaaagattcatgagaacggcactggaagaggccatgaagggggccaggtcaggagaagtccctatcggtgcggttgtggtcctcgacggggaggttatcggacgggggcataacctgagggaaagcctcaaggaccccgcggcccacgcggagatgatagctctcagggaagccgccggtcacctgggcatgtggatcctggaggactgcaccgtctattcgacccttgagccatgccctatgtgcgcagcagccatggtacagtcgagggtcaggaatatcgtgttcggggcaagggatctccgctggggagcctgcggcaccctctacgatattgcaagggacccgaggctgaatcaccagtgcaaagtaacgggtggcatactctcggaagaatgtgctaaaatgctccgggagttcttccaggcccttcgcagcaaggggcgggagatgggtggagggatggccgagtggtcgaaggcgggcgactcgaaatcgtctaggcggtgatgagccgtctcgtgggttcaaatcccactctctccgccatataataaatatcgcaaatggagaagtggccgagtggtcgaaggcgggcgcttggagagcgtctgggcggcaacgtcccgtgggttcgaatccctccttctccgccagactttcagcgagaccctaagatattggggtctcgctttttcgtgcttgataggcctctggagaaaaatttcttcagaggcctattgtttgtcggttttctcctttaatgggcaatgctacacaagtcgcttctgtcgcatttgctctgagttgggaagggcatcagacctcaaggcaataaaaaaggccgctctgtagcggcctaaggacactcttgcgagtggagccttgcagaccagaagcctttactgtagaaaaggcaactcgtcgctttggtacactaatgatattttatatattacaatcattatgtcaagctttgaaaatcataaaatactaatcatttttaaggggggtgcaacatgaggcaaacctcgtcgaacgaaacagtcctgggtcttgatctgggaagtaattccctgggctgggcgttattggagtttgaggggaacaaaccaaaggccataatcgattgtggagtaagaatctttcaagcaggccttgagggagatatcgagtctggaaatgctgtgtcaagggcaagggagcgtagggaaaaaagatctttgagaagacaaacagacagaagaaaaaggagaagactacaccttcttcatttattgcaaggattacaaattctaccggaaggcacacctgaggaagtgttccccactttggacaaaagtttgatagagaagtactcccagatagaagggattcccaaaaagacattagcagggaagctgccttactggttaagggcaagagcgcttgaaaaccctcttgagccttttgagttagggagggtgatctatcacttgggcaagagaagaggtttcctttccaacaggaaaacacctgccaaacaggaggaaggaatagtagccaaagagatagacgagttacgtcatgagatggagaaagcaggatccaggacacttggagagtacctggcaggtcttgatcctcaagaggacaggatacgcagcaggtatacgcaaagagggatgttccaggaagagtttgaagcaatatgcacattccagaagaagtttcacgacagattgaacgaggagactatagccaggattggaaagacaatctttttccagaggcctttaaagtctgcaaaaaagctagtaggccactgcgagcttgaacccaactccaggagggcaccgtgggcaacacttgaagcacagcaattcaggtatttccagatggtcaataactcttcgataaaaactgtagatgatcttgccttcaggccgtttacggacacagaaaggacgatcttgatagataaccttgagcgggatggtgacctgacctttgcaaaggcaaagaagctcctgggaaaagacagcaaaacaacggctttttcctttgaggctggcgaagagagcaggtttctcggcaacaggatcaacaagctgttgaagggcattttcggtaatgactggtttggttttgacaaggagaagaaggagtctatccttgcagacctaaggagctacagggactcacaggccctggctaaaagagcgcaagaggtgtggggtcttgatcctcagaaagcacaggagtttgcctccattgaactagaacctggctattgcgctctttcaaggaaggctatcagaaaattgatgccctatctgcaaaaaggagcaccctatgcctcagcccgaatagaggtctatggggagttcctgaagacaaggatcgccgaggatttcctccttccggtcaaacagcttttcgagttaaggaacccggtagttgaaagatcccttacagagttgaggaaagtagtcaacgcggttatacgaaagcatggtaagccggacagggttaagatcgagctggcacgagagatgaagcagtcccagaagaaacgcagggagattacaagaacaaataggctgaatgagaaacgcagactagaagcagcgcagcggattgtcaaggaagttgggataacgaacccaagccggaacgacatccttaaagtcatgcttggagaggagtgcaactggatatgtccctataccagcaaacctgtctccatgatggctctatttggagacagcccacaattcgatatagagcacatcattcccttctccagatcctttgatgattcctttgccaacaagacactttgttatgtagatgagaacaggacagtaaaaaggaacaagtctccatgggaggcctaccacgggtcttcaagatgggaagacattataaacaatgtcaaacgcttcaagggtgatctccgggattcaaagcttgaaagatttctcaagcgccctgatgaattagaggatatggacggcttcatctcaaggcagatgaatgacacacgttatgcttcgaaactggccatgcactacctgggtaccttgtacggcggtctttacgataaggataagcaacagagggtctttgcggtaacaggacaggttacggccattctaaggaacgcatggagcatgaattcgatactgaatgatggtggtttcaaggaaaggggtgaccacaggcaccatgctgtggacgctgttgccatagctcttacaagcccggcgactatcaggggtctttcagaagccgctctaccttctttcgagaggaatgcgtacaggaaaaggttcaagccattccagatgccatggtctactttccttcaagatctggagaaaaggatcgccgggatactggtctctcacagggtcaataacaaggtaaacgccgcacttcacgaagagactaactatgggatagtgaagagcagtacggagaaggctttttgcatcaggagaaggctggactccctgaaagcttccgagatcgatcagatcatcgacaagaggatcgcacaaataatcaggaacaagcttgccgaattggggcatacggaaccgtcaaaggcctttgtctctcctgagaaccatccccactttgtttcggctaaaggcgaaaagatctggttccataaggtcaggatttacgtctctgtcaaacccaagaagataggggaagggcctgctgaaagatacgttaccccagccttcaaccatcacatggagatatttgaaataacagattccaaagactctcacaagaaaaagtgggagtgcgaggtggttgataccttgggggcaatggatcgtctcaggtgcggacaacctgtagtcagaaaaaaggccgaaggaaaaaggtttcttttctccatcgctactggggacactcttaggctgaataatccgggcgaatggcctgaatatctgcatgtaaggacagtctgcaagtctaatgaagggaatattgagattgccggtgtatccatcagtgatgcccgaaagaaaaaggataccctgaaagcaaaggaattctaccgcatcagatcgacaaccagccttcaaaacctggatccccaaaaagttacagttttgccttgtggggatttgctggttgctagcgggtgagaaatgaaccgaataattgatgtttgtcacgataaggctcgtctatcctgcaagctggacaatctggtaattgaggccagagatgaaactcaattgatccctttcaaagacatcgctgctttggtcttgtcaagccagtatgtgctattgacgcagcctgtactttcatctcttagttgctgtaacgttgtggttattgtctgtgatgagagacatatcccctgcgggatggttcttcctctttcatcccattacgctcaggcacaaatctttgatatccaggccagactatctgttccatccaaaaaaagagtgtggaggtctcttgtgaaggccaaaatattggcgcaggcaaaggtcctgaccctggtccacggtgaagacttcggcctttccagaatggcccaggaagtcaagagcggggatactacaaacgtggaagggaaagcagcgagaaggtattgggtcagcctgttccatccagacttcaaaagggatttccagtctcctgacgaaaattccttgctgaactatggttatgccttgatcagggggctggtggccagggctttatgcgcttcaggcttgcatccctgtctcggaatccatcatcaccaccgttcaaatccctttgctctagcagatgatttcatagaaccacttagaccttttgtcgattaccaggtctggtgttgggtcagtgaaaacggcatcgacaaaggcctgaccagggagggaaaagtattcctcctttccaggtttgtagacagatatgcaatggggggccagtatataacgctgttctctggcttgaaccagatggcttcttcttttgtaaaagtatgcaggggcgaacaaatcgatatctccattccttcacctttgtctttcaattcgcttgaaggcaggatgggggatcaatgttcaatctgaggggaagagattttcatggcccattgttactgccccttatcggggtacaagggaatgtggctgttcgttctctttgacttgccggtaaaaaccaggaaagaaagacatgcttacacagtcttcaggaaagagttgataagggaagggttctcacagcttcagtactcggtctacgctcgctattttgatagtgctgattcaagccaaagtgaatcagcctttatccgatcaatcttgccttccaacggtcaggtcaggatagtggcgatcaccgatgcacagttcggcaagatgcttgttttccatgggaaaaagcttgagataacagaaaaacctcctgaccagatcctccttttttgagatcatttcctttgtgaaagcccatcatcactcatttgatggatgatagagtgtaccaaagcgacgagttccccgaaactacagcacagggacaagtcttaaccacgatggcgaaagtgtaccaaagcgacgagttccccgaaactacagcccaaaacaggcaaccgtgactttattcaggtagtgtaccaaagcgacgagttccccgaaactacagcggggtgaggaggacatgagcagcaagtcgcagtgtaccaaagcgacgagttccatgaataacctagtcggtttgcaaggactttcaggtgatacattcgggtggtacaatccaaacaagccttcccatgtaacccagtaacagcaagcatttcctgatggccagctgaagacgagggtggtacattcaatgtctccctccttctccgccagactattttcggggtcccgggtttccggggcccttttttgggatcgttgagaaagaattgtttcagttgtgctgatttgcctccagcccagccccggaagggtaaaataacagaagaattggtgaggggatattttcatttcctcaggagggcagccatgaccggaaatctaaggacgagcgcggccgaaaggacaagttcgggcaaagcccggggaaaggggagggtggtcaaggcttcagtgctgttgccggtcctgttgatgaccattttggcgacattgccttgccttgcccagggcgcgatggaacccctgccgggtgcctacgacctgcgagagttcggtcatgtcacgccggtgaaggaccagaacggcaagagaccggacggcacaagcgatatcggcaccaccgtagggctctgctgggcattttcttcgatcgcctgcctggaaagcagcatgctgaaacagggtattaccctttcccccatagatgatgatgccaacctttctccctggtacctgggcagccatatcggctacaaccggccctgccttgagttcaaccccgaccttatccccgggatcgagccgcccaccactttcggttactgctggcccgggaaaggttggggcggcggcggagctttctggctagccgatcacctgatcagcgggaagcccctcccgctctggaaagatgcccccatgcccaccggggacatgacggccagaaaagagctgactttacccgagaccgggaaggggaggcagtaccagctcagggagatggtcatgttcttccgcgaggatttcggcagcgaccttgattacagggaccatatcaagaggttcatcttggagaaggggcctgtgcagtcgatgatccaccttgaaccagtcgacatcgacgggatcgaacggcaggaatgcggcggggccgcgtattccgggaaccggttcatcaacggggagaccgccggtatgttcacgttcgaaaccgaggggctttgcactgacctctatacgcacggcgtggccgttgtcggctgggatgacctccggcgcatttccgtaaacggccgtaatgccatcggggcctggctggttaaggattccatgggggattcttcacacgaagagggatacttgtgggtcgcctacgaggacatggtccaccttaaaccccttgtatccggcctggttgctgatccggggtgcggcctcaggcacgcctcggaataccagacccacccaggagcactttccaggatcggggaagaggagaacttcgatgaaagggaaatcattgaactgggagagtacagctaccttctcaacggttttgaatgcgaggattcgtgggctgtcgccgaatttccgctggataaggaagaagtgatgagaggtgtggccttcttcactgccaaccgcaacgaggaggtctctgtgcagatatacaggggcacgatgtcaggggagccgcttcttgctttggatctggaaattccggagatcgggtatcacctggtagaccttgggcatgatatccatttttcggcaggggacaccgcaatcgtcgccctgtgcttcaggggcagggccggccgcgcaaagctgccgctggtatacgtaagggatgtgggctataatcccacttgcccgaccttcttcggcaccttcgacggagatggttttcaactgaccccatattccgatatggaaggcaactgctcatttttcattcaggccgtcatggccgggaaatagcgttgaaggtcgatccgggcatttcaggtctcaagggtgacaccagatcagcgatcctctgcaggggttccagccctgtgcgacgggaggccgtaaaactccgccaggcccggaagggagcaacggtatacggtttcccgggtgccgcaggccaactggatcccctgcaggggatcgctccataatggaggttcatctaatgtctgaacccgtccttttcaaagggtacctggagccatccttcaattggaatgaaggggatgaacttatcctgcagcccgttttcatggtgcctgtagaggtcttcaggacaggtttcctgataaggcccgaatacaggacggtaatggccatagtcgaggccgttggggggaaggtgcagttcatcccggaaaagaaggctcccggggttctcgaaccggagccgggcggccgccgtcttccggccaatatttctgccgacagggccttgcggaacgcggaaagcgcggctgtaaccgaagggcgggaaggctggaaggccctttccggctcttcccacgcaatgacccgggaggagaaattaagggcttgctggaagatctgggtacggcatggcgaaaccctgacggattcggtaaatggcaattccatgaaagctggagaactgctggggctgatccttccctgacccaggaggcatcaacccgaaagggaaaggttccctttcaggatcactcttcctttgagcctgagataggggctatatctatcagtgtcccgatcagtttttcaagttcaaccatgtcagggttgcccgtctcggccaggcatttttttacgtagcttttcaggatctctatgcaggcattctgcatggccttacgtgccgctgacagttgaagaaggacttcctggcacggtttaccctctatgaccattctctgtatcccccgcagctgcccttcaaccctttttaacctgttgagcatggctctctgcctgggatccatgttatcaagctgttctataagcgacattttcgccattgctatcttcctcccgatattgtttttagtaataagtaggtatacggggtatatggtattccacaaattgttgccggtcaatcatcaactatgatatactccccggtggcccttatcacgcacacgatctgacgggtgagggggtgtccgcgcatgcgcgggttccgagcccggatgatggtcgtggagggaaaaccattttgaggaggggaaagatttggcagtagtaagcatgaaacagctgctggagtgcggggttcatttcggtcaccagacaaggcgctggaatcccaagatgaagccctatatcttcaccgagaggaacggagtctacatcgttgaccttcagaaaacagtcaaaggcctggagaaagcctatgactttctcagggaggtttccaaaagcgggggaagcgttcttttcgtgggcaccaagaaacaggcacaggagaccatcaaggacgaagcagtccgctccgggcagttttatatcacccatcgctggctgggaggtcttctgaccaatttcccgaccatcaagaagagggtcgcccgaatggtcgaactcaactctcccgaattccttgagggttccacaaagtggaccaaaaaggagatagccggttttgccaaggaacgcgacaagcttgagaagtacctcctggggatcaaggacatgcgcgatgtgcccgacgccctcgttgtcgttgaccccaagcgcgaagacattgcggtcctcgaaggcaggaagcttggcattcccattgtcggcatcgtagacaccaactgtgaccccgaccttatcgactacccgatacctggtaatgacgatgcgatcagggcaataaagcttattatcggtctcatggcatcggctgttatcgagggcaggcagggcacggacagcgctgtcgaggaagaagccgatgtttccgagcctgaagagggcgacgaggactccaggctcgaacagaccgagaagatcgatgaaaatttcggcaaggtagaggaagtcattgtcgacaaggaactgctggagagaaaaggctggaaggaggcctaggttatcatgtccgtagatatggatgctgtaaaagaacttagataccgttctggagctggcattcttgattgccggaaggccctggacgagtgctgcaacgacctggagaaggccgtcgattaccttcgggagaaggggctcgccaaagcggcaaaaaaggcgggaaggactgcctcggagggacgggtcttcagctatatccacacaaatggcaagatcggaaccctggtggagatcaattgcgagaccgactttgtcgcaaggaccgacgaattccaggaactgggcaaggaaatagccatgcagatagctgcggcggccccgtcctatctcagcaccgaagaagttccccagaccgatctcgaaagggagaaggagatctacaggcagcaggctcttgacgaaggaaagcccgagcagatcgtcgacaagatagccgaagggcgtatcgccaagtttttcgaggaaagctgcctgctggaacagaaatacataagggatcctgataaaaagataaaggatcttgtggttcaggagatcgccaaaatgggcgagaacatcgtcgtgaggagattttcccgtttttccataggagactagaacagcgcggggcggggagatcccccgccctttttttgtcctgttactctgtggggggtgttttggatgtcttcatatcacaggatccttctcaagctttcaggtgaggtcctggcgggggaatcttctttcgggcttgacatgaaatctatcagcaatatctgtggagagatagcttcccttgccgagaacggccttgaaatagcaatggtcgttggaggagggaacatttttcggggtgcccagtcaggtgagggttacctggacagggcccagggggactatatgggcatgcttgccactgtcataaactccctggcccttcaaagtgtgctggaacgtataggggttcctaccagggtccagacagcgatagaaatgagagaactggcggagccctttattcgacgaaaagcacttcgccatctggaaaaggggagaattgtgatcttcgctgcggggacgggttctccgttcttttcgaccgataccgcggctgccctcagggcggctgaaatatctgcagattgtctattgaaggctacaaaagtcgatggtatatatgataaagaccccgcgatccatcccgatgccaggctgcttccaaggatctcttacatggaggcgatccagaaacagctgaaggttatggatgccgcggcattttcgctctgcatggaaaaccggatcccgatccttgtggccaacatcctcaaggagggcacgctccgggatattctgatacacggcaaacaggttggcacaattgtccatttctagaaggagtgatgagaatgcccgaccaggagatcagaaagatgaaggataagatggagaaggtccttgaacaccttaagaaggagcttttggggatcaggaccggcagggctcatccggcccttgtcagcgacatcaaggtagactattacggaacacccacccccatgtcacaggttggatccatctccacgcctgacgcaaggcagatacttatcaccctgtgggacaagaatgcggtgaaggcagccgaaaaggcgatacaggcatcttccctggggatcaacccgtcagttgacggtgagaacatcaggcttgtcgtgcctgaactgacaggtgagaggcgtgtggagctgacgaagctggtgaaaaagtgtgccgaagacgccaggatagcggtcaggaacctcaggcgcgaatcgaacgaggccttcaaaaagatggagaaggaaggaactatcagcgaggattccctgcatgaccagcttgagacgacacagaaaacgacagacgagtacataaagaaaattgacgtcatcgctgccgaaaaagaaagggaagtactggaggactgaattaactctccacgatgacgtgcggcgccccggtaaccggggcgccgcttttttctgtctacatgtcagaccggaggcttaccccttcaaggaatctttgaagtctttccatgccctcgcggatctcttcctcggagttggcgtaacccagccgaacataccccggggcaaggaaggcgcttcccggtactgctgccacatattctgtctcaagcagtgcttcgcagaaatccccgtcggtgtttatggctctctccccatgtgatcctccaagggtgttcctgacgttaatgaaaacgtagaaggcgccctgaggttccgggaaagatatgtggggcatcttgcgcagaagtccggtcatgatatcccgacgccgggaaaattcctgtctcatccttaccacgtcagcttctgactccttgagcgcgccaagagaggcccactgtgctatcgaacaggcgtttgacgtcaggtgcccctggacggctccgacctttggcgccagccatttgggcgccaatgcatagcctatcctccatcccgtcattgcgtaggccttgcttactccattgatctgtatcgtcctgtccatgacctccggcacaagagatactatgttccggtgttcatgctctccgtagaccagcctttcatagatctcgtcgaagatgatccagaggtcgtgcttgatcgcaagggccgcgatcttcctcagtgtgctttcattgtagaccgcaccggtggggttgttgggtgtgttgagaagcatgcccaccgttcggggtgtaattgcacgggcgatcatttcaggatccgggatacagtcagtgccggtagtatctacgatgacatctttcccgtcgaaaaggcggatctgttcaacgtagcttacccaggcaggggagaataccagtacctcgtcaccagggtccacaagggacgcgagagcctcgtagatcaggggtttggctccggcgccgacaatgatctggtttggggaataatcgaggccgaaacggctgctgtaatacgaagctacagcttccctgagctccggaaggccgtttgactgggtgtagtgggtctgtccttccctgatggctttttcggcgtatctgagcgcccccgggggagagtcgaaatcaggctcacctgccccaaaggaaattaccggtttgccctggcctttcagagccttggccttggccactacggccagtgtcgcggagggttccattcttgacgccctttctgagatcttcatttccagaccaaccccattcctctctctgatgaaggatcctttctgccggcaattatattccattcatcaggttcagcggcaaaggctctaagagaatccgctaaaagggtaaagaggtagactcgttgtatgggtgacctcgtgatgataaaatgatcgggaagaggttaccagaacgacatcgtagattggaggaagagccatggatgtccggtttgtcacccgcaatgtcgagctgcaggacgatcttcaggattacatggaaaagaaactggtcaagcttgaaaagttcttcgatcgtatccgcgacacccaggtagaggtgagcttcaatcggggaatgaatgttgtcgagatcaccgccgatgtcaacggagtgatcatgagaggggaggactacgccccggatatcaggaaagcttttgacaagtgcctgaaaagcatcgagcgccagatcaagaagcacaaatcattcctcaaggacaaggccaggatgaaatcctcagaggtttccttcgagatagagggttttgtaaatgaactggcagagccggagggaaaaaaggaaggcattgtcaagaccaagaggttccccttccgtcccatgtcacctgaagaggccacgatgcagatggatcttctcgggcatacgttctttgtcttcagaaatgccgaggatggcaatgtcaacgtggtttacagaagaaaggacggagggttcggacttcttgtcccagaggagtaggggccggtttttccccggaaaaagcgttctcccgagggtggggtcttgttttcgaccccaccttttcaattcaggatgtcaaaaggtgatacaaatacctgacagaggtgatctgcttgtccgatctatatcatagcgcctgcccctatgactgcccggatgtttgtgctttcctagtgaggcctgcagcaggaggctcgcttgagatcgagccggatcccctgttcccgcatggagccggtttcatttgcgggaaaggggcaaggtgggattttatcaggaagcatgcctcaaggctgacgacccctttgagaagagagggtccctcatggaagaggatcccgtggggcgatgcatgggggctttgggcatccatgacggaaaagtccattgaccgatggggccctctctcggtatttctctgccggggttcggggtctcttttttattccaagg

SEQ ID NO: 3543 - DNA, 22571 bp, synthetic construct
  variation 15333..15383: note = note, n is a, c, g, or t
  source 1..22571: mol_type = other DNA
  misc_feature 1..22571: note = Synthetic
aaggaccccgaaaggcagaagatggggaactccgtcatctggatagcccagaaactcaattttccgataaagggagtaaccgatggcgagcagggcaagataaccgttctctacacgaacatcaaggaagggcctcaggacgcgtcgcttttcgagatcccgaaggattaccagaagttcgctttttaaagacattctggtccgatttttgcagggggtgggaagttgtcatcacagatgagttcggtccgcctgagcaggctgaacagtctggtcatggagttctttcatgatccccgaaggagcagggaccatctcctggaggcactcgggtacggcagtaatggccgtgcccttgaaagggacctgaaattcctgagggaggaattcggggtcgatataaggtacaacaggaggacatgcctttacgaatttcacggaaacggcaacttccttctccagcttcaaatgaaccggagggaagtcacatccattgccgcgggactgaacatggtctgtcacttcctcccgcacctgtcggaggattgctccaggttctggagcaaactgaaagcgatgcttcctgaagaacttgcctcgcagggtgagaaactggccaaaagcacagtggtagccctgccggtctcgaagatggacccgatggtcttcgagaccataatcaacgcggtatcggacaggcgaaggatccactttcagtacggatcaccctacagcggtgagggctccaaaccgagggacgtatcaccgtggggggtctttttccttgcccacgcatggtatctctggggcgcttccgccggggagagcgaaccgaggactttcaggatctcgaggatacgctccgtcttttcgatcgatgacggaggattcgcgcctcccccggaggacagcgacacaaggtccttcgcttcatcagcctggtatggatgctccggaaagggcaaacacaggatcctggtgagagtgaggccccccctgtccggagtgatagaggagacggactggcacccatcccaggaaataacacgccttgaggatggcagtatcgatatcggggccgtggtccccgacctgggtgagatcgcgcgctgggtcatggcaagcgcgccttatgccgaagtgctcgagccgaccgccttgagggattccgtttttgagctctgcagaagggtcagcgaagatcattcgtgaagcatctcaagtgtaaccgcgataaagagcccgaaagcttccctgaagtttttcaggtcggccccggttatcctgtgtatcttctccagcctgtaattaagggtgttccggtgtatgttaagcctttcagcgactttccccgggttgcagggtgattcgcaccatgccctgaaggttttcaccatatcatcgccgtcgggcatttttctgagaccagagaggtgtttccttgagaaacggcgccctttcctgatatttaccgtactcaggagatcttccagcaggtagtcgccgatacggtggtttttgccaggctccccctttttcaggcctattgccagggccttccatgcctcgcagtaagagtagtgcagtccctcgggatcccttgcgcaacttccggcaccgatggtgaggttcaggcccatgtcgccgagaagggatcggcatttcccgcatttttcctcgatgggtggggaacaggtgtccacgtccggttttcccacggccgcgaagacgacaaagcgggtatgtcccattcccgagcagaaacaggatggttcgggaaagacggatctgatgatctcctgtgcgccagtgctgatggaaaccttttttattgggtcttccattttttctgctgtctcgggatcatcgggtcccaattccattacaaggcataccctgtgaacgtccatgtcataacccagctctttgaccctggtcgccagaaccgcggaatcgtcctgttccggagcaaatgaagctatgtcggagacaagttcccttagagccctctcccgtgctccagccgactcctggatcaattgctcccttaggaagagctcggcctgcttctggacaagaaggccgtatcttgccacttcacggtgatcgccggcgatagctatggatccaacgacctcgccggcgaggaagaccggaagggtgaccccgggtttgacccctttcatttttgaagcttcctcgggttcagtgtaggtctcgcgtttctgtttcatggcaacaatagacggggcatgaacggtgtggaggcggagcgggtcgctgctccctatgatcaccgcgctctcgtcggttattattacgtggtgccctatgatgtcgtgggtagtttcacagatgacctgggcaaaacgtttaagcatctgttttccactccctccagtaagtccttgattgcgaatatagtcccttttatgcaaaagcacaaacaaagtacctgattataagtgtaacttcttcgggatgaacaatgcccctctccctgatatttacttataattactgttgaagtcgacgttatgacggctgagaggggggattgtccgtgagattggaattgcacaaggtttttgtaaaagatgtctcatggggcggcgataccagggttgacggcgggaccttgttcatcaacagggaggaaatgctcgccgtagcgaaacaggatgccaggtttgcgaccgccagccttgaactggcccgcccgggagaaagcgtaaggatcattccggtgaaagatgtcatagaaccccgctgcaagctaaagggaccgggagaggtcttcccgggtttcgtgggtggaatgcagacagtcggagaaggggaaacgctggtccttgatggcgctgccgttgtgacctgcggccccatagtggcattccaggaagggcttatagacatgtcgggaccggccgccgactattcacccttttcggggaccagcaacgtggtgctagtggttgaacccgtcgagggtcttgaccagcacgactacgaagctgcactcagggagacaggcctgaaactcggctggtacctggcagacaggtgcagggaagcaagggtcgacgaggtcaaggtgtatgaaatgggagggccggttgaggagtcggcaaaataccccgaccttccaaagatagtctatttctgtatgtccatcacccagggtttgcttcatgacacattcctgtacggggcggacatgaaacaccttgtgccgacactcatccatcccaacgaaaagatggacggggcaatgatatcggggaactgcgtttcatcatgcgacaagaacaccacatggcaccacctgaacgaccctgtcgtagaggaactgtacagccgtcacggcaaggaaattgtcttcctgggggtcataccgacccttgaggacaccaggcttgcggggaaggagcgcacttcctggttcaacgcgaacctggcaaggatgctgggtgccgacggcgtggtcgtctctgaggaagggtacggcaaccccgataccgacctttgcatgaacgccgccaaatgcgagaacctgggtataaagaccgtgataatttcggacgaggccgccggaacagacgggaaaagccagggccttgccgacgccgcgccggagataacggctttcgtttcggcaggtaacgtcaacgaaatgatcgaactgcccgcgatggacaaggtcataggcttcgaggagtcgatcgcgaacctctcaggaggggcagaggagagccttcgcaaggatgggtcaatgttcatagaactgcaggcaataataggttcgacaaatgaactgggcttcagcaggatcggggcccggtgggtctagagaggggtggatgaaatggccaagagggtagtctgctacatcaaccagttctttgccggcctgggaggcgaggagcaggcccatgttcctccttcgtcccgccccggggtcgcaggacctgccatgcagatccagagcctgctcggggaagaggctgtcgttgtcggaaccgtcatatgcggtgacagctattacggagaacacctggaagaggcaagagagcagtgcgtcaggatgatcgccgggttcaagccggatcttcttgtcgccgggcccgctttcaatgccggaaggtacggtgtggcctgtggcgatatctgtgcctcggtcaccggatccctgggcataccctccctgaccggtatgtaccgggagaacccgggggttgagctgtacagccccaaaacctatatagtcaaaacggccgacagcgcaagggggatgaaggatgccctggcagccatgtcatccctcgcagtgaaaattctgagagatataccgctaggggctgccatggacgaggggtactttccgaggggcataaggaaaaatttcttccacaagaccaatggggcaaaaagagccgttgacatgctcctgaaaaaaatagccggggagcagttcataaccgagtacgaaatgcctgttttcaaaaaaataaaacctgccgccccggtaaaggacctgagcaaggcgaccatagcccttgtcagttccggagggatcgttcccaaaggcaaccccgaccacatccgggtgtcctctgcggaatcttacggtgtttacgatatttccagtcttgacgacctgacccccgataacttcgagtccatccatggaggttacgacagggtttgggccaacgatgatccggatatggtcctccccctggacgtcatgagggagatggagaaagagggtgtcttcggaaaactttatgatctcgtctttacgaccaccggaaccggcacggcagtggcccatgccgaaaggttcggacaggagatcggcgaaaaactcaagaaggacggagtggatgccgtcatactgacttccacctgaggaacctgcacccgatgcggcgcatcgatggtaagggagatcgagaacacggcggggatcccggtggtccagatcgccacgatagtaccgataatgcttacggttggggcgaacaggatagtaccgggagtggcgataccccatcccgtgggagacccttcccggggagaggaaggcgacaaggccgtcaggcgggaactgctggaaagagccttgcgggctatccagacgccaatagaggaacagacgatcttcacttcgtaacaacctgaaagtcaatcagcggacgtaagggggagggtggcccaaagggtctgagcccttccccttttttatacctgtggcaacgaagaagccctggaggttataatggggcatcaatggaaaatgaggctggagattgaaaggtatccttatcgtcacaaacaatccgaaaacttttgaaaaatatcctgatgccaggtttgttgaaggctcgcccgatgatgtggtccgggaggcatcaaggatgctgcttgaagggtatatcctcttttcttccccgctgccgcccaacggcagacttatgaagaaccccttccgctccgtcgttctcaaggagactgttgtttccgaaaggagcggtaaggattttcttctcctcaagaaagcggaagaggtttacggcaggacctcgttcctgtcgatcgatgggcgccgcggggcggacatggcctttatcgacctggatctgatggaaagttccctcagggacatctgaaccgtgataatggtttgaaaagtggctgccagggcggccctgtaaaggaaaaggccgaaataaaaggagaaagagagggaacaggatgagagatctgtcaaggcttgacgagatcataaccaggagacttgaagagaaccccgaaacccctgccgtctggtggaaagggtcatggatgaatggttccgacttcatgcggctcataagggagagcgaggagaccctgaaagagagcggttttcggcccggatcgcggatcgcttttttcatggccaactcacccctgctctggagcatagccgtagcagcctgaagattgggaggggctatagccctcctgaatgccaggagcggggtgaacgcaagcctgaagatagtcgagcatatagaccctgaatgaggaaggagttctgtgggtgaagggtccctcggtgacctcgggctatttccgtcccccggagcttacggccgagcggttccatgatggatggctcgataccggcgatatagtaagtatcgacaaagacgggtacatatcgatcctggacagggctacggacctgatcatcgtgggcggcttcaacctctacccccaggaagttgagacggtccttaactcacacctgagggagaacgaaaaggttctgggggaaaaccgccactgagcttgagaggttgatcgggccggctggggcatgccatgaggatggggatcggcagcagcgtccatcgatctccggaagggagcaacataatgaaaaagtggcccgatgagcgctctgcattgatgcatcccgggaggatgttgctttcgatattttccaggacggcatctttagttgccgtccttgtcatattgtctctcctgcatgcctcaaggggcgaaacgtccatcaggtctgtcaggacggggatacagcccgaaggtgccagattggccatagatcttgaccgatacgcggactattcgatatccaaagaaggagaccgcctgcgcgtggatgtcaggaccggcattcaaggcgcggtctccgaaagattcccggccaataaagtggccctggctttttctgcgcaacctgaaaatggcggtacgacaatagtgatcgacctcagttccccgggagttgtggccaggcattacactttgcccgaccctgaaaggatagttatcgacctttccccggggggccaaagtgagggccagggtcttcaggcagacggaattatcggccttcacggcctgatcccggcccctgtaacccatggcccggatccccacacctttgatctttatcttccccgcgaagatatctcaatagggaaaggatctttcgtcagaacctttttcttcgaaacatcccctctatggaggatcaaggaagggagtttcctcaaccttgtcctgaaaacaggcgacctggaagaggatgttctcttcaggatcatgctgaccctgaacggttacccggtggacacagttatcgcaaaaccagccggggtcaagccggcaggaacggtaattcccatacctccgcgccttttcagagtgggcaggaacgtgatgacccttagcgcctctgccggatcgaaagaccggcagtacgggggcgggataaagaacctcggcatccatggcaacagcctgctgaggttgagttacctcccggtaaatgacctccgggtcggggatcttgcctcacctttcaacaaaaccgtgatcactcccggagaagatgttgccgtagttattcccgacagccccgagcccggggaaatagaggcggctttggagatcctgctgtcatggtccagagaggcggggggtgtattcctgcccagggtcattctgctgaatgaactggacaacaggacagcggacaaattccacctggtatatctcggaaggatctccgctatcccacggtacgttctggaatctttcgggactaaaagcagcgcggggggagagagcaccctttcgtcctttttgaatatccaggggaaagcgagacttttgcagacttcaggttccgcggaaggggttctccttggggccaggtcgttactggaccctgaactggctgaaaagatggataccaggaggatcgttgtcgggccgggtgcggtcccgtcggaagagagccggggaaaacccgggaatgatatcccgttcgggaggttggcaggaggggatgtcctgttcagcggtaccggaagccaggaaaaaagcttcgtgatcgggctgcctcccgaagaggggttaaaggggaaaccggaactggttctgtcatatcgctattccccggtcctggataacctgaattccacaatttcggtggaattcggtgatgtttcggccaggactgtccccctgggaaagaacaattccggagagggccgactggcagttgagatccccaggaccttgcccgagactcgttcgttgaacttaaaactcaaggtctccctcctggaacttgagaacgaaaaggggaaaagcctgggagatgcggcctggcttgttgtcgacagcacctccaggctgttgcttccggtcagggaaggaagcctgcctttacttctcgaaaactttccctatgcctttcacggaaaggcgatcactgtatatgcgggggacgggatgaacggggaaatgatcacagcccttgccaggatgctcatttcctgggaccgtgaccttccccgggatatacgaacaaaggcggaacccctttcctcgttctcctgggaggatccccggggaagcacgataattatagcctcctttgccgaacttctgaggagcggggcgcctcttgccgtcggttacgatgagacgtcaggaaggatcaggccaggtcggaaagttcctgtcaaaaaggaacatgaggaaggatcggtctgcctccaggttctcggagccaaagggggagaacctgtcttattgatgggatggcctgccaaaaaatccgacgcggagatcttccctgaaagcttcaacttcaggaacctcaggggcgacgtgagttttatttcaggtagtggtggatcggtctccttctacgtaaatacccctgaacccggggcggggtttttgagatccagacctggtctcaggatattccttggccttttcgccctgggcctttcactggccctgcttgcccttttcgtctaccatatcaggttaaaataccagccgcgaccaccggcggatgatccaggggcatagaagacggaccttctttcccggccataatttattttctggagctgtgaaacatggacaaaagatcttccgaacacgaaagattcatgagaacggcactggaagaggccatgaagggggccaggtcaggagaagtccctatcggtgcggttgtggtcctcgacggggaggttatcggacgggggcataaccagagggaaagcctcaaggaccccgcggcccacgcggagatgatagctctccgagaggccgccggtcacctgggcaggtgggtcctggaggactgcaccatttattcgacccttgagccatgccccatgtgcgcagcagccatggtccagtcgagggtcaggcatatcgtgttcggggcaagggatctccgctggggagcctgcggcaccctctacgatattgcaagggacccgaggctgaatcaccagtgcaaagtaacgggtggcatactctcggaagaatgtgctaaaatgctccgggagttcttccaggcccttcgcagcaaggggcgggagatgggtggagggatggccgagtggtcgaaggcgggcgactcgaaatcgtctaggcggtgatgagccgtctcgtgggttcaaatcccactctctccgccatataataaatatcgcaaatggagaagtggccgagtggtcgaaggcgggcgcttggagagcgtctgggcggcaacgtcccgtgggttcgaatccctccttctccgccagacattcagcgagaccctaagatattggggtctcgctttttcgtgcttgataggcctctggagaaaaatttcttcagaggcctattgtttgtcggttttctcctttaatgggcaatgctacacaagtcgcttctgtcgcatttgctctgagttgggaagggcatcagacctcaaggcaataaaaaaggccgctctgtagcggcctaaggacactcttgcgagtggagccttgcagaccagaagcctttactgtagaaaaggcaactcgtcgctttggtacactaatgatattttatatattacaatcattatgtcaagctttgaaaatcataaaatactaatcatttttaaggggggtgcaacatgaggcaaacctcgtcgaacgaaacagtcctgggtcttgatctgggaagtaattccctgggctgggcgttattggagtttgaggggaacaaaccaaaggccataatcgattgtggagtaagaatctttcaagcaggccttgagggagatatcgagtctggaaatgctgtgtcaagggcaagggagcgtagggaaaaaagatctttgagaagacaaacagacagaagaaaaaggagaagactacaccttcttcatttattgcaaggattacaaattctaccggaaggcacacctgaggaagtgttccccactttggacaaaagtttgatagagaagtactcccagatagaagggattcccaaaaagacattagcagggaagctgccttactggttaagggcaagagcgcttgaaaaccctcttgagccttttgagttagggagggtgatctatcacttgggcaagagaagaggtttcctttccaacaggaaaacacctgccaaacaggaggaaggaatagtagccaaagagatagacgagttacgtcatgagatggagaaagcaggatccaggacacttggagagtacctggcaggtcttgatcctcaagaggacaggatacgcagcaggtatacgcaaagagggatgttccaggaagagtttgaagcaatatgcacattccagaagaagtttcacgacagattgaacgaggagactatagccaggattggaaagacaatctttttccagaggcctttaaagtctgcaaaaaagctagtaggccactgcgagcttgaacccaactccaggagggcaccgtgggcaacacttgaagcacagcaattcaggtatttccagatggtcaataactcttcgataaaaactgtagatgatcttgccttcaggccgtttacggacacagaaaggacgatcttgatagataaccttgagcgggatggtgacctgacctttgcaaaggcaaagaagctcctgggaaaagacagcaaaacaacggctttttcctttgaggctggcgaagagagcaggtttctcggcaacaggatcaacaagctgttgaagggcattttcggtaatgactggtttggttttgacaaggagaagaaggagtctatccttgcagacctaaggagctacagggactcacaggccctggctaaaagagcgcaagaggtgtggggtcttgatcctcagaaagcacaggagtttgcctccattgaactagaacctggctattgcgctctttcaaggaaggctatcagaaaattgatgccctatctgcaaaaaggagcaccctatgcctcagcccgaatagaggtctatggggagttcctgaagacaaggatcgccgaggatttcctccttccggtcaaacagcttttcgagttaaggaacccggtagttgaaagatcccttacagagttgaggaaagtagtcaatgcggttatacgaaagcatggtaagccggacagggtgaagatcgagctggcacgagagatgaagcagtcccagaagaaacgcagggagattacaagaacaaataggctgaatgagaaacgcagactagaagcagcgcagcggattgtcaaggaagttgggataacgaacccaagccggaacgacatccttaaagtcatgcttggagaggagtgcaactggatatgtccctataccagcaaacctgtctccatgatggctctatttggagacagcccacaattcgatatagagcacatcattcccttctccagatcctttgatgattcctttgccaacaagacactttgttatgtagatgagaacaggacagtaaaaaggaacaagtctccatgggaggcctaccacgggtcttcaagatgggaagacattataaacaatgtcaaacgcttcaagggtgatctccgggattcaaagcttgaaagatttctcaagcgccctgatgaattagaggatatggacggcttcatctcaaggcagatgaatgacacacgttatgcttcgaaactggccatgcactacctgggtaccttgtacggcggtctttacgataaggataagcaacagagggtctttgcggtaacaggacaggttacggccattctaaggaacgcatggagcatgaattcgatactgaatgatggtggtttcaaggaaaggggtgaccacaggcaccatgctgtggacgctgttgccatagctcttacaagcccggcgactatcaggggtctttcagaagccgctctaccttctttcgagaggaatgcgtacaggaaaaggttcaagccattccagatgccatggtctactttccttcaagatctggagaaaaggatcgccgggatactggtctctcacagggtcaataacaaggtaaacgccgcacttcacgaagagactaactatgggatagtgaagagcagtacggagaaggctggactccctgaaagcttccgagatcgatcagatcatcgacaagaggatcgcacaaataatcaggaacaagcttgccgaattggggcatacggaaccgtcaaaggcctttgtctctcctgagaaccatccccactttgtttcggctaaaggcgaaaagatctggatccataaggtcaggatttacgtctctgtcaaacccaagaagataggggaagggcctgctgaaagatacgttaccccagccttcaaccatcacatggagatatttgaaataacagattccaaagactctcacaagaaaaagtgggagtgcgaggtggttgataccttgggggcaatggatcgtctcaggtgcggactacctgtagtcagaaaaaaggccgaaggaaaaaggtttcttttctccatcgctactggggacactcttaggctgaataatccgggcgaatggcctgaatatctgcatgtaaggacagtctgcaagtctaatgaagggaatattgagattgccggtgtatccatcagtgatgcccgaaagaaaaaggataccctgaaagcaaaggaattctaccgcatcagatcgacaaccagccttcaaaacctggatccccaaaaagttacagttttgccttgtggggatttgctggttgctagcgggtgagaaatgaaccgaataattgatgtttgtcacgataaggctcgtctatcctgcaagctggacaatctggtaattgaggccagagatgaaactcaattgatccctttcaaagacatcgctgctttggtcttgtcaagccagtatgtgctattgacgcagcctgtactttcatctcttagttgctgtaacgttgtggttattgtctgtgatgagagacatatcccctgcgggatggttcttcctctttcatcccattacgctcaggcacaaatctttgatatccaggccagactatctgttccatccaaaaaaagagtgtggaggtctcttgtgaaggccaaaatattggcgcaggcaaaggtcctgaccctggtccacggtgaagacttcggcctttccagaatggcccaggaagtcaagagcggggatactacaaacgtggaagggaaagcagcgagaaggtattgggtcagcctgttccatccagacttcaaaagggatttccagtctcctgacgaaaattccttgctgaactatggttatgccttgatcagggggctggtggccagggctttatgcgcttcaggcttgcatccctgtctcggaatccatcatcaccaccgttcaaatccctttgctctagcagatgatttcatagaaccacttagaccttttgtcgattaccaggtctggtgttgggtcagtgaaaacggcatcgacaaaggcctgaccagggagggaaaagtattcctcctttccaggtttgtagacagatatgcaatggggggccagtatagaacgctgttctctggcttgaaccagatggcttcttcttttgtaaaagtatgcaggggcgaacaaatcgatatctcaattccttcacctttgtctttcaattcgcttgaaggcaggatgggggatcaatgttcaatctgaggggaagagattttcatggcccattgttactgccccttatcggggtacaagggaatgtggctgttcgttctctttgacttgccggtaaaaaccaggaaagaaagacatgcttacacagtcttcaggaaagagttgataagggaagggttctcacagcttcagtactcggtctacgctcgctattttgatagtgctgattcaagccaaagtgaatcagcctttatccgatcaatcttgccttccaacggtcaggtcaggatagtggcgatcaccgatgcacagttcggcaagatgcttgttttccatgggaaaaagcttgagataacagaaaaacctcctgaccagatcctccttttttgagatcatttcctttgtgaaagcccatcatcactcatttgatggatgatagagtgtaccaaagcgacgagttccccgaaactacagccctccttaagaggcgtcagagctaagggccagtgtaccaaagcgacgagttccccgaaactacagcggaacaggaacggaaggaacccggagatggagtgtaccaaagcgacgagttccccgaaactacagccttccgctgctcagggactacgacggcaagagtgtaccaaagcgacgagttccccgaaactacagccctggactccgttgtaaaattgtacccatagtgtaccaaagcgacgagttccccgaaactacagcggtctgttaccggtaccgtgagtacgttgcagtgtaccaaagcgacgagttccccgaaactacagcctggtcgctcctgaggagttcgtcagagagagtgtaccaaagcgacgagttccccgaaactacagccgtaccgaaaacgttcttgcaccacagcgcagtgtaccaaagcgacgagttccccgaaactacagcggaaaatgaagcaacataccttcacgctgaagtgtaccaaagcgacgagttccccgaaactacagccggattgggacaaccgaggagagcctgctgagtgtaccaaagcgacgagttccccgaaactacagcgctgtttaccatgaccacaacaagacgctagtgtaccaaagcgacgagttccccgaaactacagcacatcctgcaacgagtactcctggacagaagtgtaccaaagcgacgagttccccgaaactacagcgagacgacgcacaggtctttggcaatgcacagtgtaccaaagcgacgagttccccgaaactacagcgcaatcgcgacagagtagacctgttccaccagtgtaccaaagcgacgagttccnnnnnnnnnnnnnnnnnnnnnnnnnnnnnnnnnnnnnnnnnnnnnnnnnnnacgagttccccgaaactacagccaggaaggcgctgaggcattattccggcggagtgtaccaaagcgacgagttccccgaaactacagccggagatggtaatggttttgtggagtatgagtgtaccaaagcgacgagttccccgaaactacagcagcaagtgcgagcataattcgatatatcccagtgtaccaaagcgacgagttccccgaaactacagcacacttctagtaattatgtgttttatttttagtgtaccaaagcgacgagttccccgaaactacagctcggggtccggcacgacgcgcgaaggaggagtgtaccaaagcgacgagttccccgaaactacagcgcgccgaaggtatgggggcaccattcaaagagtgtaccaaagcgacgagttccccgaaactacagcccgatggtagacgacgaagtacagcgtagaagtgtaccaaagcgacgagttccccgaaactacagctgatccctatcctgaccaaatacggcctgtagtgtaccaaagcgacgagttccccgaaactacagcccgatttttatcaattcggacttgtggccaagtgtaccaaagcgacgagttccccgaaactacagcatgttttggcaaatctgactctcgacacaagtgtaccaaagcgacgagttccccgaaactacagccgaagatacagcctgtcgctttcgtgcgctagtgtaccaaagcgacgagttccccgaaactacagcgagatcgagtgcgagacggcggcagcggaaagtgtaccaaagcgacgagttccccgaaactacagcaggatgtcccgctgatagacgcgaccaggtagtgtaccaaagcgacgagttccccgaaactacagctatagttctcgtctggttattttcttcagaagtgtaccaaagcgacgagttccccgaaactacagcaaattgccgaaagcgtcattagtgtattgaagtgtaccaaagcgacgagttccccgaaactacagctgtaggtataatctcgctctttgacctctagtgtaccaaagcgacgagttccccgaaactacagctacaccgccctgggcatgcaagcagctgtgagtgtaccaaagcgacgagttccccgaaactacagcatatttactaccttgttgcacaaggaacaaagtgtaccaaagcgacgagttccccgaaactacagccccgggagcgacaggcagagcacagggggcagtgtaccaaagcgacgagttccccccaagcatattgatggtttgaaaggagtttcaggtgattcattcgggtgattcaatccaaaccagcctttccatgtaacccagtaacagcaagcatttcctgatggccaggtgaagatgagggtggtacattcaatgtctccctccttctccgccagaatattttcggggtcccgggtttccggggccttttttgtggatcgttgagaaagaattgtttcagttgtgctgatctgcctccagtccagccccggaagggtaaaatagcagatgaattggtgaggggatattttcatttcctcagcagggcagccatgaccggaaatctaaggacgagcgcggccgaaaggacaagttcgggcaaagcccggggaaaggggaaggtggtcaaggttttagtgctgttgccggtcctgttgatgaccattttggcgacattgccttgcctggcccagggcgcgatggaacccctgccgggtgcctatgacctgcgagagttcggtcatgtcacgccggtgaaggaccagaacggcaagaggccggacggcacaagcgatatcggcaccaccgtagggctctgctgggcattttcttcgatcgcctgcctggaaagcagcatgctgaaacagggtattaccctttcccccatagatgatgatgccaacctttctccctggtacctgggcagccatatcggctacaaccggccctgccttgagttcaaccccgaccttatccccgggatcgagccgcccaccactttcggttactactggcccgggaaaggttggggcggcggcggagctttctggctagccgatcacctgatcagcgggaagccccttccgctctggaaagatgcccccatgcccaccggggacatgacggccagaaaagagctgactttacccgagaccgggaaggggaggcagtaccagctcagggagatggtcatgttcttccgcgaggatttcggcagcgaccttgattacagggaccatatcaagaggttcatcttggagaaggggcctgtgcagtcgatgatccaccttgaaccagtcgacatcgacgggatcgaacggcaggaatgcggcggggccgcgtattccgggaaccggttcatcaacggggagaccgccggtatgttcacgttcgaaaccgaggggctttgcactgacctctatacgcacggcgtggccgttgtcggctgggatgacctccggcgcatttccgtaaacggccgtaatgccatcggggcctggctggttaaggattccatgggggattcttcacacgaagagggatacttgtgggtcgcctacgaggacatggtccaccttaaaccccttgtatccggcctggttgctgatccggggtgcggcctcaggcacgcctcggaataccagacccacccaggagcactttccaggatcggggaagaggagaacttcgatgaaagggaaatcattgaactgggagagtacagctaccttctcaacggttttgaatgcgaggattcgtgggctgtcgccgaatttccgctggataaggaagaagtgatgagaggtgtggccttcttcactgccaaccgcaacgaggaggtctctgtgcagatatacaggggcacgatgtcaggggagccgcttcttgctttggatctggaaattccggagatcgggtatcacctggtagaccttgggcatgatatccatttttcggcaggggacaccgcaatcgtcgccctgtgcttcaggggcagggccggccgcgcaaagctgccgctggtatacgtaagggatgtgggctataatcccacttgcccgaccttcttcggcaccttcgacggagatggttttcaactgaccccatattccgatatggaaggcaactgctcatttttcattcaggccgtcatggccgggaaatagcgttgaaggtcgatccgggcatttcaggtctcaagggtgacaccagatcagcgatcctctgcaggggttccagccctgtgcgacgggaggccgtaaaactccgccaggcccggaagggagcaacggtatacggttccccgggtgccgcaggccaactggatcccctgcaggggatcgctccataatggaggttcatctaatgtctgaacccgtccttttcaaagggtacctggagccatccttcaattggaatgaaggggatgaacttatcctgcagcccgttttcatggtgcctgtagaggtcttcaggacaggtttcctgataaggcccgaatacaagacggtaatggccatagtcgaggccgttggggggaaggtgcagttcatcccggaaaagaaggctcccggggttctcgaaccggagccgggcggccgccgtcttccggccaatatttctgccgacagggccttgcggagcgcggaaagcgcggctgtaaccgaagggcgggaaggctggagagccctttccggttcttcccacgcaatgacccgggaggaaaaattaagggcttgctggaagatctgggtacggcatggcgaaaccctgacggattcggtaaatggcaattccatgaaagctggagaactgctggggctgatacttccctgatcgatgaggcatcaacccggaacaacccgaaagggaaaggttccctttcgggatcactcttcctttgagtctgagataggggctatatctatcagtgtcccgatcagtttttcaagttcaaccatgtcagggttgcccgtctcggccaggcatttttttacatagcttttcaggatctctatgcaggcattctgcatggccttacgtgccgctgacagttgaagaaggacttcctggcacggtttaccctctatgaccattctctgtatcccccgcagctgcccttcaaccctttttaacctgttgagcatggctctctgcctgggatccatgttatcaagctgttctataagcgacattttcgccattgctatcttcctcccgatattgtttttagtaataagtaggtatacggggtatatggtattccacaaattgttgccggtcaatcatcaactatgatatactccccggtggcccttatcacgcacacgatctgacgggtgagggggtgtccgcgcatgcgcgggttccgagcccggatgatggtcgtggagggaaaaccattttgaggaggggaaagatttggcagtagtaagcatgaaacagctgctggagtgcggggttcatttcggtcaccagacaaggcgctggaatcccaagatgaagccctatatcttcaccgagaggaacggagtctacatcgttgaccttcagaaaacagtcaaaggcctggagaaagcctatgactttctcagggaggtttccaaaagcgggggaagcgttcttttcgtgggcaccaagaaacaggcacaggagaccatcaaggacgaagcagtccgctccgggcagttttatatcacccatcgctggctgggaggtcttctgaccaatttcccgaccatcaagaagagggtcgcccgaatggtcgaactcaactctcccgaattccttgagggttccacaaagtggaccaaaaaggagatagccggttttgccaaggaacgcgacaagcttgagaagtacctcctggggatcaaggacatgcgcgatgtgcccgacgccctcgttgtcgttgaccccaagcgcgaagacattgcggtcctcgaaggcaggaagcttggcattcccattgtcggcatcgtagacaccaactgtgaccccgaccttatcgactacccgataccgggtaatgacgatgcgatcagggcaataaagcttattatcggtctcatggcatcggctgttatcgagggcaggcagggcacggacagcgctgtcgaggaagaagccgatgtttccgagcctgaagagggcgacgaggactccaggctcgaacagaccgagaagatcgatgaaaatttcggcaaggtagaggaagtcattgtcgacaaggaactgctggagagaaaaggctggaaggaggcctaggttttcatgtccgtagatatggatgctgtaaaagaacttagataccgatctggagctggcattcttgattgccggaaggccctggacgagtgctgcaacgacctggagaaggccgtcgattaccttcgggagaaggggctcgccaaagcggcaaaaaaggcgggaaggactgcctcggagggacgggtcttcagctatatccacacaaatggcaagatcggaaccctggtggagatcaattgcgagaccgactttgtcgcaaggaccgacgaattccaggaactgggcaaagaaatagccatgcagatagctgcggcggccccgtcctatctcagcaccgaagaagttccccagaccgatctcgaaagggagaaggagatctacaggcagcaggctcttgacgaaggaaagcccgagcagatcgtcgacaagatagccgaagggcgtatcgccaagtttttcgaggaaagctgcctgctggaacagaaatacataagggatcctgataaaaagataaaggatcttgtggttcaggagatcgccaaaatgggcgagaacatcgtcgtgaggagattttcccgtttttccataggagactagaacagcgcggggcggggagatcccccgccctttttttgtcctgttactctgtggggggtgttttggatgtcttcatatcacaggatccttctcaagctttcaggtgaggtcctggcgggggaatcttctttcgggcttgacatgaaagctatcagcaatatctgtggagagatagcttcccttgccgagaacggccttgaaatagcaatggtcgttggaggagggaacatttttcggggtgcccagtcaggtgagggttacctggacaggacccagggggactatatgggcatgcttgccactgtcataaactccctggcccttcaaagtgtgctggaacgtataggggttcctaccagggtccagacagcgatagaaatgagagaactggcggagccctttattcgacgaaaagcacttcgccatctggaaaaggggagaattgtgatcttcgctgcggggacgggttctccgttcttttcgaccgataccgcggcagccctcagggcggctgaaatatctgcagattgtctattgaaggctacaaaagtcgatggtatatatgataaagatcccgcgatccatcccgatgccaggctgcttccaaggatctcttacatggaggcgatccagaaacatctgaaggttatggatgccgcggcattttcgctctgcatggaaaaccggatcccgatccttgtggccaacatcctcaaggagggcacgctccgggatattctgatacacggcaaacaggttggcacaattgtccatttctagaaggagtgatgagaatgcccgaccaggagatcagaaagatgaaggataagatggagaaggtccttgaacaccttaagaaggagcttttggggatcaggaccggcagggctcatccggcccttgtcagcgacatcaaggtagactattacggaacacccacccccatgtcacaggttggatccatctccacgcctgacgcaaggcagatacttatcaccctgtgggacaagaatgcggtgaaggcagccgaaaaggcgatacaggcatcttccctggggatcaacccgtcagttgacggtgagaacatcaggcttgtcgtgcctgaactgacaggtgagaggcgtgtggagctgacgaagctggtgaaaaagtgtgccgaagacgccaggatagcggtcaggaacctcaggcgcgaatcgaacgaggccttcaaaaagatggagaaggaaggaactatcagcgaggattccctgcatgaccagcttgagacgacacagaaaacgacagacgagtacataa

SEQ ID NO: 3544 - DNA, 7071 bp, synthetic construct
  misc_feature 1..7071: note = Synthetic
  source 1..7071: mol_type = other DNA
cgggcgaggcgtacatcggggcctcgccggcccatttccacttcgggtcgccggtggccaggtcgaacgccatgaccgcgccgttgccctgtccgcccaggtgcgcgaccaccacggcgtccacgatgatcggcgacatggccgtgaagaacttcggcacgaccttggggaactcgtccttgcgccacaggaccttgccggtggcggcgtcgaggcaggagaggaccccgcccgcgcccagcgtcacgacctttccgtcggccaccgcgggcgaactgcggggccccgggtgccgcgcggccgggccggtcacggcctgcgccgcgtacttgtccttccacacttccttgccatcggccgcgctcaggcacagggtgacctcttcatcaccctggcgtgcgaaaacatagagtttatcgcccaccagggcgggcgttgaatcgcccgagcccaccgtggtcttccatttctgcgccagttccttcggccacgcctggggcgcggtgaagcccgtgacctttccgtcgcggttggccccccgccactggggccaatcctgcgccagcgcgccggttgcccccgccaggatcacaccgaccgccattgcgacgatccatcgatttgcgtttctcatggcgcctcccatccgattctccgtgaactgagattgccccttggttccgccccgatgacggtcgtgggacatcaggatattgtaacctggcggcccgccctggccacagtaatccgcgccccggccgccggggcgctcgaattgtgggtaacttttccgggcgccattttgcgcctccaaaacgcgcttttttgcccttccggagggcaaaaacggccctggcgctagcgccagagggggtgaccccccaaaatgttaagatgggcatgacgaaatgcgctcgtttttgatcgctttttgacggaaaacgtcgcctttttgatcgattttgactcgaatttgatggtttttgacaggcactatttggcacgagccgttgtggataacttgttgcgaaaaagcaacgccggggaacggggcaacccaggtgagaaaaaaggacggccgccgtgaggctttcgcctcaccaaaaaggcgaacaccgtggggaccttgcggcccacgcacggcgttcaaggacgctccgtagaggcgtcgcccgcggaacgattgtcccttactgtgacattgttgcaggggaatcgccgctctggtacacttattacgcttacagtagcatgacaccgctcttttgtcaaggggattccgcatggcatacgcaagagaagacgtgggggagtacatgctgggcttggacatcggcgtgggatccgtcggctgggcgctcatcggactgaaggacggcaagcccgaccgcctcatccgcctggggtcgcgggtcttcgacgcgggcatggatgaaggcagtttcgaggcgggcaaggagaactcccgaaatgcgtcacgccgacaagcccggcaggcccggcggatgaccgagcggcgtgtgcggcggcaggccaaactctatcgccttctggcccgggcgggccttctgcccgaaggcgaccatccggaacttctttgtggccccccgcgcgaggaacgggcgcggtacgtccacgagcaactgaaggccctcgacgtggacctgaagaagaagcaccttcacggcaagcccggccgacaccggcttgaacaggtctggccgtactggctccgcgcccgggcgctcacggagaaactggaaccgtatgaactcggccgcgccctctatcacctgggccagcgccgcggattccagtccaatcgcaaggaactggccgcccttgacgaagccggggccgaagcggcgcaaaagaaacccaagggcaagaagaaggatcacggcgaggagaaggacccgcgcaagaaggagttgggcgaggtcaaggctggcatcaaccaactggaacaggacatgaaggcgctccgggccgagaccctgggccagtactttgcctcgctcgacccgcacgagaagcgcatccgccaacggtggacatcacgtgacatgtacaaacatgagtttggcaagatatgggatgcccaggctgggcattatctggccatcctcaccgatgaccttaagaagcaagtgcaccgggccatgttccaccagcggcccctgaagaaccaggcgttccttatcgggtggtgcgagtttgagaagggccgccgccgcgcgccgtggtccttgctcatcgcccagcggttccgcatgctccagcaggtgaacgacctgcggatcgtcacttccgggaaccctgccggggaccacctcacggtggagcagcgcgatgcgctcctggccagactggaacgggaaggggaccttaagttcaaggcggccaaggaactcctcgtgccgctggggctgcccaaaggcgcccggttcaactgggaaagcggcggcgaggaccgcttcctcggcaaccgcaccaacgccaagatgtttaccgtgttcggcgaccgctggtggcaattcaacaaggccgaccgcgaaaggatcgttgaggacgtgtggagcatccagaaggccgaagccctggcccggcgcggcaagaaggcatggggcctggacgatgcggcggccaagaaattcggctccctggcgctggaggacggctactgtaacctctcgcgccaggccctggcgaaactggtgccgatgcttcaagacggcgttccgtatgccacagccgtggaagaggcctacggcaagaaggactgtaagcccgtggcctgcctgccccctgccgcgcgccagtacccccacatccgcaaccccatggtgctgcgggttctctcggaacttcggaaggtcgtgaacgccattgttcgcaagtacgggaagcccggcattatccgcgtggaactggcccgcgacatgcggcggtcgaagaaacaacgcaccgaagtctggaagcagaaccgccagaacgaatcgctccgcaagaaggcaatcaagaagatatttgacgaattgcagcgtgagaatccttctcgcggcgacgtggagaaggtcctcttggccgaggaatgcgattggacgtgcccttacaccggcaaccgtttcaatatgaacgggctgcttgggccgacgccgcagatggacgtggagcatatcatcccgttcggccgctccctcgaagattcctttgtgaacaagaccctttgcgatgttgacgagaaccgccacaagaagcgaaacaagacgccattcgaggcctacggcggcacgactcaatacaaggacattctggcccgcgtccggggattcaagggacgcgcggcggacgagaagatgcgccggttcctgatggagaagatcgattccatggacgagttcgccagccgccaactcaacgacacccgttacgccgccacgcaggccaccgactacgtggcgcttctgtacgggggtcagtacgagaagggcggcaagcggttcatccaggcctctcgcggcggggtgactgcctacctgcgcaacgagtggcaactgaacagcatcctgggcgacggcggcacgaagtcgcgcgacgaccaccgccatcatgccgtcgacgccgttgtcacggccttgacggaacccggaaccatcaagatgctctccgacgccgccgagcgggcaccgaaggaaggccgacgccggtttggccgcctcgaagacccgtggccgggctttctccaggacgtgcgcgcggctgttgaagcggccatggtgtcgcaccgcgtttcgcacaaggtcaacggcccgctccatgaggaaactaactacgcccccagccaggaacgtgacaagcagggtaagcccaactccttcacggtccgcaagcccatcgatcaactcaccccgaatgaggtggaagatatctttgatgaagtcgttaagaagattgtgaaggcgaaactggacgccctcggcggcgacccgaagaaggcgttcaaggattccagcactcacccgttcattgctacgaagtacggccgacgcattccgattcatgccgtgaggattcgcaagtccgtggcggcgttcgaggtcggccggggcatgcgtggtcgctacgtgaccaccgagtccaaccaccatgttgaagtgtttgaggttggcaagggccaatgggacggtcgcgtggtgtcgcgttatgaggcgctgcgccgtcaggcaaagggagcaccggtggtcgaccgcaaggcccaaggccaaggggaatggcttttctctcttacttgcggcgacttggttgagatgaaaggccgcgatggtaagccatgcttgtatgccgtgcgcaccgtgtgcgagagcagccaaggccgaatcatcattgcctacgccaaggctacagacgccaggaagaagaaagacatcattgcggccaaggattggaggcaagtgggccttaatgcgcttgcccaaatgctttgcaggaaggttctgcttatgcccttaggcgaggtccggtacgcccatgactgagcgcatcctggacctttcggaatcggctgggcccctcagcgtccgctacggcctattgggggttcagtgtaccagagcggcgattccccgcaagccacagcaactcgccaacgggttcaccttgtttctgaagtgtaccagagcggcgattccccgcaagccacagcacaagggcggaaagccggccaagaagaaagagtgtaccagagcggcgattcccccgcaagccacagctactatcacgttccctgcccgctctgcggcagtgtaccagagcggcgattccccgcaagccacagcgggccggagaatgacgcccctcccgcgatgagtgtaccagagcggcgattccccgcaagccacagcgctgaggctcaggttggtcgaagtgacgttagtgtaccagagcggcgattccccgcaagccacagcaaggaccagacgggcatgcaggacgtcggcagtgtaccagagcggcgattccccgcaagccacagcgttcggccgggcgatggccgaatgcttcgaagtgtaccagagcggcgattccccgcaagccacagcagacttcaggaagcatgcagggaggcctgcagtgtaccagagcggcgattccccgcaagccacagccatgaagcatctgcgtcgcgccgccgataaagtgtaccagagcggcgattccccgcaagccacagcgtcacggcgtcacgacttcgaaggggatggccggcaacacgcccaggggtctgcgccgctgaccggcctgggtctttgccttgccaggcaactcaggcgcatccgcaaaggcgttgacgatcaggtttccttggaggccgggcttggccttggcggcatcgcattgcagcacaatctcggtgcccccgccggacggcgatacgttcttgatggcgattccatccggcggatcgctcaactccaggtggaccttgcccacagacgggccggcgaacgcggcaatctgaacccgggccgttccgccggcaggaattctgacgggcgcttcaccgaggattctcacgggggtcctggacatattgcgtcccgacacggccactttcatttcctgggcgggaacgagatgccggtaggcgaacgcctgcatcatgtcttccgccggcacggccgcccggacgacgtcccgtccctggatcgtcgcgcggccttcccacgacagggtaaggggttccggcgagggcgtcggcggggccgtcaacgtaaggcgcacctggccctggttcgccggcacgcgggcgccgcccagcgcgaatccctgcggcgcatccttcaaggccagcgcaatctcgccggagaacccgtctttccggagggcgtacacggtgatggggacggttgcgccgccccggacgttgatgctggccggcacgacccgcaactcaaaatcgggttgcggcgggctgaggcgcaggcggtaggcatagtccgggccgcccttgtgctgcgcatcgcccaggtgaaggtagtaggttccgtcggcgggcagcgtggcgcggaggcaggaatccgcgtggtgggtggtcaaccccgcgcccttgtcctcgcaatcgtcattgaacgccagttgcttgccggcggcatcggtcagtttgagcgcggaatccagcggcgagtccagccggcgcgcataaacttccgcgacgatctcgctgccgccgcggccctggaagcggaacacgtcccaatcatcgggctggtcgatgcgcccgttcacaatgagcggaagcgtgaccggctgcgcgatcgccggctggttgttcggttccttatccaggccttccggcagcgtgtccgccgcaaagggcatcgggttggaaaccagccccaccgtgtgcacggaaaccggatgaatgcccggcccctgggccgccggcatcagttgggtcaccgggaggttccagcccttcaactggatgggggtttgggcgccggccgggccgcccagcgggaagaggcccgtgacaaacggcagttcgcccagggcgatgcgataaacgaaatcctcgcggccgcggtagatggcgtccttgatctcgatcacgtattcgccgtcgctggggatctcgtaatacaggaccggatcggggtgaaaacgaaagtcgtcgttatacgccacttccttccccccggcatcgtaaagcgccagcgtggcctggaaccacccgggcacggcgtcggccagatacgggatcaattcccgcgcacgggtgatgacgaccaggcgctgccccttgcgcgcctggaaccggtaccggtccaccgcgccgggcatgatctggccgttgacgacggccggcagcgtgagggtcatctcgggttccgccttgcggcccttgggttcgaaggccgctctcgccacggcacttctctgctgcgtgatggtcttcgtcgccttttcggagaactccggcaactggccgacccagaaagcgagcggattggataacccggtcggcgatgcgatcctcaactcccgccggcccatctcggcctccgg

SEQ ID NO: 3545 - DNA, 5680 bp, synthetic construct
  misc_feature 1..5680: note = Synthetic
  source 1..5680: mol_type = other DNA
aaatgttaggcgccaatctgcccggcaaattcgtcgagcagttctggaaaaaagccgcccccgaaggcacttcaaagaaccgcatagtagaggccatggcacggctctggctggattcgcctgccgaagttcgccgccagtatctgtacccggaagagaaaggcagcagcagcctgtcaaagctcattgaaaaggccgtcattgattttttcgcccagatgcaggacaaaaccgatgatcctgatcttgccaatgccgtgaataaggcaatagcctctcatgaaggtcgcaaagctgctggtaggaaaagttccggcgaaagatctcgcaaagctcgctgagcttgcgttccttggcaaagtcgatcgtcgcttctgcggcatggtctgacatttgtaaacctcgcacttacaggggtttgcatcgctgccggcggttttcccgctgcggttcattttattcaccggcctgcgattcaactgccattatatacccgaacaaattcctgacaaggcctaaaatccggccaattttcgccgtgttatgtaaatacttaacaggcagacagttatgatttcaaaaaaatttcggggaaaataaatgggcgcgatacgagtcaattattgaagtttttcccgcggcgatgccgattagtatggtgaattgctacatttttgaacctttctaccctcccgcagcctgattttcacaggtcaggctgtatttctattgacaaccccgccaggacggctaatattgcccgctctatcgtcttcatctttcctcctccgacagcctggccttcgcggtcaggctgtatttatttgctgagattgctaagtggcggcattgccagataatgccttgctatatggcggttgtggtggtaaaatccgcatattgaccggaatttaaattaccgataaaaaaaagacccctctggaggggtcgaggacattccgaagaatggagccttgcagacaaagttgtctttactgtggaaaaagcaactcgtcgctttgatacactagtgcaattatatttaacgggtttgccgttgtcaatagtttttggaggaaaatcatggggcctagtcagccaaaaactcaaatactagctgtcgatatgggtagtaactctataggatgggcgctcattgaactccacaacaatcagcccgaaaagattgtagattgtggcgtgcggatttttgaagccggaaaagatggtgatattgaatctggacgtgccgaatcgcgggcaacggcgcgaagacatgcgaggctgcttaggcgccagactgaaaggaggtgcaggagaaagcaaaaaattatcaatcatctacaaaaaatgggattgttacccagaggtaaggcaaaggatataattcctgagattgatcgttcaatatcaaaagaaaataaggttggcttcaacgagatccgccaaggtgtttcccctgacaatttactaccttatctgctgcgaaaaaaagctctcgaccataaactccaaaaacatgaacttggtcgtgcattttataatctggcccaacaccgcggctatatctcgaatcgaaaaaccaggcaacaagatgatgattccaaggttgtttttgctggaattgccgaactcgaggaggaaataaaggccagaaatgccagaactatcggtgaatattttgcatcaatcgaccctcacgaaaagagaatccgcaatcgctacacacaccgacagatgtttacacatgagtttgactcaatatggactgcccagaaaaaacattacccgcaattacttacggaccaaaactacaaatacctatttgatgcgttcttctcacaaagaccgctaaaatcttcgaagaatctgattggtaaatgtgaactcgaaccaaactgccgaagggcacctgttgcttgctttgagtatcaaagatttcgttatcttcagttgataaacaacatcgaattacttgataagcagactggcgaaattcggattttaactcaaaaagaaggcagcaaattaattaaagcggttgaaaccgcgggtgatcttactttccatcaagcaaaaaaaataattggtactaaacctaaaacggtggaattcaatttggaaaaaggcgaagaaaagaagattataggtaacagaataaatggtgctatatgctcggctatcggcaacgactggctcaatctcagtgaccaacagagacagaatctgctacacgatttaaaaagcatacgcagcagtgatgttttgaccagaaaactaacatctaaatacgacttcacgaaagagcaagcacatagcctctctgaaatatgctttgaacaaggttacgccagtttatcaagaaaagcgattcgaaagctgttacctttgctcgagcaggggaaaccatatgcaactgcaagaaaagaaatttatggtgaaatgatcgccaatgtcgaacaaaaggatattctcccgccggttaatgaattttgtataattcgcaaccctgttgtacagcgaacaatgaccgagctccgcaaattagtgaatactattatcagaaatcacggtaagcctgaaatcattcgtgtcgaactggccagggaaattaagcaaccggaaaaactaaggcagcaaataacccgaaaaatgcgccaaaacgaagcccttaatgagaccgcaaaagaaagaattcgcgtaaaagtacctgtccaaagtccatcacgggatgacatcttaaaagttcgtctcgcagatgaatgtaattggcaatgtccgtatacacagaagcctatacaaatggccgatctggtcggagagtcccccaaatttgacatcgagcacataatacctttttcacggtgcttggatgattcttttgccaacaaaaccctttgctatcatgaagaaaatcgcagggtaaagtgcaataaaaccccctatgaagcttactgcggccatgatgaaaaatgggacgcaattattggctctgtcatgcgcttcaatggctcatatagggactccaagcttcgaaagttccagactacaccacagcaattacaggatattcaggaatttgtcagtaatcaacttaatgacacacgatacgcatcaaaagtcgcgatgcagtatttatctacactttatggcggtttatgggataaccagggcaaacgaagagtatttgcggtaaacggccaggtcaccgcgataataaggaatatgtgggatatgaacagcatactcaacgacggaggacgaaaagagcgcaacgatcaccgccaccatgccgtcgatgctattgccgtcgccctgactacaagcggactcatacatcaacttacaaagcaatctttgccgcattggaaacgaagtggatataaggcaagattccgacagctgccattaccgtggaaaacattccatcaggatattcaaaaggctatagattcgattattgtttcgcaccgagtcgatcacaaagtaaacggaccactgcatgaagaaacaaactacgctcgaatcgaacacaacggccaaacatatgttagggtaaacagaaaactaaacactctcaaacctagcgaagttgcaaaaattgcgcattcgcacattcgctgtgccgtggaaaataagctaagagagctgaacaccagcgatcccgaaaaagcttttgctgatgagcgaaactatcctgtcctgccaggcagacacggcaaaggctgcaccattcgttccgtgcgaataaactgtaatgccaaccccaagcctgttggtatgaaagataatccaagattctgcacaccaaaatcgaatcaccatatggaaatactggaaataaccaactctgcgaaaaaaagcaaatggcaggcggttgttgttgatactctggaagcgatgaaccgtctaagaatgaaagagcctgtagtaaagcgtaatcatgggccaaaaaagaaatttatattttcaatatcacccggtgatactctctattttaacaatccggatggcttccccgaatatctacgagtcagaaccgttagcgtctccaattctggtgcaacggaaattgccggctccgctcttaatgatgccagaaaaaaagccgacatgaaaaaagctaaacagtggtatcgaatccattcgatgaactccttcaaaaacaaacagccgcaaaaggttgtggttctgccggacggcaaagtaataaaagcaaataattaaatttttatgaatcgcattgtggacatatctgaatcagcggcatatttgtcccttaaggatgagcagctggttataaaactggaagacaagccgcaagcgagcgttcccgtagttgacctggctgccgtaattatatcacatccacaggtagtcttaacccacgccatcatttcaaaactgtctctcgaaggggttgccttaattgtctgcgacaagtctcatcttcctgccggaatgttgctgccgcttcaaagtcaccatgcccagacacaggtatttgccgcccaggccaaaatgactctgccaacgaaaaaacgactgtggaaacagattgtccaggcaaaagtaaaagcccaggcgattaatcttcagagattaaaagattccgattttggcttgctggagttgacaaggcaagtgaaatcaggagatactactcatattgaatcccaagcggctaggagatactggcaagcattatttggcaagcattttaccagagacttttgtgcaaaagaccacaatcgacacctaaattatggttacgctgtactccgggcaataatcgcaagggcaatatgtgcagctggcctgcacccgtcgcttggcctgcaccatcaccacagagaaaatgcttttgctcttgccgatgacataattgaaccgtttcgtccgacagtggacgattgcgtttaccgcttgtctttgattaaagacttatccgagcctttggactcgcaaagtaaacaatttctcattgataagatatgcttttattcaaaattttattaccgaaatactaagcgcagcttgtttgacattagctcaataatagcaggctcgctggcaggagtttgcaaaggtaaaagacataatctggctttgccggaaatgtcggctgccatattgtaggtttcaaaggttcgaggaaaggatgcccgaaagaatttttaaagtattggcaatgaaaggagcgattatggccaatcggaaaaatctttcggagtataggggtatgtggttgttcgtaatgttcgatttgccggttaaaaccaaggccaacaagcggaattatgtgcattttcgaagggaacttataaaagacggattcacacaattacagtattcaatttatgcccgatacttttcctgtgaggatgccgccaaaagccaccgccggaaaataaaatgttttttgccccctcaaggtcaggtcagactactggctgtaaccgataaacagtttggcaaaatgcagatttttctcggaaaaattcccaaaagcgcagaacccccaccccagcaattgctgcttttttaggctactccaccgcttaagcctttaacagaaagaggtttacaaaacatagagtgtatcaaagcgacgagtccctgtaaaccacagccttatacctgccccgctttcacgccagactagtgtatcaaagcgacg

SEQ ID NO: 3546 - DNA, 5532 bp, synthetic construct
  source 1..5532: mol_type = other DNA
  misc_feature 1..5532: note = Synthetic
cgtggacgaccgggagatcctctgcctgacggtccttcaagcgttgttgggcttcgagtccgatcacgagttctaccagtggttccagtccaacgcggtcctgcggcaactgtttccgcggcggctcgcgcggcccaactgggccgaccgccgggcgaccggatccccatcccactgtgcatttgttgtatcggcgttgcattgaggatactttagatgttccgtaagcgtccggtgaaccccatcttgtagtcctgccgcgaatgcacgatgatccggccatgcaccagtaaggagcgagtgcatggccaagggcaaggagcgaagcaagagcaaggaagcgttctggcggaagatggtgcgcgggcacgtgcacagtgggttgtcgatccgggcgttctgccggaagcacgccaatgacagcaggcagtgcggcggcacgtaggccggggcaccccccggctgccggggttcattgcgtgccgcgacctacgccaacggatgccggggcgttgccccggccggggctacatactgaacgtgcgggcaggaccagggccgacggcgcaaaaaaagaacgccccactgggaggcgttcaggttcgctccgtagagcgttgcctgcggaacaattgtcccttactgtaacattgcagggcaatcgccgctctggtacacttataccttgacttctaacgtggctgccctcccatgtcaaggagaatctttcatgtcagagaaaatttccggcgagtacatcctgggtcttgacatcggggccagttccatcggctgggccatccttggcgcccccaagggcaaacccgccaatctcatccgcttaggcgcgcgcgtcttcgacgcgggcatggaagaaggcgacttcgcggcgggcaaggagaactcgcgcaatgccgcgcgccgccaggcccgccaggcccgcaggctcctcagtcggcgcgttcggcggcaacgcaaggtgttcaatctccttgtcaaggcgggtttgctccccgcaggcgatccggccgaggtgattcctgcactcgacgcggcgctgcgcgccaagttcatccgtccaatgccaaagtattctcccgagcgccgccaggccgagcaggtcttgccctaccgcctgcgcgctttggctctaactcagaaactggaaccgtttgaactcggccgggcgatctaccatctcgggcagcggcgcggcttcctcagcaaccgcaaggccccgccgaagaaagatgaaaaactaggcgaggtcaaggagcacatccataaacttgagaagcaaatgaaagacgcgggggccgagactctggggcagtacctcgccggactcgactccgagaccgagcgcatccgccgccgctggacatcccgcgccatgtacctcgccgaattcgccaagatctgggccgctcaagccatacaccatccgggaatccttaaccaggaactcggcaagcgtctgcaccgcgccatcttccaccagcggcccctcaagagccaggccggactcattggcacctgcgagttcgagcggggacgcaagcgcgcaccttgggggctcaccctggcgcagcggttccgcctgctccagcaggtggtgaatgcccgcattgttgcgccccacggggccgaccgctatcttaccgccgacgagcgcgacgcgctgctgagggtgctggaacgcgaaggcgacctatcgttctcaaaagcccgcaaactcctgaatctgccaaggggccacgggttcaactgggaaagcggcggcgaggagcgattcctcggtaaccgcaccaacgccaaactcgccggcatcttcggcgatcgctggtgggccttcaccgacgccgagcgcgaccagatcgtcgaggatgtgctcagcatccataaggacgacgccctgacgcgccggggccagcgccgctggggcctcgatgccgaggcggcggcaaacttggggcagaccgcccttgaggacggctactgcggcctctcgcgtcaggccctcgccaaactcgtgcccatgcttcaggacggcgtgccctattcgatggccgccaaggaagtctacggcgagaggcatacggaacctctggactccctcccgccgccggcgccaacctacccgcacatacgcaaccctatggtccttcgggttctggccgagttgcggaaggttgtcaatgcgattgtcaagcagcacggcaagcccgccgccatccgcgttgaactggcccgcgacatgcgccggtccaagaagcagcgcaccgagtcgtggaagaagatgcgccagaatgagagggatcgcaagaaggccgccgagaaaatcgcccaggaaacacgcgttcaggaacctggccgagcggatgtcgaaaaggtcctcctggctgaagagtgcaactggcagtgcccatacacgggcaaatccatttccatgtcatcgctccttggccccagcccggagttcgacgtcgagcacatcattcccttcagccgttgccttgaagactcttttgtgaacaagaccctttgcgaggtaaaggagaaccgggaccacaaacgcaaccgcacgccctacgaggcctacggcgccagccctgacagatggcatgacgtcttggagcgcgttaagcgtttcaaaggcagcgccgccgaaggcaaactccgccggttccagcagcagaccatcgagggcatcgacgaattcacggatcggcaactcacagacacccgctacgccacgcggcaagcgacccaataccttgcccttctttacggcggtctttacgagaaggacgggcggcggttcatccaggccggcaagggcggcgtcactgcttacctgcgcaaccagtggcaactcaacaccatcctcggcgacggcgggaccaaaacgcgcgacgaccatcgtcaccatgccgttgatgccgtcgccatagccctgaccgatgccggcacggtcaagatgcttagcgacgctgccgtccgcgccgcccaaaaaggtacgcgctggtggcgggagaggattgaagacccctggcagggattcctcgaagacatgcggcaggccgtcgagggcatggtggtctcgcaccggatttcacgcaaggtcaatggccccatgcacgaggaaaccaactacggtccgtcgagagagcgagacccccagggcaagccggttttcttctcggtccgcaagacccttgacgcccttacggcatccgacctcgaaaacatcgccgacgaacgggtccgcgaaatcgtaaaggcgaaagtcgatgcccttggcggcgaccccaagaaggcgttcgcttctgccgagaaccatccctgcattcagaccaagcacggccgccgcatcccaatccacgccgtacgcattcgcaagtcggaagccatgatcggcgtcggccaaggcccgcggcaacgttacgtggcctcgggctcgaaccatcacgtcgagatcttcgaggtcaaggacaagaaggggagtacgcggtggaaagggcgcgtggtttcgcggtatgaggccatgcgccgcctggccacgcgccggccagtggtggaccgcacgccgcctgaaggcggccggttcatcttctccctgacttccggcgagattgttcaactggcgggcgaccaggggcggcaggaactgtaccgcgtccgcaccgtcagcctgtccaagagcgcaaggattgagattgacctagcgcgcctgaccgatgctagactgaagaatgacataatcaagtccgacgattggctgaggattacctctctggacaagttggccgcgagttcctgccgcaaggtaattgtcacgcccttgggagagattcggtacgccaatgactgaccggattcttgaaatctcggacgaaccggcccgcctgagcgccaggggcggcctcctggtcatcgcgcgccccggccgcgatgaagtcagtttacctttcgcggacctggcggtcctggttgtttcgcatccccaggtttcgtatacgcaggcggtcctcgcggaactggtggccagcggtggggccttcgtggcttgtgacaagcggcacctgcccgtcggcatgctcctgcccctggatgcccactacgttcaggtcgaaaggtttgcggtccaggcccaggccccgctgcccctaaggaagcgcctgtggcgcgagatcgtccgggccaaggtccgcgcccagggcagccttctggcggaactccacggcgacgaccaggggcttgtcgccttggccgggcaggttcgctcgggcgacccgagcaacgttgaggcccaggcctcgcgccgctactggccggcgctttttcgggacccggccttcaggcgcaacacggaggccgaggaccagaaccgcctccttaactacggttacgccgtcctgcgcgccatcgtggcgcgggcgattgcggcggcggggcttcatccttccctcggcctccatcatcacaaccgctacaacagtttctgcctggccgacgacctgatggagcctttccggcccacggtggacaaggcggtttgggatctggtccaatcgggcggacgggacctggccctcgaccgacaggccaagaccgctctcatccaggccgtgacgggccgcctgacggtccaaggccagtctcgaacgacgttcgatgcggcttccatcgccgcttcgtcgctggtggcggtgatcgaaaagcgggccaaacgcctcgtcttgccggagacctcgcgtgcccaggccgacgcgtgaactctctgagtacagcgccatgtggctctacgccatgttcgacttgcccgtggacaccaagagggccaggaaggaatacaccagattccgcaaggtgcttatctgcgagggtttcctgatgcttcagttctcggtgtacgccaggtactgtatctcggaagaggccagcgcggcccaccgtaaccgaatccgggacttactgccgcccgatgggcaagtcaggctcctgtcggtcaccgaccggcagttcggaaaacaggaggtctacaacggaaaaaggcgcaaagaacccgagacgcagcctcagcaactgctgcttttctgaggctctaaacgtccgaagcccccgcagccacaagggttacgaggggttcagtgtaccagagcgacgattccccgcaagccacagcctggcgcgagggcgccccgatcacgcgctgagtgtaccagagcgacgattccccgcaagccacagccagaagggccatccaggaatgcgtcctcagagtgtaccagagcgacgattccccgcaagccacagccgtttgccccgtcatccccttcccgtccgtagtgtaccagagcgacgattccccgcaagccacagccctctcgccgtacggcaccacgctttcctgagtgtaccagagcgacgattccccgcaagccacagcctgagtggcagcgcgccgccggcggaccctagtgtaccagagcgacgattccccgcaagccacagcgatcaagcgtcggg

SEQ ID NO: 3547 - DNA, 5454 bp, synthetic construct
  source 1..5454: mol_type = other DNA
  misc_feature 1..5454: note = Synthetic
gcggatgatcccgagcatgcggcggcggtgggttcgcgccggccggcggcccgccggcgagcggcgcgggagcgagaggcccgcctggagcaggcgatcgccgagttgccggagttgaagaagcggccggaagaagcggcccggagggcgggccacggcgagtgcggccggaagatccgcgccaaagaacttcgcgtcagcaccacggaccccgaggcccgggtgatgaagatgcccaacggcgggttcaacccggcggtcaacgttcaacgggcgacggacaccgagagccgcgccgtggtcggcgtggaagtgacgaacgaaggcaccgactcggcgggtctgtccgagccgctgcgggagcaggtcgaacagcgcaccgggcaaaaagtggagcaaccgttgctcgacggtggatacctcaagaccgaggacctgggaacgggacggcgactgccaaaacggcagggacggccgaaggcgggaccggcggcgcaaaaaaggaacgccccactgggaggcgttcaggttcgctccgtagagcgtggcctgcggaacaattgtcccttactgtgacattgcagggcaatcgccgctctggtacacttatacctctatttctaacccgcgtgtcttgccaagtcaaggagaatccgtcatggccgaggaaatttccggcgacttcatcctgggtctcgacatcggggccagttccgtcggctgggccatccttggaaccgataagggcaagcccgtgaagctcgtgcgctgcggcgcgcgcgtctttgacgcgggcatggaggaaggcgacttcgcggccggcaaggagaactcgcgaaatgccgcgcgccgccaggcccgccaggcgcgaaagctgaccaaccggcgctggcgccgccagcggaaactcttcaatctgctggtcaaggccggacttcttccgcctggcgatcccggcaaggttatgcccgaactcgatgccactttgagggcgaagcatctcgcgccgctcttgaaatactccgccgagcgccgccgccttgagcacgtcttgccctatcgcctgcgcgccatggcgctgaccgagaaacttgaaccgtttgagttgggccgcgcaatctaccatctcgcccagcgccgcgggttcctcagcaaccgcaaggccccgctcaagaaggatgagaaacccggcgaggtgaaggcgcagattacgcaactcgaaatcaagatgaaagaggccggggctgaaacgctcggccagtacttcgccggcctcgaccccgaggaagagcggattcgccgccgctggacctcccgcggcatgtatcaagttgaattcaagaaaatgtgggacgaacaggcgcgccaccatccggccattctcacggaagaactcggcaagcgcgtctaccgcgccatcttccaccagcggcctctcaaaaaccaatcgaaccttatcggcacgtgcgagtttgagcgcgggcggaagcgcgccccgtgggggctgctcttggcccagcggttccgcttgctccagcaggtgggcaatactctcatcgttgccccgaacggtgctcggcgcgcgtttacggccgacgagcgggataggctgctcaactttcttcaacgcgaaggcgacctgacgttccccaagacgcgcaagctcctcgatctgcccaaggggcacaagttcaactgggaagaaggcggcgaggagcgcttcctgggcaaccggaccaacgccaaactggcggcaatctttggggagcgctggtggggattctctgaaaccgaccgtgaccaagtggttgaggacgtgctaacgatccacaaagacgaggcactggcccggcgcggggcgaagcactggggcctggacaaggaggcggcggccaggttgggtcagatggccctggaggatggccattgcgccctctcgcgacaagcccttctgaaacttatgcccatgctccaagacggcgtgccctactccacggctgtcaaggaactctacggcgaccggcatggggacgctttggattgtctgccgccgcccgcgcccgcgtatccgcaccttcggaatccgatggtcctgcgcgtcctggccgagttgcggaaggtggtcaacgccgtgatccgcgagcgcggcaagcccgccgccatccgcgtggaactcgcccgcgacatgcggcgctcgaagaaacagcgcaccgaagcgtggcagaagatgcgccagaacgaaagggaccgcaggaaggccgccgacaagatcgccaaggaagcggctatggagaaccccagccgcgcggacgtcgagaaggtccttctggccgaggagtgcggctggatctgtccctacacgggccgcgccatctccatgaatgacctcctggggccgacgccccagttcgacatcgagcacatcatcccgttcagccggtcgcttgacgattcgttcctcaataagaccctttgcgaggtcaaggagaaccgcgaccataagcgcaaccggacgccgcacgaagcctacgcccgggatcctgagaagtgggacgcgattcttgcccgcgtgcggcgtttcaggagttcggccgccgatgccaagctccggcggttccagcaagaggaattggtggacttggaagaattcacaaagcgccaactcaacgacacacgctacgcaacgcggcaggccaccgattacctggcactgctctacggcgggctatacgagaaagacgggcggcgattcatccaggcgagcaagggcgggacgaccgcctacctgcgcaacgagtggcaactcaacaccatcctcggcgacggcggggccaagtcgcgcgacgaccatcgccaccatgccgtcgatgccgtcgccatcgccttgaccgacgcgggcaccgtcaagatgctgagcgatgccgccgagcgggccacgtcggaagggcggcgccggttcggcagggtggaggaaccctgggcgggtttcttggacgacgtgcggcaggccgtgcaagctatcagcgtttcacaccgcatctcgcgcaaggtcaacgggcccctgcatgaggagacgaactacggcccctcgaagcggcgcgatgcccagggcaggcccgagagcttccgcgtgcgcaaacgtctcgacgcgctctcgcccgccgacgtgaagctgatagccgatgagcgggtacggcaactcgtcgaggagaagctggccgaactcggcggcgatgccaagaaggcttttgccgattccaagagccatccgtgcattgtgaccaagcgcggccgccgcatccccatccactgcgtccgcctccgcaagtcggaggccatgatagaggttggtcaaggcccgcgcctgcggcacgtggcctccgggtccaatcatcacatggaaatcttcgaggtgaaggataagaagggcaagacgcactggaaggggcgcgtggtttctacatacgaagccatgcggcggttggcgacgcgccgccccgtggtggacctgacaccgcccgacggggggcgattcctctttaccctggctggcggagaggtcatccaagtgaaccacaccaatggcgaaccgcttctttatatgattcgaagcttctgggatacaccgtcgggttgccgtctcaggcgggacagaatcaatgatgcaagaaggcaggaagacatagagagaaagggccgcgaacctatgttgagcatcctacaagaggagagttgccgcaaggtcaccgtcacacccttgggcgaggtgaggtacgcaaatgactgaccgcatccttgagatctcggaccatccggcgtatctgagtgtcagcaacggccttctggtcattgcccaggacggaagggatgaccagacggtgcccctggcggacctggcggtggtggtggtctcgcacccccaggtcaagtacacgcacgcggtgctggcaggtttgacggcggccggggcgtctttcgtgacctgcgacgcccggcacctgcccgtggggatgctcctgcctatcgacgcccactacgttcagacggagcgtttcgccctccaggcccaggccccgcttcccatgcgcaagcgcctgtggcaggagatcgtccgggccaaggtgcgcgcccagggcagacttcttgccgccctgcatgggagcgaccagggcctcatcgccctggccgccgacgtcaagtcgggcgacacagccaacgtcgaggcccaggcgtcgcgccgctactggccggccctctttgccgaccaggcgtttcggcgcgaccgcgaggccgaggaccagaaccgcctcctgaactacggctacgccatcttgcgggccatcgtgtcgagggcgatatgtgccgccgggcttcacccctcgctcggcctccaccatcacaaccgctacaacccgttctgcctggccgacgacctgatggagcctttgcgccccgtggtggacaaggcggtgtgggacctgattcgcgcggccggcgccgctgtggaaatggataggcgcaccaagacggccttgcttgaggccgtcacgggccgcgtcagagttgagggggaatcgcggacgctcttcgatgccgcttccatcgccgcctcgtcgctggtggcggtgcttcacaaagaggccaagcacctcatcttgccggaggtggactatggttcggcaaagacgtgacctttccgggtacagcgccatgtggctctacaccatgttcgacctgcccgtggactccaagaaggcacggaaggagtacacccgtttcaggaaggccctcattcgtgaggggttcctgatgcttcagttctcggtctatgcacggtactgcatctcggaggaggcgaacacgggctaccgcaaccgaatccgcacactgcttccgccggacggccaggtgcgcctgctctcggttaccgaccgccagttcggaaaacaggaggtctacaacggaaaaaagagggcaaagccggagccggagccccagcaactcatgcttttctgagggctcaaagcgcagaaccccccgtacccaaatgggttacggggggttcaagtgtaccagagcggcgattccccgcaagccacagcctccgccgggtcatccaaatccttcagttcagtgtaccagagcggcgattccccgcaagccacagctggtgaacgtgaacttgcccgtgccccgccagtgtaccagagcggcgattccccgcaagccacagcatcccgcccggccgcacctccgcgagttccagtgtaccagagcggcgattccccgcaagccacagcggggtccggcggccagcctgtgagggacgaagtgtaccagagcggcgattccccgcaagccacagctcgatgagctgcacgtccagcccaaccgcagtgtaccagagcggcgattccccgcaagccacagcctcgccgcccccatccccggcaa

SEQ ID NO: 3548 - DNA, 5228 bp, synthetic construct
  misc_feature 1..5228: note = Synthetic
  source 1..5228: mol_type = other DNA
cgcttccgacgtatgccacttcgctgtcatcaacccccagaccctcgccgttgaaaaatccttcgccgcgcccaaaggcggcgactccgcgagcgtcatcggcccgctcggccgcggcaggtatctctgcgccgtccagaaggacatcccgctgctcggccgcgccgaggatgcctcctggttcgtcctcgacctcgccgacttccgcgcgcccgacccttcggccctgcgccccttcccgaaaggcctcgacatgattctgccgggcccgcgcccaggcctcttcatcttgaaaatcggccgctccgtcgaactctgggacatgacgaaaaacgcccgcgtcaagaccctcgccgccgacttcaccggctaccgcatcgccgtcgaccgcgactgcctttacctctgctatgacaaggaaatcgtcgtcaagcctttgcggtgacgccgaccgctgaacgaaaaaggagcccgcgtcttcgcgtgcccctcgggtttgtcatacctcgggctacaatggacgtgtacgacgactcgcgcccaaaaagaaaacgcctcactgggaggcgtttaggacgcgccgtggcgcgttgcccgcggaacgaaagttctgttgaactcacgaaccatttactgtgaattgcagaacaatcgccgctcaggtacaatctatcatatttctaccacgcgggactcacaaagtcaagggggactttcatgaaaaatgagaaaaatcctgggcacatcctcggcctcgacatcggggtcaattccatcggctgggctattatcgggacaagcgatggcaggccaagttcgatagtcgccacaggggtgcgggtgtttcctttcgacgcggatttcgagagggacttcaaagccgggaagcccgcgtcgcttgccgcgccaaggcgggaggcgcggctcatgcgaaggatgactgagaggcgcgcgagacggcacacgaagctatttaacatgctggcacgtgcgggcctcttgccggcggggaagccggagcacgttattccggcactcgataaggagatcttggcaaaatacgggcgcgcgggcagccgtactctcgcgcacgtacttccctacgaacttcgcaagcgcgctctggacgggaaaatcgagccgtacgaactcggacgggcgctttaccatttggggcaacggcggggttttttgagcaaccggaagacggcaccaaagaaggacgaggatgagaagagcgttgtcaaaggcgggatcagccaactcgcgcaggaaatgaacggcgccggagcccggaccttgggcgagtacttcgcggggcttgatcccacgcaccagcgaatacggaaccgatacacaagccgcggcatgtacgaagacgagtttgagaggatttggcaaggacaggcaaggcattatccggaggtgcttacgcacgaattgaagaaaagacttcacaagtgcatattccaccagcgggcgctcaagagcgcgaagggtcttgtggggacgtgcgagtttgagccgaagcgacggcgggctgcttgggcacacatcttgtcgcaacgattcagaatctggcagcaggttaacaataccgagattattgatgacaacggggagataaagcctctgactgaggatcaacgtcagacgctttacaatgcccttgacaaggaaggggacttaagctttacggaggccaagaaaaggcttggattgtcaaggcaatgcacgttcaacttcgaatcgggggaggagaagcggttcgtgggcaacaggacgatcgcgaagcttgccggcattttcggcgacaggtggtgggcattctctgacgaggagcgggacaagattatgcacgatgtcatttcgattcagaaagacgcgacgttggcgaagcgcgggcgagagagatgggggctatccgaggaggccgcaagcgaattcggggctgtggagttgcagccggactactgcaggctgtcgcggcgggcgatgatgaaactgatgccgtacttggcgaagggggcgcggtacggcgaagccgtgaaggccgtctacggcagcccctttgcagccgagcaggcgctgggtgcgctgccgccagtgtcgaaatatgcagccgcgatacgaaacccggcggtcacacgcgtactttcggaggtaaggaaggtcgctaacgccatcgtgggaaagtacggcaaaccggaccaggtacgcatcgagcttgcgcgggagatgaagaagcccgccaaggagcgcagggaaataatgaagaggaaccgcgagaacgaaaagggtagaacgaaggcgtacggcagaatcctagcggagacgaacatacagaacccaaccagagatgacatcctcaaggtgcttttggccgaggagtgcaggtggatttgcccctacactggcaggtcgatttcgatgacagcacttttcggttctcatccggagtttgacatagagcacatcatgccgttcagcgtgtcgcttgacgactcgtttatgaacaagacgctctgctacgtggaggagaaccgcagcattaagaagaaccggacgccgtacgaggcgtacagcgggagcccggcgaaatacgaggagatcctgcagcgggtgaatcggttccaggggacgggacgagaggcgaagctgtggcggttcaagcagggagaaatgaacttcgatgatttcgtggagcgacaactaaacgatacgaaatacgcgacgacgcaggcggcgggttacgtaggactgttgtacgggggcgtcatcgacgcagaccacaaacggcgtgtgcaggcgagcaaggggcagatgacggcgtatctgcgtaacgagtgggacctaaatgggattcttggaggcggggaaaagacgcgggaggaccacaggcaacatgcgattgacgcgatatgcgtggcgctcacggacgcggggatagtgaaggcgctgagcgacgctgcgggacgggctcagcgcgaagggagaagacggtttgggagaatggaggagccgttcgagggcttctgggatagagctgcggagtcagtcctttcgataaatgtctcacaccgcgtttcacgcaaggtaaacgggcctcttcacgagaggaccctgtacgggcccgctcctgagcttgataagaaggggaacccggtttaccacgttcgcaaatcccttgataagctgtcggtaggcgaggtcgcagacatagtggacgatacggtcagaaaactggttggcgaaaaactcgcgcaagtgggcggccccgctaacaaggtctttagtaacccggcgaatcaccccgtgcttactacgaaggacggacggcagataccgatacaccgcgtgcgtatccgcaaggcggtggcggctcaaagaatcggacatgacgcaaccagccggtatatcctgccggggtcaaaccatcatgtggagatctttgaaacaaaggacgagaaggggggtataaaatgggtgggacatatggttacccggcttgaggctgcacgcagacttgcccggcaccaaccgattgtcaataaggagcacgaggaaggcgaggagtttctgttctccctcgcgccgggggagatgattgaggtcgacggcgatgaggggcgggagctttacgtggtgcgcgtgacgagtatcgacaagagcgggtacatcacgatttcctacgtgcggcacacggacgcacggaagaaagatgtgataatgggaagagcgaagcagagcggagactctactgaacaatcgggtggcgtacgggggcgaaggaaaccaggggaaagcgactggaagaaaagtatgccagaaagcctgaaaaggcttaattgccggaaagttctgataactcccttgggagaggtgcgcagggcgaatgactgacaggatggtggacctgtctgaagagccggcgagattggcggtgaggaatgggctgctggtcatcgtcagggaaaacggggaggaggcaactgttccattagatgaccttggggtgctggtcgtatcacatccgcaggttaccttcacgcaggcggtgctttcggggcttgtcgagtcgggcggcgcgtttgtgacgtgtaacgccgcccgtcttcctgtcggaatgctccttccgattgacgcgcactacatccagaccgagaggtttgccctccaggcgcgggcggcgctgccggttcgtaagaggctctggaggcagatagtatcggccaaggtcaaggcccaggggcggttactccagacgctttacggatacgacagggggctaatcgccctttccgggagggtgaggtccggcgatccttcaaatatcgaagcccaggcctcgaggcgctactggccggcccttttcgcggacgagagtttcaggcgagacaggaacgcggaagatcagaacaggtttctgaactatgggtacgcgatactgagggcgatagtggcgcgggctgcaacggctgcggggctgcatccgtctgtcgggatacatcaccacaacaggtacaacagtttctgcctcgcggacgacctcatggagcctttgaggccgagggtggacagggcggtgtgggagcttgtgaaggcgaggggcaagcaggcgccgatggacagggaggcgaagggcgcgcttttgggagggattacggcgcggatggaagtggccggagaatcgaggagcattttcgaggcggcttcgaggatggcgtcgtcactcgtggcggtttttgagggggagcgcaaggggcttattatcccggagatttgaattgggcgagaccttggtaagtctatcggggtaccggccggtgtggctatttacgatgtttgatctgccggttgacacgaaagaggcgcggcggcggtatacggagtttcgcaaggcgcttctcagggacggtttttcgatgctgcagttttccgtgtacgcaagatattgcgggtccgaagagacctccgagatccacaggaagagaataggggcggcggtgcctgacgagggccaggtgaggctcgtatcagtgacggacaggcagtttgagaagatgcaggttttctacggaaaaacaaggcatgagcctgagaaggcgccggaacagatggcgtttttttagccgggggaaatgcacgaacccctcgcaaccgttggggttacgaggggcccattgtacctgagcggagattgcccgcaagccacagcaccgcgggat

SEQ ID NO: 3549 - DNA, 4667 bp, synthetic construct
  source 1..4667: mol_type = other DNA
  misc_feature 1..4667: note = Synthetic
ggctctcctccggccgcgcggggttctgccagctcttgccgacgacccgccccgcctggaatcgaaccgtgaccatcgtcaggtccctcgggtcgtcttgcgtgtacacccattcatcggcaaattggtacgtgggagtccctagaaattccttcaccttgtcggcggtcatgccgagggagacggcgtcataacggccccgggccggcccgcacccggccagggcggcgccaaggaccagcaggaccgcccagaggaccagccgccgcgcccccatgccgcccccttccctccgtctcactcgcccaacttgatgcggcgctgggcgatgatcttctcatcgaaaccgcccggcggatagtacgtcgcctggacgatcacctgcgtgcccggggccccggcggtccagatcagcgggaacacgtaggaccggtcgatcgggtcatagtacttccggttgctctcggcgtcgagcaccgcgacgtaccagtggccgagccgggtgcccatcggctcgcccgtgcgaggccgggtctcgaagacctcgatccggaacgagcccaccgccttcgtcgggtcgccgaactgatcgagcggctggacgcggacctccaggcccggctgaccgttctcgaaggtcttcatctgggtgaagaagccgatcgtgagggtcttgggcacgaacatcctggcccagggcgggacgggcccgatgcccccgggcggctgcggaaggaccgccggcggctccttcggaatgggcgcttcgcccaggacctcgcggattcggaccaggccgctgacgatcttgtcgcgttcggcgtcgtcggagatcttcagcgcctcgccgcgcaggacgtcggccaggtccatggccatgaggcggcgctggtccgtgcccgtccctgcgggcccgcaccccgccgccagcgccgcggccagcaggccgccgcataccgtccacgtgatggagccgcgcatcgtaaagccctcgattctatcgcgacttacgagaggcccattataggtgtggccgcgaaaaactgtcaacgaataaggccgcgcccggcggagcccgcgcccggcggccgccgcgcaaaaaagtgaacgccccgctgggaggcgttcaggttcgctccgtagagcgttgcctgcggaacgattgtcccttactgtgacattgcagggcaatcgccgctctggtacacgtatagtctatttcctaccatgacagcgttcacaagtcaaggagaatcccgccatggccagcgaatccgccaaaccttacgtcctgggcctcgatatcggcgccagctccatcgggtgggccctgattgggaccagcaataggaaacctcagggtctgatccgctgcggcgctcgcgtgttcgacgccggcatggaagagggcgacttctccgccggcaaggagaactcgcgcagcgccgcccgccgccaggcccggcaggcgcggaagctcatcaaccgccgtctgcgccggcagcgcaagctcttcaatctgctcgtgaaagccggcttcctcccggccggggacccggcccaggtcctcccccagttcgatgcagctctccgcaagaagcacatcgcgccgctcccgaagggctcccgcgagcgccgccaatgggagcacgcgctcccctaccacctccgcgccatgggcctcgcgcacagactcgaacccttggagttcggccgcgcgatctaccatcttggccagcgccgcgggttcctcagcaaccgcaaggcgccgccccgcaaggacgagaaaccgggcgaggtcaaggcccatatcaccgaacttgagaagaagatgcaggacgccggcgcccagacggtcggccaatacctcgcggctctcgaccccgaggaggagcgtattcgccgccgctggacatcccggcagatgtacctggatgagttcaagaagatatgggtcgcccaggccgcccatcaccggaccatcctcaccgaggacctgtgtaagcgcgtctaccgcgccatcttccaccagcgccccctcaagagccagaagggcctcatcggcacctgtgagtttgagcgcggccgccagcgagccccgtgggggctgatcctggcccagcgattccgcatgcttcaacaggtgggcaatgcccgcatcgtcgcgccgaacggcgccgcccgcaacctcacgtcggccgagcgcggcacgctcctggcggtcctcgaccgccagggcgagctttcctttggcaaggcccgcgccctcctgaagctccccaggggacacgccttcaactgggaatccggcggcgaagatcgcttcatcgggaacaagacccacgccagactcgcccaggtcttcggcgaaaggtggtggtcctttaccgattcggagcgcgaccaggttgtcgaggatgtgctgagcatccagaaagacgaaacgctctcccgacgcggccagcggcgctgggggctcgatcccgaggcggccgcaaggttcgggcagctcgcgctggaagacggccactgcggactctcgcgtcaggccttggcgaaacttgtcccgctccttgagcgcggcctgccctactccacggccgtcaaggaagtctacggcgagcgacgcaaggagcccgtggacttcctgccgccgcccgcgcccacgtacccgcaccttcgcaacccgatggtgcttcgtgtcctggccgagttgcgaaaggtggtcaacgcgatcgtccgtcagcatgggaagcctgccgccatccgcgtggaactggcccgcgacatgcgccgctcgaagaaacagcgcaaggaatcctggcagcggatgcgccagaacgaaagggaccgcagggaggccgccgcgaagattgcggcggaggccggcatccaggaccctggccgcgcggacgtcgaaaaggtcctcctggccaacgaatgcaactgggtgtgcccctacaccggcaagagcatctcgatgaactcgctcctgggccccaacccggaattcgacgtggagcacatcatccccttcagccgatcccttgacgactcgttcaccaacaagaccctctgcgagatcaaggagaaccgcgaccacaagggcaaccgcacgccccatgaggcctacgccgggcagccggacaagtggctggagatactggcccgtgtccggcgcttcagaggcagcgccgccgaagggaaactccggcgatttcagcaggagaccgtggagggcatggacgatttcgcctcgcggcaactgaacgacacccggtatgccgcgcgccaggccaccgactatctcgcccttctctacggcgggccgtacgagatcggcgggcgccgccgcattcaggcaagcaggggctcggtgaccgcctacctccggagcgaatggcaactgaacaccatcctgggcgatggcggggcgaaatcgcgcgacgaccaccgccaccacgccgtcgacgccgtcgccatagcccttaccgatgccagcacgatcaaaatgctcagcgacgccgccgagcgggccgccatcaaggggacacgatggtggcgcgaacgaatcgacgacccttggtcgggcttcctggacgacgtgcgccaggcgatcgagggcctgaacgtctcgcaccgcgtctcgcgcaaggtcaacggcccccttcacgaggaaaccaattacggtccgtcgaaggcgcgggatccttcaggacgccccgtctcattcaccgtgcggaagcacctggaggatctatccctgcccgacgttaagctcatcgccgacgaacgggtccgacaactcgtcaccgccaagctggaggaacttgggggcgacccgaacaaggccttcggcaggcccgagaaccatccctgtttcgtgctcaaggacggccgccgtgtgcccatccacgccgtgcgcatccgttcaaggcaaagcgccatgcccgtcggccaaggcgcgcgtcttcggtacgttgcctctggctccaaccaccacatggaggttttcgaggtgaaagatgccaaggggaagacccgttggaagggccgcgtcgtctcccgttacgaggcgatccgccgcctcgccaagcgtcagcccgtcgtggatcgtaccgccccggagggaggacggttcctcttttcactcgcaactcatgagatcatgagccttacggacgccaacggcgcagtcaacctataccgcgtgcggaaagtgagccaatccaagagcggcagcatcgagattgccggcgccaggctgaacgacgcccgcctcaaggatgatatcatcaaggcgggcgactggctccgaatccgatccgttgacgacctggcccgcaagacctgctgcaaggtcctcgtgacccccttgggggaagtcagggacgccaatgactgaccgtatccttgagatctcggacgagccggcccgcctgagcgtccgtagcggcctgctggtcatcgaacgcgccgaacacgaagagatgaccgtcccattcgccgatatcagggccctcgtggtttgtcacccgcaggtctgttacacacaggccgtgttggcagaactggtcgcccgaggcggggccttcgtcgcctgtgactcgcgccacctgcccgtgggcatgctcctgccgctggatgcccattacgtgcaggtcgaa

SEQ ID NO: 3550 - DNA, 4228 bp, synthetic construct
  misc_feature 1..4228: note = Synthetic
  source 1..4228: mol_type = other DNA
cgcgcggcccttcgtgtaggcagtttcaccgcaaagggcgcaaaggacgcggagaacagcacttacgattgcagaatgcagacccgcccgccgtagcccgccgggccttggggcgggcgaaggaggggtgcagagtgcagaatggacggcaacggcaagaggcaacggccacggccacgcgcgcaaaaaaaagaacgcctccgatgaggatggggggcgttcaggtcgcccgcgtggggcgttgcctgcggaacgattgtcccttactgtgacattgcagggcaatcgccgctctggtacacttctggtatctttactaccatgccagcgctgacaagtcaaggagaatcttcgccatggaagataaacgcgccacaccttacatcctgggtctcgacatcggcgccagttccgtcggctgggccgtgatcgaccttgaccgcgggaagcccgctcatctcatccgctgcggcgcccgcgtcttcgactgcggcatcgagggcacgaacttcagcgccggcaaggacaactcccgcagcgccacccgccgccaggcccgcatggcgcgacgacttctgaaccgccgcttccgccgtcagcgaagactcttcaatcttctcgtcaaggcgggccttctccccgccggcgatcctgcccaggttctcccggcccttgacgctacaatccgggcgaagcgcctggccgccttccccgccaaatcggccgagcgccgccgccaagaacaccttctcccctaccgtctccgcgcgctcgccctttccgagaaactcgatccccacgagattggccgcgccctgtatcacctcggccagcgccgtggtttcctcagcaaccgcaaggcgccgcctcgcaaggacgagaagcccggcgaggtcaaggcgcatatcaccgaactcggggagaagatgaaggcagccggtgtccggacgcttggcgaatacttcgcttcgctcgacccggagcaagagcgcatccgccggcgctggacctctcgccaaatgtacctggacgaattcgcggcgatctgggccgcccaggcgtcccatcaccccgccattctcaccgacgagacccgtaaacgcatccaccgcacgatcttccaccagcggcccctcaagagccaagcgggcctgatcggcacatgcgagttcgagcgcggccgcaaacgcgccccgtggggccttcttatcgcccagcgattccgcacgcttcagcaggtctgcaacgccctcatcgtggcccgcagtgggatcacccgagaccttacgacagccgagcgcgacacgctccttacggtccttgaccgccaaggggaactttccttcgccaaggcccgcaaacgcctcaaactgccgccgggcagcaccttcaacttggagtccggcggcgaggaccggttcctcggcaacaagaccaacgcccggctcgccgaggtcttcggcgaccgctggtggagaatgtgcccctgggggcaggaccaggtggtcgaggacgtcctcagcatccagaaggacgaggcccttgcccgccgcggccgccgctggggcctcgacgccgacgcggccgcgcggttcggccagacgagccttgaggacggctattgcgccctctcgcgccaagccctggcaaaactcgtccccctcatgcggcaaggcacgcagggcaagccctgctcctactccacggccgtcgaccaagtctatggcaagcggctctccgagcccgtggacttcctgccgccccccgcaccaacgtacccgcacctccgcaatccgatggtcctccgcgtcctggcggaactgcgcaaagtcacgaacgccattatccgcgagtacgggaagcccgacgccatccgcgtggaactcgcccgcgatatgcgacggtcaaagaagcagcgccacgaatcctggcaacgcatgcgccaaaacgagagggagcgccgcaaggccgccgagaaaatcgccgccgaggctcacatcgacaaccccagccgcgccgacatcgaaaaggttctactggccgaagagtgcaattggacatgcccctacaccggcaagagtatctcgatgagttcgctgttgggccctacgccgcagttcgatgtggaccacatcatccccttcagccgctgcctggacgactcgtttatgaacaagaccctctgcgaggtccgggagaaccgcgaccacaagcgcaaccgcacgccccatgaagcctacgccgccgaccccgagaagtgggaggagattctggcccgcgtgggcaggttcaagtccaacgcccgcggcgagaaggtccgtcgcttccggctggagactctggaggacctgagcgatttcgccacccgccaactcaacgacacgcgctacgccacgcgccaagccaccgattaccttgcccttctctacggcggccggtacgaacgcggcggacgcctccgcatgcaggcgagcaaagggcccacgacggcctacctccgcaacgagtggcaactcaacacgatcctcggcgatggcggcggcaagtcccgcgacgaccaccgccaccacgccgtcgatgccgtcgccatcgccctgacggacgccggaacggtcaagatgctctccgacgccgccgagcgggccgaacgcgaaggccgcagacggttcggacgggtcgaagacccgtggtccggcttcctcgaagacgtgcggcaatcgatcgacggcctctgcgtttcgcaccgcgtctcacgcaaggtcaacggcccgctccacgaagagacgaactatgcaccctccaaggccagagacgccgctgggaacccccggcactttgccgtgcggaaacgcttggaagaactttctcccaaagatttcaagaatatcgtggacgaccgcgttcgcgacttggtgacggcgaagttggccgaactcggcggcgaacccaaagccttccaggaccccaagaaccatccctgtttcgcgctcaaggacggccgccgcatccccatccacgccgtacgcgtccgccgatccgaagccgccatccccgtgggaaaggacgcccgcgagcgatgggtgcaatcaggttccaaccaccacatggaggtcttcgaagtcaaggacgccaagggcaaaacgcattggaagggccgcgtggtctcccgctatgaggccatccgccgcctcgcaaagcgcgagcccctggtagaccgcacgccccccgacggcggacggttcctcttctcgctcgcccacggcgagatcatccatctgacggacgccaatggcgaggtcgtcttttacagggtgcgaaaggtgagccaggcgaagagcggcagcatcgagatcgcggtcgcaaggctcaacgacgcccgcctcaaggacgacatcatcaaggccggcgactggctcagaatcacttccatggataccttggctcgaatggcctgccggaaagtcatcatcacccccttgggcgaggtgcgaaacgccaatgactgaccgcatcctcgaaatctcggacgagccggcccgccttgccgtccgcaactcgcttctggtgatcagacgcgcaagcggcgaggaagtcacgatacccctggcggacctggccgtcctcgtcgtctcgcacccgcaggtctcctacacgcaggccgtcctggccggactcgtggcccaaggcggggcctttgtgacgtgcaatccccaacacctgcccgtggggatgctcttgccgctcgacgcgcactacatccaagccgagcgattcgccgtacaggtcggggcctcgcttccccttcgcaagcgcctctggcgcgagatcgtccgggccaaggtccgcgcccaagggcttttgctttccacgatccacggaaacgatgcgggcctgatcgccctggcgacccaggtccgctcgggcgaccccagcaacatcgaggcccaggcctctcgccgatactggccggccctcttcgccgatccggcgttccgcagggaccgagacgcgcaggaccagaaccggctcctcaactacggctacgccatcttgcgggccatcgtggcgcgagccatcgccgcggccgggctccacccgtcgctcggcctccatcaccacaaccggtacaacagtttctgtctggccgatgacctgatggagccgttccgcccgaaggtcgacggcgccgtctggggcatcgtcgccaagagcggaccggccgcgatgc

SEQ ID NO: 3551 - DNA, 4171 bp, synthetic construct
  misc_feature 1..4171: note = Synthetic
  source 1..4171: mol_type = other DNA
cgcattttctgtacgtaagtgttcctgcaaaaacgcgacttacgattttcgcccccccccaaaccccctttttggcccgaagttttccacaaaacggccttggcgctagcgccagggccggtggaccccgaaaatgttaagatagctaagacgaatttgcgcgctttttgcgactttacgcgcgccgaccccccctacttgttcacttttgatcaaaacacgcgctgtttttgcgcgcggcctttgacgtaagtgtttctgcaaaaatgcgacttacgtgcacggcgcgaactgcgggaaccgggaaccgggactggggaacgggacggcgactgccaaaatggcagggacggccaaaggccggaccagcggcgcaaaaaaggaacgccccactgggaggcgttcaggttcgctccgtagagcgtggcctgcggaacaattgtcccttactgtgacattgcagggcaatcgccgctctggtacacttatacctcgattcttaacgcgcgtgccttgccaagtcaaggagaatccgtcatggccgagaaaatttccggcgacttcatcctgggtctcgacatcggggccagttccgtcggctgggccattctgggaaccgataagggcaagcccgtcaagctcgtgcgctgcggcgcgcgcgtcttcgacgcgggtatggaggaaggcgacttcgcggccggtaaggagaactcgcgcaacgccacgcgccgccaggcacgccaggcgcgaaagctgaccaaccggcgctggcgccggcagcgcaagctcttcaacctgctggtcaaggccggacttcttccgccgggcgatcccggcaaggttatccccgaactcgacggcacgttgagggcgaagcttctcgcgccgctcttgaaatactcccccgagcgccgccgcgttgaacacgtcctgccttatcacctccgcgccatggcgctgaccgggaaacttgaaccgtttgaactcgggcgcgcgatataccacttggcccagcgccgcgggttcctcagcaaccgcaaggccccgcccaagaaggatgagaagcccggcgaggtcaaggagcacatcatcgagcttgagaagaagatgaaagaggccggggctgcaacgctcggtcagtacttcgccggtctcgaccccgagcaagagcggattcgccgccgctggacctcccgctgcatgtatcaagctgagttcaagagaatctgggacgaacaggcgcgccaccatccggccattctcacggaagaactcggcaagcgcgtctaccgcgccatcttccaccagcgccctttgaagaaccaatccaaccttatcggcacgtgcgagtttgagcgcgggcgcaagcgcgcctcgtgggggctgctcttggcccagcggttccgcatgctccagcaggtgggcaacaccctcatcgtcgccccgaacggtgctcagcgcgcctttacggacgacgagcgggacaggctgctcagcgtccttcagcgagatggcgaccaaacgttccgcgaggcacgcaaactgctcaatctgccgaaggggcacaagttcaactgggaagaaggcggcgaggaccgtttcctgggcaaccggaccaacgccaagctggccgccgtcttcggcgaagattggtcgaagatgtccgagacggaacgcgagcaagtggtcgaggacgtgctcagcattcacaaggacgacgcccttgagcgccgcggcgcgcgccgctggggcctggacccggaggcggcggccaagctgggccagacggccctggaggacggccattgcgccctctcgcgacaagccctgctgaaacttatgcccatgcttgaagacggcgtgccctactccaaggctgtcaaggaaatctacggcgaccggcatggggacgctttggattgtctgccgccgcccgcctccacgtatccgcacctgcggaatccgatggtcctgcgcgtcctggccgagttgcggaaggtggtcaacgccgtgatccgcgagcacggcaagcccacgaccatccgcgtggaactggcgcgcgacatgcggcggtcgaagaaacagcgcaccgaagcgtggcagaagatgcgccagaatgaacgggaccggaagaaggccgccgacaagatcgccaaggaagcgggcacggagaaccccagccgcgcggacgtcgagaaggtccttctggccgaggagtgcggctggatttgtccctatacgggccgcgctatctccatgaaagacctcctggggcaaacgccccagttcgacatcgagcacatcatcccgttcagccggtcgcttgacgattcgtttctcaataagaccatttgcgaggtcaaggagaaccgcgaccacaagcgcaaccggacgccgcacgaagcctacgccgggaatcctgagaagtgggacgcgattatcgctcgcgtgcggcgcttcaagagttcggccgcccatgccaagctccggcggttccagcaggaaaccactgaaggcttggaggagttcgcgtcgcgccaactgaacgacacccgctacgccacgcttcaggccaccgattacctggccctgctctacggcgggctctacgagaaagacgggcggcgcttcatccaggccggcaggggcggcacgacggcgtacctgcgcaacgagtggcaactcaacaccatcctcggcgacggtggggcgaagtcgcgcgacgatcaccgccaccacgccgtcgatgccgtcgccatcgccttgaccgatgcaagcaccgtcaatatgctgagcgatgccgccgagcgggccacgacggaagggcggcggcggttcggcagggtggaggaaccctgggcgggcttcctggacgacgtgcggcaggccgtggaaggtacgagcgtttcacaccgcatctcgcgcaaggtcaacggccccctgcacgaggagacgaactacggtccctcccgcgagcgagacgcccaaggccggcccgcctcctttgcggtccgcaagcccatcgagtctctctctgccaacgatgtcaaactcattgtggacgaccgggttcgcgaggccgtcaaggccaaactcgacgaattgggcggcgatgccaagaaggcgtttgcggatcccaagaaccatccgttcctggagtcgcgccgcggccgccgcatccccatccacgcggtgcgcacccgccgcgccgagagcgccatcaccgtgggcgagggcgcccgcctgcgctacgtcgcctccgggtccaaccatcacatggagatctttgaggtcacggataagaaaggcaagcggcggtggaaaggccgcgtcgtgtcccggtacgaggcgatgcgccgtcaggccacgcgccgccccgtggtggaccgcagcccgcccgacggcggacgcttccttctttcccttgcccacggtgagatcatggagcttacatccgctgggcgcggcccggaattgtaccgggtccgcaaggtgagcctctccaagagcgggtccatcgaggttgccgccgcccggcttaccgacgcccggctgaaggaccagattatcaagtcggggcattggctgaggatcaggtccttggacaacttggccgcgatggcctgccgcaaggtcatcgtcacacccctgggggaggtccggtacgccaatgactgaccgcattctcgacctctccgagcatccggcgtatctgagtgtcagcaacggccttctggtcattgcccaggacggacgggatgaccagaccgtgcccctggcggacctggcggtggtggtggtctcgcacccccaggtcaagtacacgcacgcggtgcttgcggggttgaccgccgccggggcgtcgtttgtgacatgcgacgcccggcacctgcccgtggggatgctgctgccgattgacgcccactacgttcagacggagcgtttcgccctccaggcccaagccccgcttccgcttcgcaagcgcctttggcagcagatcgtgcgggccaaggtacgcgcccagggaaggcttcttgaggccctgcatggggatgaccagggcctcatcgccctggccgccgacgtgcgctcgggcgacacggccaacgtggaggcccaggcgtcgcgccgctactggccggccctctttgccgatccggcgtttcggcgc

SEQ ID NO: 3552 - DNA, 24698 bp, synthetic construct
  misc_feature 1..24698: note = Synthetic
  source 1..24698: mol_type = other DNA
caggctccacgagcggcacctccctgccaaggaaggcgcatatcgtctccttgtcgctctcatcggaaatagccatcagtcggtcaccgaggcgtatgatcgacttcggtcccgccatctccacctccccggagtcgtggtgcataatgcgggagatcaccacgtcgtacttctccagcaccgacttggactcatagacgctcttgccgtccatccaggggttgctcacctcgagggcgtagaccactgcatcgcgatgggcggcgcgctctctcgcctccagctcccgctcctcgcgctccacatcgatccggaagacccacttcagcaacgacatcgtcaggatcataccgaggatcgccaccgggtagccgagggcgtagccgatgccgacatccccgatggcggagctgccgacggcgcgggcagtctcctgcgtcgcagcgagggcgggcgtattcgtcaccgcaccggagaggatgcccatcagtgtcgccatgggggtctgcgtcacccgatagagtacgtaggagacgacgagggagagaaggatagacaggagggagaggagattaagccgcacacctccctgacggaaggtggcaaagaatcccggtcccaccgtcatgccaatgccgaagatgaagaggatcatcccggtctcgcggacaaaggagagcacctgtggatcaagtttcagacccacgtgcccgaggaagataccggtgaagaggacccaggagacgccgagggagaagcccccgatgcggatcttgctgagtagaacgccgatggtaagcaccagggcgaggatgaagatggaggaggcaatgtcccccgtccagagtaggttgcggattatctcgatcatagagtgaggatactgatggatgaccgagtaacgcctgagtgtctgttcataactttaactcccgaaagaaattagtgtgactataacggcttatgaaggtcgtgtcccggtcgcaagtcggtcttctgacttgtctctgccgcatcggagtcttcccggggcttacccccagtgactatcgagccgaccggctattacatgagacttacagcagcgggtactgtaccggactctcaccggtttccccacctccgcacagcggaggcatttacttgcgcctcgggcactcccaagacgaagcaaaggtagcaaataaatgagatgcggtgatcactcgtcgaatcaaacgtggtactgcaacttgccccggcgggagaaaaaagcgacctttgtgtagagtatggagatggtctccgtgcggaagcgactgagtgactattatgaaaaggaatgataaggaggaggcctttgtggaggtcttcaactccctcaacctcgaggaagtgcgactggcggagacgctcctccagtcggagaatattatggtgaccgtctccggcgagacggggacacaggtcttcgggcgggtgcagggcttgaccggtggtgtctcgctgatggtcccggcgatggaggaggagagagctcttcggatcctccgtgaggcggggtatttgccccttgcggatcagaccgacagcgtctataccgtgggtaagagtcggaagaataggagcgcctccagacaattctggctcatcatcgggctgatggcgcttctcctcatcctcctcgctctccagaacttcatctgaccccatgcagcgtaggatcatctatatcaccggaggagctcgctccggtaagagtcactatgcgcagatgctggcggagtcgctctctgaccatccgatctacctcgccacggcgcggatcatggacgaggactttgcgcggcgggtggagcgtcaccggcgggatcgcggggagcagtggacgacggtggaggagccacttcgcctgagcgaccacgacctcacagggcaggtggtgctgatggactgcgtcaccctctggctcaccaacctctacgacgagcatggttacgacatggacgagaccctccgggctgccacggcggagtgggatcgcttcgtcgcccgggacatgacgctcatcgtcgtctccaatgagctcggcatggggctccacgcttcgtcggagggtgcgcgtcactttgtcgaccttcaggggtgggtcaatcagcacatagccgcatcagccgatgaggctttctttatggtttcgggcatagccatgaggctaaagtagaatatggtaacagtagaagaagtacagcacaagatcgacacgcgatcgaagatcatcggttcgctcggacagctcgagacgatagctcgtcaggtctgcctgatccaggacacccttacgccggagctgaggcgcccggcactcctcctcttctgtggcgatcacgggatagcggatgagagggtgagtctctcgcccaaggactttacctacaggtgtggctgcaccttccagagaggaaatgcggcgatcaccgtcttctgccggcagtatcattttcacctacgcgtcatcgatgccggcgtggatcgggacttccccgaggagtatggcgtggagccgcggaaggtggggtatgggacgcgaaacttcctccacgagccggcgatgacgatcgaggagtgtcagaaggcactcgagaccggggcagcctgcgtgcgggaggagtactataaggactgtaatgtgatcggcttcggcgagatggggatcggcaacacctcctcctccgctgtgctggcacatctctactccggcatcccactcgaccgactcgtgggacgtgggacggggctgaacgatgtacacttagagcacaagtaccagacgctgaagcgtgccgtggaggctcatcatccggagacacctcttgagatcctcgccacctacggcgggtacgagatagcgatgatggtcggcgggatgatcgaggcggctcggctgcggatggtgatcctctgtgacggcttcatcgccacggcggccgtcattgctgccgaggctcttgcgcccggcactaaggagtgcgtcctctacggccatgtctccgatgagggtggtcataggctgctgctcgactatctcggaggggagccgatcctccggctcggtatgcgactgggtgagggtaccggtgccgtggttgcctatccgatcgtccggtcggctgtcgctttcctcaatgagatggcctccttcgacgatcgacagctggagaattgctacgaggataatcccgacagtatctaccgccatgggactgaggagtgagtggaatctcctgaaggctgcggtgatgtgctacacccgtctgccggcgggagaggtgcacttcgatgcggagacggcgcacgaggcggctcgctatatgccgctcgtgggggctctcatcggtgggtgtggggcggcggtctatgcgcttgccttttttctcctccatctgccgccatcggtctcgtccgtactggcgctctctacgatgatcgtagtgacgggagctttccacgaggatggtttctccgacttcttagacggatttggtggcgggacaagcagagagcgtgtgctggagatcatgaaggacagccatgccggagcctttggcatgatcggcacggtgatgcagctattactgaaggtctgctgcctctctgcactcaccagtccgatctcggcgatggtcgtgatgtgctgcagtgcgcggtcggtgccgctgctgatgatgcacttctccgtctatgcccggcgggagaatagtaagctcagtcgagagtcttacattacctctgacggctccattgcgatcggggtcgccactggtctcgtggcgctgctgacactcgggtggatgcaggctctcgcagtggtggcggtctatgtcctgctcttcctcttcgtccaccgactcagcaaggtgcgtatcggcggctacacgggggacgtgctgggggcgctggagcagatgtgcgagatgggctgccttgtcgctctcctcgccgtggagcgactgatgtgatggagctctacctcgtccgccatacgcataccagtgcaccaagtggcatctgctacggcagagctgacgtctcggtggctgagtcattcccgcaggaggctgccggggtggtcgccactctcgagggcaccggctatgggcgtgtatatagcagtccgctcctgcgctgccggctcctggcaaaggagctcgccgacacgatcaccatcgatgcccggctcacggagctcgctttcggcaagtgggagctggtcccctggcagtcggtctatgagcggaaggagagcgaggcgtggtttgccgactacaagcataccgccccgcctgccggcgagtcgtatccggggatgacccgacgggtgcaggacttcatcgactacctgccggactacgaccgcccgccggtgctggtgacgcatgccggggtgatccggatcttcctcgtccgtctccttggctacacgatcgatgagtcctttgcccgcaagatcgcctatggcgaggtggtccacctcgtacgctcagacgatggcgtctggcgggaggagccgatagggaggaggtagtttgtgataatgttagctcgtcagtgcaattgggcaagcttttctgctctaattgtaatgcaaggtttgcgaaataggaatattcttcctacttttgaaccatcgaaggcttcgtcatagatcgggatgacttcgagagggctgaccctacttaatcggggtctgccgtcacgacactttttgcatgcagagctttaggaagatatacaatcggatgctgactgcccatcaggagagcgaccgcaagtccctgatcagcagtatcacgtcatcggatcgtctggtcgctgtgcgcggtgcgcgcggcataggcaagacgatcttcctgctcacctatgcagtccgaaacattaccgcacgtcccgatcagatccaatacgtgacgatgaattacctctacttcgccggtcactcactctacgactttgcgcggaagttttaccaagaagaggggggcaagattctccttgtggatcagatctacaagtacgccaagtggcgcgatgatctctaccggatctatatggacatgcccaacctgcgggtgatcttcagtacctcgagcgtcgtgactgaggaggaaatgggtcccgagctaaagggcagggtgcggatcatcaatctccagggcttctccttccgccagtacctcaatataaagtacggtcttcaccttaaggcgtactcgctcaaagatcttatggagcggcatgaggagatcgctgctgaggtgatgaaccaagtgaagccgaaggaggacttcgagctctacctcaccgagggctactacccgcccgtggaggacaacccgctctcatcggccaagctgacgaagaatatcaatatgatgctcgaggtcgacgtggtctatgtccatcaggtcgatatctcctatctgcccaagatgcgggagctgctcttccagatctgcacgcaggacaagccgacggccaatgtgacccgctttgcccgctgtatcggagccagccgcgccacgatcgccaactacctcaagtatctcgacgatgcggagctgatccgcacggtctataaggagggcaacgagtatcccaagaaacccgatcagatcttccccaacgacaccaatatcgccggggtgatgtatccgcatcggcagtcgacctgtatgcggctcaagaccttccttctctcacaatttgagaacgccggctaccgggtcaacgtccccgataagcccggcgcggacttcatcgtcgacggcgagcatctctttgcttgcgtcgacggtaagaccagtcgcttcaggagcgaggtgacctacaccttcagcaacctgctggtggggcatgacaactgtctgccgatctggcttttcggcttcctctattgacctttacgaaaaaagaagaaataaattacttcacgctttagtatacttatatatgagtaaagaaaagaaattcatgacctgtgatggcaacacagctacgtcgcatatcgcgtatatgttctcggagctggcggccatctaccccatcactccctcctctacgatggcagaggttgtggacaagtgggcagccaatgggcgtaaaaacctcttcggcgacaccgtccgtgtccaggagatgcagagtgaggccggtgccgccggtaccgtccacggttctctgcaggctggtgcgctgacgaccacctttactgcgtctcagggtctcctcctgatgatcccgaatatgtacaagatctccggcgagctcctccccggtgtcttccacatcgctgcacgtgccatcgccggccatgccctctcgatctttggtgatcaccaggacgtgatggcttgccgtgccaccggcttcgctatgctctgcagcaactctgtacaggaggctcaggatatggccgctgtggctcacctctctgcgatccacggacgtgtgcccttcctccacttcttcgacggcttccgcacctctcacgagatccagaagatcgaggagatcgacatggaggatctccgtcccctcgttgacctcgaggcgatcaaggagttccgccaccgtgctctcacccccgatgcgcccgtgacccgtggtacggcgcagaatggggatatctacttccaggagcgtgaggcatccaaccccttctacaacgctgtccccgagaccgtacagcactacatggacgagctgggcaagatcactggtcgccactaccacctcttcgactactacggcgcagaggatgctgaggacatcgtgatctgcatgggctctgcctgtgagaccgccgaggaggtgatcgacaagctcaatgccgagggccgcaaggtcggtatgatcaaggttcacctcttccgtcccttcagcgtggagcacttcctcgaggcgatgcccaagaccgtgaagcacgtcgctgtcctcgaccgtaccaaggagcccggtagcgccggtgagcccctttacctcgatgtaaagaacgctctctacggtatggaggagcacccgaccgttgtcggtggccgctatggtctctcctctaaggacgtgaccccggagcagtttgccgctgtctttgagaacctccgtatgaagatgccgaaggatcacttcaccatcggtatcgtggatgacgtcaccttctcctcactcccgctcacagaccacttcgacgtagctacggatgcctttgaggcgaagttctacggccgtggatctgacggtaccgtgggtgctaataagaactctgtcaagatcatcggtgagaataccagcaagtactgccaggcttacttcgagtacgactctcgtaagtccggaggctttacctgctctcacctccgcttcggtgacagccccatccgctccacttactacgtcaatcacccgcacttcgtagcctgccacgagccggcatacctgcaccgcttcaatatcacgaagggtctccgcaagggcggctcactcctcctcaattccatctgggagccggaggatctcggtgagaacctccccggtcgtctcaagagatacctcgcacagaacggctgccacctctacatcatcaatgcgaccaagatcgcctctgagatcggtctcggcaaccgtaccaatacgatcctccagtccgctttcttcaagatcgccaacgtcatcccctacgatctcgctgtcgagcagatgaagaagttcatcgtcaagagctacggacacaagggcgagaagatcgtcaatatgaactatcaggctgtcgatgccggtgccaacgtcatcgaggtacccgtgcccgctgagtgggccgactgccccgatgatcccgagcaggagtacgagtacgacacgcctttcgtctccgccatcgtcaagaagatgcacgctcaggagggtgatgacctgcctgtcagcgtcttcaccggcctcgaggatggtacctggcagcccggcaccacgcgtgtgatgcgccccggtgtcgctgtcaatgtcccgatgtggcatgaggagaattgtatccagtgtaatcagtgtgcctacgtttgtcctcacgctaccatccgccccttcatccttgatgagaaagagatggagaatgctcccgagggctacgtgaccaagcctgccatcggtaaggagtttaagggtatgggcttccgcatccaggtcgacgtcctcgactgtctcggctgcggtaactgtgccgatgtctgccccggaaagaagggcgagaaggcactcaccatggagcctctccacacccaggaggatcaggatccgctgtggctctactccggtcaggaggtgaccaataaggctcacctcgtcgatgtcagcaagagcgtgaagaactctcagttctctcagcctctcttcgagttctccggtgcctgcgccggctgcggtgagacaccgtacgtcaagctgatctctcagctctatggtgatcgtcaggtagtggccaataccaccggctgctcctctatctactccgcatctgcccccgagacaccttacacgaccaatgagaagggtcacggtcccgcctgggccaactccctctttgaggacaacgcagagtatggctacggtatgtacctcgccaataagaagctccgcgagcgcctcctcaccatcgcgcaggatgtcgttgatggcaagatcgagatcggtcaggagaagactaaggagctcctcaaggagtggatcgagaagtacgaggatgccaaggcttgccgtgagctctccgatgagatccgtgctctggtagagaatgatgctaccgagggtggtcgtctcatcgacgatctccgtcactacatcaccaagaagtctcactggatcatcggtggtgacggctgggcttatgatatcggttacggtggtcttgaccacgtgctggcacaggcacctgacgtcaatgtcctcgtcatcgatacggaggtttactccaataccggtggtcagagctctaagtctaccccgcgtgccgctgtggcacagttctctgccaatggtcgccgcttccgcaagaaggatctcggtatgatggctgccggctacggctacgtttacgtcgctcagatcgccatgggagccaatcaggctcaggcgctcaaggcgatccgcgaggctgaggagtttgatggtccctcactgatcatcgcctactgcccctgtatcaatcacggactccgtgccggtatgggtaagacccaggaggaggagaagcgcgccgtcgagtgtggctactggcagctctggcgctacgatccccgtctggaggagcagggcaagaaccccttccagttcgactccaaggagccgaagtgggacctcttccacgacttcatcatgggtgaggtgcgctaccgctctctcgagaagctcttccccgaggacgccgaggcgctctacggtgctgcccttgaggatgccaagtaccgctataccaagtaccagaggtaccttgctatggacttctcaagacccgaggaggatgtcgcagaggctccctctgatgtggagaagaaggtcgaggaggagcccggtaagtggatgtaatccccgcaccctgacggcttagtcgccgtcaccatctaataatctaagctcaggctgatcggcttcaccgcccctcagcctgagctttttttgtttcaatggtatcttttccccgtgaataaggcttatcctgaggtttgatgattttcacaagccgtccactcccgatgcaccttttcgctacctagcggaaaagtagattttgatggcgatgtgttgtggtgaaaaaataattgtgtacctttggagcataaagatcaaccctaaacgatcttttcacaacaaggctatatgccgtagttgattctacgctcccgcttcggcgggagctttttttatgccttaaattggtacatttgggtgcgatccttatttaatcactttctgatctattatgtgtaaaaaacaatataccctcgggcttgacttagggacaagcagtcttggctgggctgtcactgtacgtgagggagttagcgtaggctctatcctcaatgccggagtcactgtgtttccgtccgggaaagcgatggtcaatggagtcgagaaaacaaacaacgaagagcgacgtaatagccgtcaggcgaggaggcaactggctcgccgccgcctgcgcaagcagcatctactgagactgcttatagagaatgacatgtgtcccctgacgcagacggagctagacggatggatgaagtgggataagagcaagccgaccgaggagagacggcgcttcccggactcgccccgtttcagggagtggctggcccttgacccataccgactgagagctgaggctgtagatacgccccttgaggatgaccccgacggaggctttacagctcgtgaaaagctggggcgtatcctttactccatcatccagcacagaggtttcctctcttcgaggagtggaaaggaagacggatctatttatacaagtacgatggagaagaacgggaaagtcggcatcggtgagacgagagccgctctcggagatcgcacgctcggtcagtacctctacagcattgccccaaaggaaggggatcccttcagtgatcagacggatagagtacgatctcgctacacactgagggagatgtatgtggaggagtttgaccggatctggacgagacaggcacccctgcttggtctcgatagggagcaggtggagacgatccactaccggtacttcaccggtaagagtgactcgtatgaggcaagacgtcgactggagaggtatcgggccaaggatccgtcagctgtgatagagaccttgtccggtgacgagcaccgcttcgtttacaagactaccacttctcttaaggagcatctggcgggtaagatttggtacgacaaggatgggaccatcaggtttgtctccaaggagagtaccctcttctggcagagacctctgagatcgcagaagggtatgctggacaagtgtagccttgagtcgcataaggttaaggacagaggcacaaatcgattcatcacccagggaccaacggttgtctctgcctctcatccctactatgagctgtacagagtgctgcagaccttacttaatatgagagtacggggccagaagcttgatctgatgatgctccagtctatgctcgacaagctccttacttatggaaagaatacaaaggtctctaagctcaagaatgacctccgactgactgctgaccttaacttccctgatgactttgagctgcccggatgtcccacgattagtggtataactaagctccttgacagtaagaagatgccctcccgtaagggagatgcgagtcccagtgatcgactggtcatcccctttgacctcaatctctatacccggatctgggagaaacttttcttctacgatgacaatcatctgctggcgcaaggtctgaagaagatagagggtgcggtctttgtggaggatctcgaggacaagcttgctaagctgcatctcagcgaggattatggcaacctctcgctccacgccctgcgtaacatcctgccctatctcctacgtggtgaggagctctacgacgcggtgttgctcggcggcatacgtaatgcggtacgggatgttgcgctggtggatgatcacgatgatgcgctgagatcgtggatccactctcagggacctctggagcgcggggagatgatagataggatcgttgccttgctgcaggacccggacggaccatttcatctcgatactccggagctgaagctgcgtcagcgactctatcatccctctcagggcacagctaagcaccagctgatggatcagctcccgccggtggagaaccttcgcaaccccatggtcgagcaggcgctatggtcgatgaggagactggttaattatctcctcaataactatcgctccacgatccgaccggactttacctttgacgagatccatgtggagcttgcccgggacctcaagctatccactcagaagagggcagagatgagacagaggcagaagaaagcggaggaggacaacgatatggcaagggactacctgcgcagccaggggctgagcacctctcgagagaatctccagaagtacaagctctatatggagattgcaggtcgtagtatgggggtcgtcacttgtccgtataccggcaaggtcatacgtgggctgagtgctgcacttgatggcaacagcaacttccagatagagcatatcgtcccccgcacagtgacttacgacgacagctttgccaataagacactctgcgatgcagacttcaataggaagaagggcaacctgaccccgtggcagttttatcagcaggatccgagccctaagctctggggtgctgactcgtgggaggaggtagagcgcagggcattccgtctcctgccgtatcgcaaggcgcttcgcttcgtaagtaagaccgtagaggatcagctctccggagatcagctggtcgacaccgcctatattagtcgaaaggctaaggagtacctctcctacatctgtccgcaggaccatatccgactctatcccggtcgagtgaccgcaagacttcggcagctctggggactcaactcaatcctctctcaaggtcccactgtcaccaaagaccagctcccgacggagtgcgcactctctactgatcagatccctgctgtcgtcatcggcaataagaagagcggcgagctcagttgcatactacctaagtacacatctcgcccggagcgggaggagggtgatgtggtcctgctggtaagggtgcagaaggggaagatatacagtgccaggtatagtgagctgccactatcgtgggacaaggctacttctcttgcggacgggacatattacattgtcctccgtagtacagaagtgctccgcgtggagcgaatgtttgctgacgaacctcgattgagcgaggatcagctgagagcaagggttaccatcgagctgaatagagatggacagcccaagctctcctccagggagatggatgtccgcattctgaaggatatgcctttgcccgctgccccgggtaattactggctgacgatacccctcgtctctgtcccggaggttactcctgagcatccgagagcaaaggttgcccccgacacaatcaaggtcacgggatcagtggagcagggtgaatttatctccaaggtgtaccggcagggtggtgtggctatggcagatggcgtggcgcaagtcatcctcacccctatgctatcagaggcgtccttcactaagatcaagctagatgctcctgtgatcacctccggagaggtggtgctcacgggtgccgtcgacacgagtgacctcttcgtctgtgaccaggacgatgagcttcgagtgcagattgactcatttgatgagccggggaagtactatgctgtcttctcctttgacccgatggcgtcgtacatcctttcgtatgaacaagcaccaaagctgagtagtgacgaggtggtacttgatggcgaactgatctataatgataaggacgaccggatccacttcagtcctgcaaagaatagggatgaccaccgacaccatgctctcgatgcaattgtcatcgcctgcaccggacaaaaggtgctgacagcgatgtctacctataacgcacatgcagatgattacgagagaggtacaggcaacagacccacattttcctctccctggcagggcttccgtgacgatgtgagagtggcgatcgagtccgtactcgtcaagcacaagcagagtaccaagatcctcaataaggtgacgaaaaagatcaccaaggacggtcgcactcatcgctcccagggtcttgccgtgcgtggcaagctccataatcaaacattctttggcctccgccagtccccccaagagagtttcttaagtctacacaagagagagagtattcaaaatatcgaatcttattcttcactatcaagagttgctgatgtcaccatcagagatctgatgattagccgcttgagggatattggcatagatactacacgaaaagagtattcaataccaaaggaagcccatgcgtttgtagatgaggagggaaactataccattcacctccctaacaagcgaaaaggaggtgctccaattcccgtgaaaaaggtgagactgtgtgagcgttcaggctctccaatacaaattgcgggttacaataagtgggttaaaccagagaacaatgaatatctaatggtttatacaaactatgacaataagatccagtatctgtgcgtgccgttttttgaagaagtgaacaataagataagaggtgttgatgggtggaaaaaactgaaagacctaaaggaggttttgctggttttacggattaatgatatggttctctgggggctgaatacaaatgaagcacgtagtattctccaaagtggggattatagagaggcttcaaaatatttgtatagggtgaatgctatctctgcaggagaatttgagttgcgtcatcattctgatgccagaactgacaagagcagtcgcacaagaatcaccccaggtactttgaggaaacgtgggttgcctattaaagtagaggtgagtacgatgggtgaattgtcagttgtaaggatagcggagagcgatgattaagcgaaccatcaccatcagtagtccctcacacctctcgctcgacagagggcagctggttgtgtacaataaggatagagatcaagcaaggacactgcccatagaggatatcggatatctactcttagagaatgatcggatcacccttacactaccgctcatccggtactgtctcgagcagaacgtcggggtgatcgtctgtgacgacaggcacctccctcttggctctctcatcccgctctccggacatgagcagacgggtaagagggtgcgactacaggcggagccgtccaagcctctcatcaagcaactgtggcgaagagtcgtgatctctaagatcaataatcaagccgacctggtcaggtgcagagatgctgcctgcgctcgcacccttatggagattgcccgagaggtgctcagtggagatagtaccaatagggagggagttgccgcccgtcagtattggtctggtctccttggtccagtcttcactcgcaatcgagagggggcgtttcctaatgagctgctcaactatggatatgccatcctccgtgccatcacagccagagcaattgttggctccgggctcagtcctgagatcggactctttcatcacaatcagtataatgccctcccactcgcagatgatctgatggagccttatcgacccttcgtagacgagattgtattgacactcattgcatccgggagtactgctctggataaggaggcgagaggccgactgatacaggtgtcctgcaccgaggtcagcatcggtggtctcgtccgccctgtacagctggcgatgtccatgactacggcatcgcttgctaagtgttatgagcaggggaaggcagacgaactactcctgccgtcatttgtgacctgagtgtattatgataagtaagtatcagtctatgtggttgctcgtcctctttgacctgccggtgctgacgaagaaggagcgtaaggtggcggcgcagtttcgtaatcaattgatatcggaggggtataccatgattcagtactcctgctatctgcgccattgcccgacgagagccctgagggataagtatgagagacgtctctccaagatcatccccgaggagggctttgtagtagcctttactctcaccgatgctcagtatgccgatgctgcgtggtactatgggactaccccggtgaagtctcagcagatcccggggctcttcgatgagctatagcaatacttgtgtcgatatggggtccgcctaataccggtaatagtcgagactatagtcggtattagtcggagctaataccggtaatagatttgatggatcactacttgttgacagtcagcttgttcctggctttgtgcacactccatatatttgggcacttcgttcgatctatgtggcagaggatttcttcgtgtcgacctctgcttacggatttgcatagacttaagaaaagagtaactttgttgtgtgggtgtgaaatgctcagcacccactgccctttatactcttcttttcatagattttttctcctgtaagtaggtactaatctcgcctgtaatcaggcatttgaggagataggttgtggattgatcagtttagggaataagaaacaaccgggaagcccagcctatacttaccctcagagttgtggattgatcagtttagggaataagaaacaacgcaccccgtccgcacgtatggaggagcttagttgtggattgatcagtttagggaataagaaacaacaagctggagcgggagtacaaccccctcaaggttgtggattgatcagtttagggaataagaaacaacgaagggcttgtatacctgcgggcagatggcgttgtggattgatcagtttagggaataagaaacaacactcgtagtcggtcggggaggtgccgtcctgttgtggattgatcagtttagggaataagaaacaacaagaccgccattgcctggagacaccggcagttgtggattgatcagtttagggaataagaaacaacggctgatctgagtgcttttgacgtggagcgttgtggattgatcagtttagggaataagaaacaaccctcgggggttaagacaacaaagccgagccgttgtggattgatcagtttagggaataagaaacaacagtgtagggatctacggtgaggtcgagtgcgttgtggattgatcagtttagggaataagaaacaacaattttcggtttaatctgtaagacactccggttgtggattgatcagtttagggaataagaaacaaccgcggatcgcctcgggcttggggagcatcagttgtggattgatcagtttagggaataagaaacaaccggtgctgatcctcgtagcgagcttccttgttgtggattgatcagtttagggaataagaaacaacagcaaagcagagcggcgagattgctctcacgttgtggattgattagtttagggaataagaaacaacagcaatgcagagcggcgagatttctcacgcgttgtggattgatcagtttagggaataagaaacaacccacggtatgacgcccctgcggctctttgagttgtggattgatcagtttagggaataagaaacaacatgtatacattgtgtaccttcgtcctataaccaagtactacgattatggagctgacaaacgattcactgagagatgagatccggagggagctggatcgccgtggcataacggtctaccaggctgccaaggagcttggcacctcacggcagactatctacaattacctcaacgagacaacggacgggatcaattctgttaccctcacaggactaatgcggctatgtggcttcgtcatcctgtcacctgcagaagctggaaatgttaaatctctattttcttagcccaattgtttggacgcttcggtgtttctttctacctatgtcatactggagaggaagagaggggagcggccccgcctccgagggctgtggattgatcagtttagagaataagatacacttatactcaccgccctgtgtatgaggctctcccgggcggtgtgtgtgggaggatcatcgcattttgtccttttcctttcgttgctttccgctgcggttaatttgctggagaagggtgttgtgagagtggaacttttgtgtacatttggtttgtgatttagggaatatttactcacatctgattatttattgattatgagacagggttttatcaaggtcgcagccgtctttatggcggctctgatcctcttctcgagctgtgccagctcgacggtcttccgcactacacccgagggggccaaggtgtatgccgatgggcagtatctggggactaccccggtcacttactctgatacgaagatcgtcggctcatcgacgaacatccgtatcgagaaggagggctataagaccgtcaatgcggtgctcaatcggagcgagcaggctgatatcggtgctatcgtgggcggtatcttcgtctggatccctttcctctggacgatgaagtacaatcctgagtacaattatgagatggagccgatcagtggctccgctcctgtccatcacacagccgacaccgctgagtgatctcctgacatagacacagagcgtccccgatgatcatgcggatcattggggacgctcttttattttataaatagtgcccttacttgccgatcacgataccgtcgccctgcttgtagaggggcgggaggtcgacggagagcttgccggacatggggcgctcgcctgtcagcgctcggcccatggcgcgcattccctccgaccgggtgtcgtaggcaaagccgacggcagtcgcagccttcatcgcctccatatagtcgagggcggcgtagggggaggtgtggaagaggaggacgctcttcgtctcaccgaggagcttcgtcagatcctcaccgggagcgaagcccttccacgtgacagcaaccaccaccttgtcgtaggtgcggagcttgtcgaggatggcccgacgggctgcggggccggtagagcgacggatggtgtatccgtcagccttagccacccggctgatggtggagcgaaggaggtcggcggagtcgtccccgtaggtgaggagggcgacccgatcctccctatggagcgggaggatgctttgctcattctttaccagtgtcatggcaccctcgtagatccggtcgaggagttctcgagaggctctcgggtggaggtcggcgtcgagctgcttcgtctccagcggctcacggctgtcggcaccgaggaggtgcttccagacgagcaccttgcggcagcggcgggtgatctcagcttgggagaggatccccttgtcgaccgctgcggtcacgtcgtcgagcgcctggaagggatccgtcggtgccactagaatatcggcgccggcgaggagcgtggtgacgtagacgcccagttccccggcaccgtcgacgatccccttcatccccagaccgtcggtgaagatcagtccgctgaagcccatctcgtgctgaagcaggtcggtgacgacagcggggacggcactggtcgccaggggacctgtgcctagagcggggacgctgaggtgccccaccatcataccgccgtagccctcacggatgtaggcgcggaagggggcgagctccacctcctccagctgagcgcgggtgcgactgatcaccgggagggtcttgtgggagtcggtggaggtgtccccatggccggggaagtgcttcgccgtggagaggaggccattgtcctcgagacccttggagtaggcaagtcccatacggatcacgagatcgggcgaggagccgagacttcggttgccgatgacagggttggcggggttgctattgacatccaggacgggggcaaaattgacgtggataccgacgcggcgcgcctcctctgccgtcgcccgaccgtactcataagccagtcgggggttgtcggtggcgccgaggagcatgtttcggggccacttcatcgagtcggagaagcgcattgagagcccccactcgccatccgtagccaccagcatcggcacgcgtgcctcgcggcgcatccaattggcgagccgaaccacatccctggggctgcccttctgccagaggacgcagccaaactccccctccagcacctgtcggtgccagttgtccagtcccgccttgtccaccttgggccaagtcatcggcatgatcagctgggccgcctgctgccggggcgagaggatggcgaggacgctgtcggcccacgcttcagcggcggccttacgctccacatccctcatcatcctcggctcgacgacctgagcgcctgccatcagtggcagcagcaccgccgccactccatacaatattcttttcataagtaattatctgtgtaaaaaagacacctcgctactatcgccctcattggcgtagtggcgaggtgtcaaatctaatgaataatcagtcagtgtgcatccgaaagattagtcccatccgggattctgcttcagagtcacgccgtgatccttgtagagcttgatctgatccttgggaatcggttcgaggtaatgctttgcctcgacaacacgcttcgtgtcaccggttcccttgatgtaaccttggcgaccggtaccatggatacggatagccttattgacgctcttagcattcttctccttaatctcctcggtcagcttgccttccttctcagcagcctcctcattgagcttggcgaggatgaagtccttgtcgatccaggcacccatgtcctgcttcgggttcttctcattatcagctctccagagctcgccccagcgacggagatcgttgtagcgcttgccctcgagctccagctctacgcggcgctcgttgcggatctcccagatgagggagcttacaccctccgtcttcgcggggtcattgatcatctgaccatttacgaggacattatccccgctgatggtgaggtgaggcatcttgacgtccttacggtcacggatggtattgatggtcttgtccatctctgcctgtgtcatcgccggaccaccgacggatccgagctcagcagcagcctcggcgtagatgaggagcacttctgcatagcgcagtatggggcagtcggtcgtattggtagagctctgaccggcggcagtgccgatatactccggcttggtatacttgcgagagtagtatccactcacagagtacatactcatgaggaggttgggatgcaattcctccgcatcgatcacataaccgagccttggatcacgatcctttacttcgtccgcgaagaccttgtccccgtgattctgagcattgccctcctgtgcccatgcgagaccattggtagtgcggaagctctcgacgagagacttggagaccccgttttgctgtggctgctcgatctcgaaggacataacactgtgtgtcgacttaccggcgatataggaccggtagacgaggacctcaggattgcctgccagatcctcagaagtgaagaggtctcggtagttgtcggagatgcgatagcgaccgccctcgatcaccttgccggcaaacatcttggctttctcgaggaagaatttcgcattctcgttattcttctcgacatacttctgccacgttccctcgaagagcatcatgttagcggccttagcgcagaccacgtcacgattaacctcctgctgaggtgcaccatcgctgatgcgtacatgctcggcggcaaactccaggtctgcgcagatcttcttcatattttctactctgtcagactgcggcaagtagaggagatctatgtcagtggacttcggggcttgctcatagtagggaatgcttccgaaggtactgatgaggtcaaagttttccaatgccctgtacaggtagtagaccccaagccagtgatcgtggggctcgcccttgaggtcagagctctcaagtccctcgatgaggatattcatcttcttgacccgagagaagtcccatccacctccgctagcgggggcgaccttagtcatttgtgtgggggctgactgacagatgtcgtcactccaggtggcactggtggtctgatttccgaaagaagagcggttccatccggtctggtatcctgagaagtgtacaggaagcatcccatttactgagagacgaagattggactctcttccatagaaagagggatcattaggtagctgcgtcttgggagggcgattgaggaagtcagagcaggagctcagcgacatcgtcaaagccaatagtcccgctgataagcctaacttgatatagtatttcattttggtatctgtcattaagagttagaatcgtacctgcgcacccacggagatagtccgagagaaggggaacgtacgaccaaaagagtatgcatcggcccagttgccggtcttataggtagatgtctccggatctacagggatcttcttgtcgtagaactcaaataggttctctccactcagatacactcgaagtgactgaagaccaactgcggaagagagagactcggggatagtgtagcccaccgtcagattcttgaggcggaggtaggcgagattgaggagatacttcgtctgagtcttgaagttcttactattgccgaccaagttaccattgtgcgccagcctcgggtagtaggcattgggattctcgggtgtccagtagtccatctggtgctcaaacatcgcctcgtaagtgaagccgggcgtaccaaccgatccgagtggtacaacattcttgcgacctacgccctggaagaaggtgctaaagtcaagccccttgtaggtgagcccgagattgaagctgtactcaaagagaggacggctgttaccgatcaccttgagatcgccgtgatcatccacggtgttggatccgtagtcgatcttgccgtcaccattgagatccttgtacttgatgtcgccgggtccgaagacgaagctgccggtctcaaattgcttctgcgtcggtaccttatccgtgtcgatgacgtagatgccgtccttattcttcttacagtcgtcgatggtgaagaagcggtcggtctcgtatccccagatctcaccgaggactttaccctcgtagataccgttgatatttttcgtcttgttggtgtacttggtgaccacctccttaacggtagagaaagatgctccggcggtaagtccgagaccattctcaaactcgtggcggaagtcaagcatcatctcgagaccggtactggtgagctcaccctcattgaccttagggacagtctgtccaaaggtagcgggcagtgtctctccgggagagtgcatatctgaggtgatacgacggtaccagtcgatcgtcagaccgagcttattgtcccagaagcgcatgtccgcaccgacatcgtaggtggagacgcgctcccacgtcaggatcggggagatggcattgggggtaccgaagtagggaagctccttgccatcgatcagccaggcagtagtgccctgactgatggtggagaggaaggcattggctgccacgtcctgattaccgatggagccgaatgaggcacgaagcttcaggtcggagaatgcgggcttgaggggctcaaagaaagactcctcagagacacgccagccgatagatccggaggggaagaagccccacttggatccctcggggaactttgaggaggcatcgtagcgagcatttacctcgaagaggtagcgaccgagcaggtcgtaattgatacgtccgaagaagccgcaggtagcacggtcgtagtggtagggattgtcatccacatactgatcaccgatggcgagggcaatctccgggtagtccagggataccagctctcgtctctgagagctgtgaccacggtactcattttcctctgcgtcaaatccagccatgaactttagtcgatggttgtcattgatcatcagattgtaagtcccatagagcttatatacaaggttgtccgcatagtcgctgtattcgatcactctattgtgggtcttgctgtagagcgagtcgtacttaagaggattgtcggtattgaagaagtcacgaccccatacctgaccgccgggacggtaggtgtaggtgttgacgtgcgtataggtgtagtcgaagttgatgtcgaggttctctataggtgtaaagactgcacctgcgttgatcctgctgtaattacgactacgagtctccatcttggcctgctgcacctcggtgatggcattgcggaaaggcttgccctcgtaggtgccgtagggatagaatgagggccatctcaggagatagtaccacatgtcatacactccactcgtaaagcggtaaggtctggcgtaggagtcgtgggtgtacatcacactaccatgcaccctgagccacttattaatctgcgtggagatggagggggtaaaggtgtagcgctggttgttatccggattgaacttcagcgagcctgtctgcttaaggaatccaagacccatactgtaggtggtcttgtcggtcccgccggagatggtcaggttgtgattctgctgcggtgcccacttgcgcataaacatgtcaatggggtcaaagtcgcgataccagtagtacttgccacctcggaactcaaagtcgcgcccctcctggatttctcccaattcttcctcagacatgccgtggtatttgtcataccactccttcatcttctggacagccaagtcatcaatgttgtaaccgacgctggtcacggaggagccaccctccctctctgccatcaggaggagtgcctgagcattctcataggactttgcgagcttgggcatcacggtcggagtgttccatgcaaagttggtggagtaggtgatgcgcggtttctcgctcgcccgacccttctttgtcgtgatgaggatcacaccgaaggcggcacgcgtaccatagatggaggaggaagcggcatccttgagcacagaaatgttagcgatatcattcggattgacaaaggagaggtccggcacggggacgttatctaccaggataagcggagta

SEQ ID NO: 3553 - DNA, 16463 bp, synthetic construct
  source 1..16463: mol_type = other DNA
  misc_feature 1..16463: note = Synthetic
aggagatctcgcagggcgccggtcgccttgccgggcacctggggctggataacctgatcatgttttacgacgccaatgaggtacagctctccacccgcgttgatgaggtggacagcgaggacgtggcgatgaagtaccgtgcttggggctgggagatctttgacatcaacggcaatgaccctgaggagatccgtcgcgctctcgatggtgccatagcggtcaagggcaagccctcgctcatcatcggtcacacgctgatggctaagggggcgatcgataaggagggcggtcgctcgcttgaggatcaggtatctacacatggtcagccgctctccaaggccggtgccgacatccgtcgtaccattgccggtctcggtggcgatccggacgatccctttgtcatcttcccggaggtgcaggagtgcttcgccaagcggcgtgagacgctcctcggggagaagaaggagtggcaggcacgtttcgacagctggcgtaaggctaagccggaggctgcagaggagctggagcggtggctggaccctgaggtgaaggacgtagactggtcgcagatcaagcaggccccggacaaggcgacccgcaatggctctgcgaccgtcctcggacatcttgcggagcaggtgcccaatatgatcgtctccagtgcggacctctccaactccgacaagacggatggtttcctcaagaaaaccacacccatcacgcgggacaactacgatggccaattcatcaatatgggtgtctctgagctgacgatggcggtagtgagcatggggctgatgctgcatggggggctgatcgccgcctgtggcaccttcttcgtcttcagcgactatatgaagccggcgatccgcctctgtgcgctgatggagctgccggtgaagtttgtctggacccacgatgccttccgtgtcggtgaggatggtccgacacaccagccgatcgagcaggaggcgcagatccgcctgatggagaagctgcgtaatcactccggaaataatgcgatgctggtgctccgtcccgccgatgtggaggagaccacagtggcgtggaagatggcgctggagaatacgaagagcccgactgcgctgatcttctcccggcagaatatcaagaacctccccgagaacgactacaccaagagcctccgcgtggagcgaggcggctacaccgtcatcgagcgtaagactccggaggcggtgctgatcgcctccggatcagaggtgagtacactggtcgccggtgcagagttgcttcgcgagcgaggcattgaggtcaatgtcgcctccatcccgagtgagggactcttccgtcgtcagccggaggcctatcaggagagcgtgctgctccccggcgtaccgcgctatggcctgactgccgggctgccggtcaccctcgaggggatgatctcccacagcgagggacggatccacgggatggagtcctttggcttctccgccccctatacggtgctagatgagaaatttggctacacggctgagacggtctgccgtgaggtaatggggttactgggaaagaagtaaactatgatagcaggagtacataagataggtctggccagtgaccacgccggatactatatcaagatagcggtgagggacttcctcgcaaagtgggcccccgaggtggagctgatcgactacgggacggacagcgggtctgacagctgcgactatcccgactttgcccacaagctgggcgatgctctcgacaagggcgaggtggatatgggcgtcggcgtctgtggctccggcgaggggatccagatggcgctcaataagcaccggtccgtccgtgcgggacttgcctggatgccggagatcgcatcgctgatcaggcagcataataacgccaatgtgctggtgctgccgggacgctttgtgccggtgcaggaggcgcaggagatggcggagatattcttcagcaccgacttcgagggcgggcgccatgagcgtcgggtccggaagatagcgacagactatggagagactctatcctgactttgagcatcgggatgccgatacgctagtcgcccgagtgcgggaggatctggcgacctatcgggaggaactggaggagatccgctccgtgccgatggagtctgccaccttcggcaataccgtgctggctcttgagcaggccgggagggcgctggacgtgtcgtctgccaccttctacaacctcctcagctgcgatgcggacgatcgcctcatggagctgtcggaggagctgacggaggagctgaccgatgtcgccaacgagatctctcttgatcccgacattgccgccaaggtgaagaagatctacgatgcaccacaggaggcgctctctcggatcgacaagcggctcctcctccgtacctacgagtcctaccgggacaatgggtcgatgctgccggagagcagccgacaggagctgaaggggctccgtaaggagctgagcttggctacgcttcgctttgggcaaaacgtcctgcgggagcagaatgcctatcgtctctcagtcctcgatggtgagtcgctccagaggttgccctcctcagctctggagcaggcccggaagagagcgagggaggagggcgtacagggctggatctttgacctgagtatgccgtcctacagtgcgctgatgcgcttctgcagcaatcgggagacccgcaggcagatctaccgcgaccgcggtacgctctgctatgatacctcgagggagacgagcaacatcgccaccatttacgacatcgtacggctgcggcacgccattgctaagctcctcggtcacgagacctacgctgacctggtactctccaagaagatggcaaagacgcccgatgcggtctatcagatgctggacaggctgcgcgatgcttacctcgccaaggcgcgtgaggaggtggagacgatagccaaccaggcggagcgaagggatcaaatctcaaagctggagccgtgggactggagcttctatgcagagctctatcgccagagggcgctgaagtacgatgaggagcagacgagaccctacttcgagctctcgtccgtggtggaggcgatgtttggcctcgccggcaagctctatggagtggagctccgtcgtaaccccgagcttccggtctaccatcccgatgtggaggcatacgatgtgctgcgtgaggggcagctgctggggacacttctcctcgactacttccctcgtaagggcaagcggtccggtgcctggatgaccaattatgtggaggagtatgagggggtacgcccggtgatcagcttggtgactaactttactccgcccagcgatgataagccctcgctcctcaccttcgatgagacgacgacgctctttcacgagtttggccacgccctccacgggctactgacgaccgtgaagtacgcctctctcagcgggaccaatgtggagcacgacttcgtggagctgccttcgcagatgaatgagaactggatgcgccagcgcgacttcgtgaagtcctttgcgaagcactatgagaccggagaggtgatcggtgacgacctgcttgatgcgatcgagcggaatgcactcttccttgacggctatggctgcatacgtcagctcacctttggctacttagatatgaagtggcacgccaccgacccggagaccctgcccaccgacattgaggcggtggaggctgaggctcgcaaggggctggagctgcttccgcatgcagcggggacggcgatgagtccctcctttacccatatcttcagtggtggctacgctgccggatactacggatacaagtggagcgagatcttggatgcagatgcctttgaggaatttatccacaacggtctcaccgaccgcgccacggccgatcgcttccgggagaacatccttgagcggggcgactcggaggatccggcagagctgtaccgagcctttaagggtcgggatgcaacggtcgacgcgctgcttcgccgctctcacctgatccagtgatcacccgaaggcgatcaggattacttgaaaattatgaaggaatgcccctgctcgtcaggggcattccttttatccctattagtcggtggtaggcatagactccggtatgggagcttttgccaaagtgcctgaccgggctgagtgggctgtgataaaatgactacctttgcagtgtcctcccgggcgaaacaagagcgcatccggcggactggtgtttcccatctaatatagtgcacaagttgtctatggctattcattattactcagagagcgaggctgtccccccatttctccgtcgagaggtgggcgcatggatcacgtctgtggccgaaggctatggcaagaccataggtgagctcaattatcaattctgcaacaatgagcagatgctcgagatgaatagcaagttcctcgaccatcactactacaccgacatcatcaccttcccgagtggagatgatgatgaggtgctggtggcagacatactgatctcgcttgatcaggtccggctcaatgcggcagagcttggggtcacgcccgggagcgaattactccgggtgatgatccatggggtgttgcacctctgcggtcaggacgatgtgacacttgagctggagacggagatgcaccacgccgaggaccgagcccttgcccagctgcctgagagggtctggcgagccatcccggcatcggaggcgtggatgagtgagtgcccggtgagcgaggggaaggaataaggaagaagtagtagagggagcatcttgttgtcgagcttaagtgtagagactcactctgcctggcccgcctttgatgggtacgaggcggcgcagtacgtcgactctgcgccagaatataccgacaccctgctggcgatgacgctggtgctggtggcactgtccctactgctctaccatatgctcctgaagcctcggggcagagggcgtgctatgctgctgctcacagctccaccgagggcgatcccgagagtgcgggagatgctgccgtctgtaggtttttttgtcatggggttgctggagagcctcctcttggtggctctgctggtgacgctcctgctaccggagacgagtggggtcgcctcgctgtcagtcacaggcttttggctcagtgtggggagggtctctctctgggtggcactactctttgtcatcgccacagtggcgcaggcgtggatggtctataccttctgccactccgaccagatctcgctctggtgggcggactacctgatcctgatgatcgtcgctgccaatacgctcctcttgccactcctcctgcgactcttcacgcccttgagtgctactactctcgtgatcctctcgggcggtctttatgtggtctatcgaatactcttgtgctacagagagatacagatattcagtcacctgaggcgttatcccctgcatattattttgtacctttgcgcttgcgaaataggccccttgctctttgggctcaaggtcgcctcacttagtgtgaatcagtagcatatcacaaatgtccacaaagacacgtaaagttcttgttccacaacccgagcctcctaagaaaaactcgccctactatcagctggcggaggagtatgggctggagttggtattcaatccactcttccattttgagaccttgacggctcgacagtttcgtgatcagaaggtagatatcctcaagcatacagcggtgatcctcacctcgaggaccatcacgacacacttcttcaagctggtgagcgacctgcgctgcacgctgcctgaggactttaagtacttctgcgcctcggagcgtgtcgctctattcctgcagaagtttatcaccgtccgtaagcggaagatctttttccccgagaagaatggctcctcatctgacttccagacgatcatctgcaagcacgacaaggagaagtatcttgtgccggagatagaggagcgggcgtcggatgtcgttgccatgctggcggatactaaggtgaaggtgagtacttgcgacgtctgccggatcatctacgctgagctgacgccggaggagattgattcctttgacttcctccttttctttagtcccaatggtctctctgccatcaagactgcctaccccgagtatcagcaggggaagcagatcatcggctgcctcggtgagggcactcgtgatgatcttgagcaggcggggcttcaggtccacatcagcgctccgacacgtgagtacccgagtatgaccgcagccttagagcattatctccaggaggagaagaaggcggctaagtaatcccatgaaggagtatgggctgacgaagagcgagcggctctatctgagggaggagatcggcgcactctttgagagtcggaggcgcttcgtctgctacccgtaccgcgttgtctggcgcctggaggagccctcagaggagcccctcaaggtccttatctccgtccccaagcggctgatccgccatgcggtggatcgcaatacgatcaagcgccgcactcgagaggcgtggcgactgcagaagggtcccctgagggcgcttgcagaggagcgtgagggcaccctgttgatcggtctgctctacatcggtgatcacgtgtctcgctcggagcggctctccgcagctgtgtcaaagtcgatcggacggctctgcgacgagatgaagagtggtcctgccctatgagtctcaggtccatcatacagagcataggtgccttcgtcggcaagttgctgatcctgccgatccgcttctaccagaagtatatcagccctcacacaccacccgcctgtcgcttcacacccacctgcagccagtatgcgatcgaggcgatccggaagcatgggccgatcaagggtcttctcttagccatctggcgcctgctgcggtgcaatccctggggtggcagtggctatgatccggtgccatgagactccttgacttccacacccacctacctaatatagagcgctaccgcggtgactcctcagtcatcgcggttcgctcgcttatgccggacgaggaggtcgatgatcgatcggacctcttcaccatcgggattcacccgatggataggcagcggtatgccgacccggagggactgctcctcaggcggatcgatgagctgggcgagcgatttctcggcatcggagagtgtgggtgggatcgtcgatcgcagcgctctatggaggcgcagaccgccctcgtgcgatgccaaatagctcttgccgatcggctctgctgtccccttatcctacacgtggtaggtgggtggcacctcctgctgcgagagcggcggtcacacccggagggcatctgggtggtgcacggatttaggggcaagccggcactcctgcgacagctggaggaggcgcagatacaggtcagcctccatcccctgtacagctgggatgaggtgccacagctcccatacttcattgagaccgatgagagcgacctcccgctccggacgatctatagccgagtggcgaagcagctcggtgagccgttgactgagcttagtcagaggatcctctcctcctacaaaaggcttctgccctcagataggtgacaccgcatcgtcaggctcatttctccctcacctctgcctgtagtctcggaggataaggtcagcggtggcagcgggagactctgcgggtgtgatctgggtgatggtcagcccgcgccgctccataccacggatccaggtcatctgccgcttggcaaactgatgtatcgccacctccaagcgctgctccatctcatcgtaggtgagcttaccggtgacgtagtcggtgacgtagcggtactccagcccgtagtaagttagctgctcggggcgaaggtgcttcagcagcccctccacctcctccaccattccctcacgaagcctcttcctgaggcgctccgagatccgcccccggcgggtctcgcgagagatgtcgaggcagtagatcggtccctctaatggcggacggtcaaggtactgctcaccgtggtcgcggaagtagagtgccacctctatggcccgctccatccgtcgtctattctccggatccttcagctcctccagcgcacccagctgctccgccctctctcggagggcgtcaagactcagccgacccagctcctcccgcagcgactcatcccgagggacatcgggcaggtggtacccccgaagtgctgcctctacatagagccctgagcctccgcagaggatccgtggtgtctcctccggcagggactgccataccctatcaaagtcctctaagtactgatagaggctgtagtggtcacccgcctcggcgatatcgatgaggtagtaggggaccgggtccccatccaccacatagtcctccagatccttccccgtcccgagatccataccctgatagacctggcgagagtcgccactgagcaccaccccgcccactcggtgagcaaggtgcgctgccaccggggtcttcccggaggctgtcggaccgatgatcgtcagcagctcagccactgagtcgcttacttgctcagcgaggcgagtaggttgtcggggtaggtcccctcctcgtgtaggcgagcaaatttcttgaccacctcgggacgatcctcagcgtaggtgacgccaaaccaccgtgccggcgtatccagcaccttgcaggtcgcctttccctcgtgtacgagatcattcaccaccgtggggatataaaattccgccttcggcttttccaggttggcatcaaggaacttccggaacgccacctggctgtgagcgaagtagtcgggtgtgaagccccacatattcatcgataccggggtattctcctccagctcaacctccgtcccactctcgtccttgaagcttatccgtccctcatcattgcgtgcgatgctggtccgctccaccacctcagcgaggtagcctcggtcatctgtgacacagacaccgcgagatacggtgccgctctcactgagggtattgccacagcggtagcccaccatggcatactcaccctccttcccctccacgctgcggaggaagtctgccagtgcctcgaagctctcacgaccatagaagtcgtccgcattgatcaccgcaaagggctcgtggatcacctcctcacccatcatcacggcatggttggtaccccaaggcttagtccgctcctcggggaccttgtaggagtaggggatcttgtccacgctctggaaaaccagctccaccgggatcagccggtcgtacttggagacgatcttctccctaaacgcctgctcaaagtctctgcggataacgaagaccaccttgccaaatcctgctcggatggcgtcatagatagagtagtccataatggtctccccgtgggggccgagaccgtcgatttgcttcagacctccatagcgggagcccatgccggcagcgagtacaaataatgtcggtttcattgataagagttttacctgattgatacttttctttccccaaaggtacccatttccccgcaaggtaccccctacgctcgccatcgcttacacatccggtctttatagggatcaatcgcatccgtgcgtgatcaaccctctcggcagtccgctccttaggtgatccgatggtctcccactcctctgggtagccggtcggtgagactttcaatagtgctaagagtctctggataaaacagccccgactgaaggctcaattcgtttcccggtaatagagtaccggctcaggagaccgcattggggtgatagacttgtgtcttacagtctctctactgatgcgaatgccgctgcttaatggataggtctcgcccaaagggtgtatggtggaagaaaaaaattgtgtacctttggggcataaagatcaaccctaaacgatcttttcacaacaaggctatatgccgtagtttattctacgctcccgcttcggcgggagctttttttatgccttaaattggtacatttgggtgtgatcctcatttaatcattttctgatctattatgtgtaaaaaacaatatatcctcgggctggacttggggacaagcagtcttggctgggctgtcatcgtacgtgagggagatagtgcaagatccatccttaataccggatccagtgtgtttccgtccggaaaaacgatggtcggtagcaaagagaggtctaacaatgaagagcgacgtaacttccgccaagcgaggaggcaattggctcgccgtcgtctgcgcaagcagcatctcctgagattgcttatagagaaagatatgtgtcccctgacgcagaaagagctggacgggtgggtgaagtgggataagagcaagccctccgaggagagacgacgcttcccgcagtcaccccgcttcagggagtggctggcccttgacccttaccgactgagagctgaggctgttgatacgccccttgaggacgaccccgatggaggctttaccgcacgtgaaaagctggggcgtatcctttactccatcattcagcacagaggcttcctctcatcgcgaagtgggaaggaggacggatctatctataccagcacgatggagaaggatgggaaggtcggcatcgatgagacgagagccgccctcggagatcgcacactcggtcagtatctctacagcattgctccaaaggagggtgacccctttagtgatcagactgagagagtacggtcccgctacacgctgagggagatgtatgtggaggagtttgaccggatatggacgaggcaggcaccagtactcggtctcgatagggagcaggtggagacggtacactaccggtacttcaccggtaagagtgactcgtatgaggcaagacgtaggcttgagaggtatcggaccaaggatccgtcagctgtgatagagaccttgtccggtgacgagcaccgcttcgtctacaagactaccacttctcttaaggagcatctagcgggtaagatttggtacgacaaggatgggaccatcaggtttgtctccaaggagagtaccctcttctggcagagacctctgagatcacagaagggtatgctggacaagtgtagccttgagtcgcacaaggtcaaggacagaggcacaaatcgattcatcacccagggaccaacggttgtctctgcctctcatccctactatgagctgtacagagtcctgcagaccctacttaatatgaggatacgggaccggaagctcgatctaatgaggctccagtcaatgcttgataagcttctcacttatggaaagaatactaaggtctctaagcttaagaaagacctccgactgactcttgaccttaactttccggatgactacgagctgcccggatgccccacgattagtgggataactaagctccttgacagtaagaagatgccctcccgtaagggagatgcgagtcccgttgatcgactggtcatcccctttgacctcgatctatatacccggatctgggagaagctcttcttctacgacgacaatcatctgctggcgcaaggtctgagggggatagagggtgccgcctttgtggaggacctcgaggacaagctcgccaagctgcatctcagcgaggactatggcaacctctccctccacgctctgcgtaacatcctgccctatctcctccgtggggaggagctctacagtgctgtgctgctgggcggtatacgtaatgctgtgcgggatgatgcgctggtggacgatcacgatgatgcgctgaggtcgtggatccacacccagggacctctggcgcgtggtgagatgatagataggatcgtggccttgctgcaggatcccgacgggccatttcacctcagtactccggagttgaagctgcgtcagcgactctatcatccctctcagggcacagctaagcaccggctgatggatcagctcccgccggtggagaacctccgcaaccccatggtcgagcaggcgctatgggcgatgaggagactggttaattatctcctcaataactatcgctccacgatccgaccggactttacctttgacgagatacacgtggagctggcccgggacctcaagctatcaactcagaagcgggcagaggtgaggacgcgtcagaagaaagccgaggaggacaacgatatggcaagggactacctgcgcagccaaggtctgagtacctctcgagaaaatctccagaagtacaagctctatatggagcttgccggtcgtagtatgggggtcgtcacttgtccgtataccggcaaggtcatacgtggactgagtgctgcattggatggcaacagtatgttccagatcgagcatatcgtcccccgtacaatgacctacgacgacagctttgccaataagacactatgcgatgcggacttcaataggaagaagggcaacctgaccccgtggcagttttatcagcaggatccaagcccaaagctctggggtgccgactcgtgggaggaggtggagcatagggcattccgtctcctaccatatcgcaaggcaacccgcttcgtgagtaagaccatagaggatcagctctccggggatcagctggtagataccgcctacattagccgtaaggcaaaggaatacctctcctacatctgtccccaggaccatatccgactctatcccggtcgggtgaccgcaaggctgaggcaactctggggactcaattcaatcctctcgcaaggacccactatcaccaagggtcagctcccagcggggcttgcgctctcaggtgatcaaattcctgccatcgtcattggcaaaaagaagagtggcgtactcagtcgcattctgcctaagtacacctctcgcccggagcgagaggagcgtgacgtggtcctgctggtaagggtgcagaagggaaagatatatagtgccaggtacagcgagctgccactattctgggacaaggctgcctccctggcggacgggacatattactttgtcctccgtagttcagaagtggtccgtgtggagcgaatgtttacagaccaacctcgactgagggaggatcagctgagagccagggttaccattgagctgaataaagacggacagcccaagctctcctccagagagatggatgtccgcatcctgaaggatgtccctttgcccactgccccgggtaattactggctgacgataccccttgtctcagtccctgaggttactccggagcatccgagagcaaaggttgccaccgacacgatcaaggtctcgggatcagtggagcagggtgtgtttgtctccaaggtgtataggcagggtggtgtggctatggaggatggcttggcgcaggtcatcctcactccggacctctcagaggtgtccttcaccaagatcaagctggatgctcctgcgatcacctcgggggaggtggttctcacgggtgccattgacaggagtgatctcttcgtctgtgaccaggatgatgaacttcgagtgcagatagactcatttgatgagccggggaagtactatgctgtcttctcctttgacccgatggcgtcctacatcctgtcgtatgaccaaacacctaacctgagcagtgacgaggtggtactcgagggtgatctgatctataatgataaggacgataggatccacttcagtccgtcgaagaatagggatgatcaccgacaccacgcacttgatgccatagtcattgcctgcacaggacagggagtgctgaccgcaatgtctacctataacgctcacgctgatgattatgagagagggacaggcactaagcctacatttgcctctccctgggagggcttccgtgacgatgtgagggaagcgatcgaggccgttctcgtcaagcacaagcagagtaccaagatcctcaataaggtgacgaagcagatcaccaaggatggtcgcactcatcgctccaagggccttgccgtacgtggcaagctccacaaggagaccttctatgggcagcgacagtcacctgaggagcctgctccgacaatgcactatcgagtgcccattacttcaatcaccaaatcaaagcaactaaatcaagtggcagacccgacaatccgggcgttgatgatccggcgattgcaagatatgggagtggataccacgcaggaagactacgcaattccaggcaatgcgttcgtggacaaggcgggtaactacaccatcctcctaccgaataagcgtggagtccccgtcccggtgaagaaggttaggcgtagaagggttgttaataatacggttcagcttgatggttacaataaggaggtggagactagtaacaatgattttgcgcttatctatgaggatcaagagggtaattattgtgaggaggtggtgaccttttgggactctgcagatcgattgttgcatggacaggatagagtacagctcccaatggatgcaaagagagtcgtcatgaccctgcgcatcaatgatatgttcgttatcggcatgagcgaagacgagctgcggagtgctatcgggtctagtgattatgggggtatctctgatcacctatatagagtgcagaagctctcttcgatgcattatgtattcagactgcatagagccagtactctcaatcatgacgaggaactctatacaattcgcagctttagtgcactcaaagagtctactcccattaaggtgataattgacacagacggcacaatctctatagcgacacgagatgatcaagcgaacaatcaccatcagtagtccctcgcacctctcgcttgatagagggcaactggttgtgtacaataaggatagagatcaagccagaacgcttcccatagaggacatcggctatctgctcttagagaatgatcggatcaccattacactacccctcatccggtcctgtctggagcagaatgtcggggtgattgtatgtgatgacagacacctcccactcggctctctcctctcactctccggtcatgagctgacgggaaagagagtgcgactacaagcggagccctctaagcctcttgtcaagcaactgtggcgaagagtcgtggtctcaaaaatcaataatcaagcagatctcgtacgttgtcgggacactgcctgcgcacttaggcttaaggagcttgctcgggaggtgcttagtggagatagtaccaatagggagggagcagcagctcggcagtattggtgcgctctcatgggccctgacttctgtcgtgatcgtgagggggcgtttcccaatgagctgctcaactatggatacgccatcctccgtgccatcactgccagagccatcgtaggcttggggcttagtcccgagatcggactttttcatcacaatcagtacaatgccctcccactcgcagatgatctgatggagccctatcgaccctttgtggacgagatagtattgtctctgactgtaaccggaagtaccgctctggataaggaggcgagaggccggctgatacaggtgtcctgcaccgaggtcagcatcggtggtctcgtccgccctatacagctggcgatgtctatgacaacggcatcgcttgccaagtgttatgagcaggggaaggcagacgaactactcctgccgtcatttgtgacctaagtgtatgatgataagtaagtatcagtctatgtggttgctcgtactctttgatctgccggtgatgacgaagaaggagcgtaaggtggcaacgcaatttcgcaatcaattgatatcagaggggtatatcatgatccagtactcctgctatctacgctattgcccgacgagagctctccgagataagtttgagagccgcctctccaagatcatccccgaggagggctttgttgtagcctttactcttacggatgctcagtatgccgatgctgcgtggtactatgggactaccccggtaaagtctcagcagatcccggggctctttgatgagctatagcattgtcttgagtcctctgtcatcctttgcagtgacgcgtaaggcactgtagggtcttgcattgacttgagaaagaagtacctttgtggtggcgaggataaaagatcctcatcatctactacccttgtactgttcttttcatagatttatttcctttgagtaggctcagatgccacttgtaatcgtgcttttggggagataggttgtggattgatcagtttagggaataagagacaacgcgggctacaggcggtcaacccctttacctgttgtggattgatcagtttagggaataagagacaacgataccctcatctcagtgtatggtatgtatgttgtggattgatcagtttagggaataagagacaacaagagcttatcatcatcacaagttctttaagttgtggattgatcagtttagggaataagagacaacgagtaccaaagctataagaataggtcgtaagttgtggattgatcagtttagggaataagagacaacgatgcgccaagcagcgaagcggctctactagttgtggattgatcagtttagggaataagag

SEQ ID NO: 3554 - DNA, 7176 bp, synthetic construct
  source 1..7176: mol_type = other DNA
  misc_feature 1..7176: note = Synthetic
cctcaataatttatagtatatcgtcacggtgtttagaacctagttagcccacagagttcccgataacgattgcatgaattttgactcaatcacgcgcaggatactagccattaaaaaggaatcgggctgttaatgcttaaaatcccccctgattgcgggtgtggaaagcggatgcgggcggcatgtaacaataaacgcacagattgtgcacacgttgaggggctggcgtatagctcatcaccgaggatcgggtggccgagggcttgcaggtgtacgcggagttggtgggtgcgcccagtgagtggttctagatcgacgcgggtcgtgtcggtgacggcatcgtaagctattacttgatagcgcgtttgtgacggtttgcccagttcaaaactgacgatttggcgtggacggttaggccaatcggtgatcagcggcaggtcgatttcaccttgcatttgcagaatctgccctgctactacagcgacgtaacgtttgtggacttggcgggtttggaacaggatgcttaaggcacgttccatcgctttaccacgcgccatcaccataatgccggatgtccccatatctaggcgatgaacaatcaaggcatcaggaaattcagcttgaacacgagcaatcatgcagtcctgcttatcttctcctctaccgggaacggacaataaaccagcaggtttgtcgaccacaatgagggattcgtcaaggtagaggatgttcagaccggtgttggctgggggggtatagatgatcaaatcacattccgtggaaacgagtagtccaataattatgtaaacattaccgacgtaaaaaaagcagccgaagctgctttttatatcggttgtttccgaagaaacatgttgccgatagtccccaccatcggaatacctgatacaatttcagcctatcagaaatattaggggcaagcaaatggaatatcgtttaggtcttgatttgggaacagcatctattggggcagtcgccgtaacacccgacaaaaaagatggttcattacatatactcgcgcaacagttgcgaatttttgccgagccggtggagaatgatcaaggcacgcttcagccgaaaaaagccgctcgtcgccaagcacgtcaacaacgcacccaaattgaacgacgcgccaaacgcctgaaagatatagccaaactttcccagcactgggggttagaccgtaaggcaattgcccctgacaacgggcaacacctaccacgcttacgcgccttggctgtgactgaacgggtagagctggaagacctgttccgtattttcctgaaattagcgaaacgacgcggttacgcaggtggttttcgcacacaaggcgatgagagcggtgaagtcaaaagtggagtggaacgcttacgaaatatcatgcaagagcgcggctgtgaaaccttggggcaatacttgtatgaccgccaacaacgccacttgcctattcatctgaaaatcaaaacgacaggcggcagcacgggtaataaaaaaggcaaacaggaaatcaccgacccagaaagtgaaaacctctacgccacccgcgatctagtcatggaggagttcgacaagctgtgggacatgcaagccacattccacaccgtgctgaacaatgagcatgaaggcaaacacctcagaaccgtgttccgcgaagtcattttccaccaacttcccttgaaatccgtcagcggtatggtgggtaaatgcccccttgaaaccaatttgccacgcgccccccgctcacaccctgtcgtacaagccttccgcattgaaaaacaactgtcggatctgcgctggggtatccgtaaaaatgccgaagccctatcccctgaacaaaaaacgattatccgggagctgttaaccaaacaaaaaagtaccagctttagcagcattgaaaaagcactagagaaagcaggctgccccaaaccaatgggtaaaagcctaaacctgcaaaccattacccgtgacgaattacagggcgacaccaccattgctgcctttcgcacaatgggcgtagaacaagcatggttagacattcccaccaacgcacaaacacaagtcatcaacctgttagcagacatgggcagccctgaacagtttgataccgaccactggcacacccaaatggtcggtgcaaatggtaaaacgcgcacctttacaccggaaactgtccagttcatcaacacactaattaccagcggaaaattcgggcgtttagccaaaatggggctggaaggcgggcgttcggcctattccattaaagcgctgcaaacactgaccgaatggctacaaaatccgtggtggcctgaaaactggtcgggtgaaatgattgtatcagaagataacgcagtgcgcgtttactacccacaagccaaccaacagccgaccttgcaagacaccctgcccttgccacccaaaacgggtaatgaagtggtggatggagcattacgccagctttatcgcacgttgaatatcattcgcactgaattgaaggcgtggcctagcagcatcgttgtggaaatgagccgcgagttggggcaaggcatcacccgtcgcaatgaaatcatggaacagcaggggaaaaaccaactggcacgcaaaaacgctaaagccaagctggaagaaaacggttgcactgctagtgaacgcaatatcaaacgttatttgctggctgcggaacaagactttaaatgtccgtattgccaaggacaaaatacgctaaaaatcagtgatattgtgaatggtcacgaaaccaactttgagcatattctcccccgctcgctcacccgtgtcggtttgaaacgcagtgaaattgtattggcacaccgccattgcaatgacgaaaaaggtgatcaaacaccttggcaagcatggggtgatggtaaaaatccggtacgttggaaagcggttgaggtaatggcaaactggttgagcgataaaagcaacaaagcccgcaaagatagaagcagagcaatcgccatgagccgtaaagccaaacttctgatcatgcaggattttgaaaatgacgtgctgaatgacgaatccattgccaattttaccgaccgccaattccatgagtcctcttggattgccaaagaagccgcacaatggttacgtagcatttgccctgatgtctcggtttcacgcgggcaaatgaccgctcacttgcgtcgcagttggggactggaaaccgtcatccctgaagcgcgattgaaagaaggtttccccattttagatgatgaaggcaaaccggttagtgccgaagaattcgccgattttcgccaagcatgggaaggtcacgctaaaagtaaatctgggcaatatgtggaacgcaaactggataaacgcattgatcaccgccatcacctgattgacgccctaaccattgcgctcactagtcgcagtctttacaaaaaaatggcggatcattatcgcaatgattgcgaacgtaatcagcggggcgagaaaagccgcatccgtcttcatgcggagccaccttacaagaaagtgcgggatgccgctctgagcatgatccttacttgtgaggtcagccacaaaccagaccgttacccgtccggtcaattgttttatgacactacgtatgggcggaaattacaccccggtacgggaaaagctacgtttacgtatcgccaaacactggcctcgttagtgggcgaaaaggacaacgcggacaaagcctacaagcaagtgcaaagcattgtgagtgatgatgtgcgccagctagtgttgaaggcgctggacgatgggatagccaaaggcatgacaccgtttactgcattacagcaaccgatcgaacatccccaatattcccgtgaaggcaagcccgtttacatcaaaaaagtaaagtgttatggcaatagtgcggagaatgccaaagaagttaagcatcgcaacaggcagggtcaggtattaacgaagtatctgaattccaagggttatgcttacctagagattcgagtcgagaatggaaaattgattggtgaaccaaacttgattccacttcatcaagctgcctcgcaaaagaatcgtactaaaccaagcaatgtcatacgattcttcaaaggtgatacggtagaagacagcaaaactggtaaacattacgtggtgcggcagctcaaaagccaaggcgggggtatgttagtccttagccctgttaccgaaccacgcagtgttgaaggcttatcagccaaagatggtgcattcagaccatcaggcaaaagtgttgtacgcttcaggggcgttgaaaaatgtctgaacaccgtatcattctgattgaaaatcctgcccacctctcgattaatacggggaggctgcggctctcacgggagggaaaggaggatgtccacatcctcccgcaggacattgctgtattggtgttacatcaccatacgattcaactaaccgtcaatgtcttgcgtgtattggggttagcaggggctgctattcttacgactgatgataaacaccatccctctgctatcaccctgccctactatggcgcaccgattcagtctcaacgcttgcgccaacaaatcaaagccatgcaggaagggcgagatgcgtttgtttggcaacgtttgattcaatgccgcatccgtgggcaagcggacaatctgcgacgtatcgtcaacaaaggcgcattgcggctagaacgcatggcagaacaagtgcaacccgctgattacacgaaggtggaaggacaagcagcccgtcattactggtcgcatttattcccgttaggcgaaagccgtgtcaaacaaggcgcggaagaccttaccaatatccgccttaattttgggtatgccgttttacgctccctgattgcacgggagttagcggcggtggggttgaatcctattttgggggttgggcatatcagtcaagagaatccttttaatctggcggatgatttcttggaatgttaccgctatttggttgaacgtcaggtatttgggcatcctgattgtgagacgtttgacccacacgaacgcaaaaggctcgcgagcgttgtgcaagaaacggtgacattgggaaaagaaacctttcgactaaccagcgcagtgacggaaaccattgccagttattgccgctggttggacaagggcaaaggggaattacgagtaccacatttggggtaagttatgggcaagaaaaagggggcgaatagttggcgcattatgtgggtaatagctgtttacgattgtccgatgactacagcggaagcacgtcgggactacacagatttccgccgtcgtttgctgaaagaaaacttcatgcaattgcaaaattcgttgtacgtccggcattttccgacgatggcgacggcggaggcaaccatcattcgcttgaaaaactttattcctgatgatgctcaagtggcattttttcttgtgaccgacaagcaatacggcatgacctatgagtatttcgggcggacggcaacaagaaaaaagcccgatctaccggagcaaatcgagcttttctagcgagacaagtcttgtaaaacatagtcttacgcgacttcagagtttatcaggcattccgatggtggggtatcggaacccgcaacagaccaaccccaacaactggtatgagtttatcaggcattccgatggtggggtatcggaactgttagccgaaagcaaccgcgctccattggggagtttatcaggcattccgatggtggggtatcggaactgtggcggcgctctcaattgcttcatgtacgagtttatcaggcattccgatggtggggtatcggaacgggggctgtgggcgggttggtgatgggggggagtttatcaggcattccgatggtggggtatcggaacctgcgcataggtggcagtaatttgttttgggagtttatcaggcattccgatggtggggtatcggaacttgccacgtaaacgtgatgcggattgagtcgagtttatcaggcattccgatggtggggtatcggaacttggtagcgagtgatcaggcgcttggcttcgagtttatcaggcattccgatggtggggtatcggaacccactcccacgcataacccgttggcaacaggagtttatcaggcattccgatggtggggtatcggaacggctggctggcgcgagtaaatgaggatggagagtttatcaggcattccgatggtggggtatcggaactgaaactattgtgtacagcacggaataatggagtttatcaggcattccgatggtggggtatcggaactagtcgaagcccccgaagacgaaatcaagcgagtttatcaggcattccgatggtggggtatcggaactgaccatagaggcgattcatgcaacccgcagagtttatcaggcattccgatggtggggtatcggaaccgagagcgtttacaccaacagattcccgatgagtttatcaggcattccgatggtggggtatcggaactactgatgctggtgattgagggtgtctaacgagtttatcaggcattccgatggtggggtatcggaacaatgccgccagcggaaccgttggtatccaggagtttatcaggcacgatggtggggtatcggaacaatgccgccagcggaaccgttggtatccaggagtttatcaggcattccgatggtggggtatcggaacaatgactgcacccgatcatctgatcaggctgagtttatcaggcattccgatggtggggtatcggaactttgggtaaggacgggtaaggcaaggcgcggagtttatcaggcattccgatgggaaaagtgtaagctggccatcacatccgctgcttctagctcagggaaatcctcaagaatctcagtgatactcatccccgctgcaagccaacctagcacatcagcaactgcaatccgtaacccgcgaatacacggtttgccgctacgcttgcccgcctcaatcgtaatccgactattcggtgtcatcacgctcatctacgcctctcctgatgttgtgtaacagctatctgcattatagcgccaattacataatcccagacgcaaaaaaggccagtcatctctgactagcctttcaatttggtgccgggaagaggactcgaacctccacggggttgcccccactaatacctgaaactagcgcgtctaccaattccgccatctcggca

SEQ ID NO: 3555 - DNA, 14613 bp, synthetic construct
  misc_feature 1..14613: note = Synthetic
  source 1..14613: mol_type = other DNA
tgttgtttgcggcttcattctctcggcatttcgcgggcgtgcatttgacgtgctcctcgcccttgctgtggctttcggtattggagcatatgtccagactcttttcctcaacaatgatctaaccgttgctgacggtaatttggttgattggacccagtacaacaccattactgcgatcagtgcacttgtctggggaggcatagcggctgcccttgtcacgctaacggtgaagcgagggcgggcaggaagagcagttgcggcggcctccagcgttgtgctcgtgcttgttcagcttgttggagtcgtgagtctatgggtttctccgccggatggctcgagcgtccagagtcagcgcgtctataccactgagcagggcatgtttgacgtgtcgggaaagagcaatgtaattgtgttggtggttgatactgttgactcgcttcagaccgaggcggtctatgcaaaccatcctgagatgctcaacgagttcacgggcttcacgtggtaccagaacagcaccggctcgatgattcccacgcgatacgggattccatttctgctcacgggttcttatcccaaggccgaggagagctgggatgatttctttgatcgcttctattctggaagtacattcctagatgatgtggcggcccaaggctacacaacgggcatctactccgattcctttagtccggaatatgcaaagactcgtactataaacgtgcatccccttgacgcgtcgaaggcgctcgacaagcggggcacgctcgcgattctctaccagtgctcgctctatcgcgacatgccatgggtgcttaagccgttcttctggtactacacagaccaaatcaacaatgccatgctctcgagtgacgctgatgatgacccctcaagcacgccctatgttatgaatgacccggcgtactaccaaaagctcaaggagcgaggtctttccatcaacagcgaggacgcctcgttccgctttattcaccttgtgggaacgcatacaccctatacgatggatgcgcaaggcaacctcaacgaggagggcacaagcctggaggaccagacgctcggaacgttccgcatcctttccgagtatttgagacagctcaaagagcttagggtctacgatcagtccacgattatcgtgactgcggatcacggcgagtggtacctcacggaagagccccttaccaagcctacctcgcccattatcttcgtgaagccagcacaggactctgggacagacgcggctccctgcgtcatctcccaagagccggcgagccacaaagatctccaagccacaatgctcaaggggatgggtgcctcgcaggaagttctcgatcactacggagagttcaacgttgcacttgaggatcggcacgatcctgcggatcgtcttcgcacgtactgcatgcttactcacgatggcaagcgcgactacgacttgattgagtatcagatagttggcgatgtcgccgatttcaataactggcatctcgacggcaacgattggcgtaacgaagaggcatggaaggaacgtggtgcaggcgagtagccggagccgctgaatgcttgctgtacgacagcgaggtgccgtcgctcgtctcgagcggtggcgcctttgcttctcaatggagcttgggctggtcgcggtatgatgacgtggctgcgttattgaggggactgttgatggcgggtgctggctttgtgggaagagcgatggcgagcgactttgatgggacgctcttcttcggcattggcgggagagcgcatccgttgcgtcggttcctctcgcgtgaccttgaagccattgaggcgttccgtgccgggggcggactctttggcgtgtgtactggccgcccgctcggcactgttcttgcggatgcgggtagcagcctgagcttcgactttgccatcacgagcagtggggcatgcgtgagcgatggagtagggaacacgctgttctcacgcgagattcccgatgacgatgtacgcgcccttctggatgcaacgcgtggacagacatcgcggccgccgtttatagcattggggtctggatacctggtgcttggtggggctggcattcccgggctacccaaagcgttcctcaagcaacttagggtcgtgagctcggttgatgaagcgctgtccattggacatggcggcaacggcgggggcgtgcaggttgtctcgcttggttttggcacccaggagtgtgccgcacgttttgtggccggagtgggtgagctgcttgggggcagggtttctgctttccagaatctcgactctgtggacgtagtgcccgcggggtgctccaagggtgctgggctttccgttgcacgagggcgtttggggctaggtttggttggcggtattggtaattccttcaacgatgtgccgcttcttgacgaggcagatgttgcctacacttttaaccgtgcgcccgaggtggtgcgtgagtgcgccgatgtgctggtggacgatgttgtcggagcccttgcggatcttgagctgcgataggtggcctcaagggtcaatggcttagccgtttctgcccctggtcctggcgcgaattcacggttgggatacggtttttcgggggtaccccaagtacaaaacggtttgaagcctgatgaaccgcaggtcagagaattgccactgtatctcagtcatataagaagtctcaccaaaactgctgccaaccggaacgtggccgtggctattcgcaagtggggggcaagctgacaaccggaggcgccgataatggagcatgacaacgccaaaagcaggtaaaagagtggttacggtgatgatgaatcgggacatacacgcaacggagcccactttcgttgaagaggcgcgaatcgccggggtcaacctgcgcttctctcgattcatttgtggcgttggcggagcgagtgatgttattctctgcactactgaggacggcagggaggtcgttgcgctcgcaagcgagtggccgcgcgaggaccgatgcggcgcctcacgcggccaacccggaaccgtaacgcgcaccagctcagactcgcagaagattgcgctctaccggtcgctcttccgaggccgagaagacgcttacgcgaatagctacctgcgcaaagacggtcgtatgggatacagtcccgcctgttcgaacgcgtggaagcccggtctgtgtgaccgccgccacgtggggtgcgacaagtgcggcaaccgaagcctgcacgcgctggatgacgacgctctcaaacgccacttcaaggggcttgacccccgcaatcgcgacgtgctggggctctatcccatgacagaggcttctacctgctggcttctcgtcgcggactttgatgacgatggttggcaggaggcagcttgtgcctatcgtgacgcttgccgcaggcgcgggctcgactgcgctgtggaaaggtctcggtccgggcatggcgctcacgtctggctgttcttcgaggaggcgatccccgcgcgtgaggccagggccctggggacgcttcttttggatgacgcgcgctggcattgctccaagctgggattcggctcgtatgacaggctttttcccacgcaggacacaatctcctccgacggtctgggtaacctcattgcgcttccattgcagggtgctgcggtcaggaaggggaacagcgtttttgtcgacgacgcgttctctccctatgccgaccagtggacgttcctctcgtctgtgaaaaaggtcccggtagcgatggcgcgtgagctgctggagagcggcggcacggcacctgctggagcgagcgatgccgaagccgcaatgccgccgaacgtggtggtctctgttgggggcatgatcgcgttggacaaaggagcccttcctcagacggcgattgcggacctttctcgtcttgccgcaatggcgaacccagagtttttcctcaagcagcgcatgcaccaaaagatctatccagcaaagacgcctcgctacctctggtttggcgaggaggatgaggctgagttgcgtttgccccgaggctgccttcgcgatgcggtgaaatacctgcacgagcggggcgtgaagacgcagataagggactgtcacacggaaggtcatgcgcttcacgcgcgctttgccgggagctttaggcctggtcagcgcgaggcgctgaacgcacttgccgagcatgacgacggaatactggtggcgcccactggctttggaaagaccgtgatcgcagccggcctaattgctgagaagggcgtaaacacgctggtgctggtcccaaaaagctcactgctggagcagtggcgggagtctctctgcaagttcctgcagattgacgacgaggcgcccacactgcttacgccgacgggcagaaaagcgcgacatcagccgggaaaagttggggtgattggtggcggcaagaggttgccgagcgggttggtagacattgcgttggttccatctcttatcgaaggcggggcggtgccgggtgaccggcgggtgagtgagctggtctctagctacggcatggttttggtggacgaggcgcagcacgttcccgcatctgggctggtagaggtgctaaaagctagtggagcccgctacgtgtttggtctaactgccacgccaaagcgcaaggacaagttggaaagggcgcttcagttgtttctcggtcccgtacgcatgaaggtgcagggtaacgggcagtcgacagctggtggcgtgagccgtgtgcttgtgccgaggttcaccggcgtgaggcttccagacgacgttgacgctggggattggaacgcccttctggacctggtttgcaaacacgaggagagaaacgcgctgattgcgcgcgatgcgtgcgacgccgtgctgcaaggaaggtatccaattgtgctcaccaggcgcgtggagcacgcaaaaacgctttcatccttgatagagaagcgactacagcaggagtggcgcgcgaccggcacggaaggggcaggggaaccgtctgtaatcacgcttgtgggaagcgacgatgccagggcgagaagggagcggctagagcaattgcgcaagctcccgcctgagcgcattgcctgcattgttgctacggatagttatgttggcgaagggtttgacgagccgaggctcgatacgctgctgctagcagctcccgtggcgtgggaaggcctgctcacacagcttgtggggaggatacagcgtgatttgccggggaagcgttcgcctcaggtctatgactacgtcgacgagctggtgccgttgctggcaaggcagtggcatgaaaggcttaaggcgtatgcgaggcttgggtatgtggtcgaggggcccgaggcgaatggtgtcgagaaccacattgtgacagctggcccggcggctatggaactgcttcggcgtgatgtgaagagcgcgagagcggagattactcttgtctcggcttgggtggtgtcgaaggcggttggtgccattgcgcctgctctggtcgcggcggtcagtcgaggcgtgagcgtgacggttgtggcgcggacgcgcgatgatgccggtgacgtggatgcgtgccttgatgagctagaagaggccggttgcaaggtcaagcatggtaaacgcagagttccgaattccgcagtgtttgatgggtcgctcgtatggtttgggggaatcccgccgcttgcgtttgcacatgccgacgactgcagcatcaggattgtgaaccgcgagcttgccgcagagcttgagggtgcgctgtgagcggtggcgctaggcgctttgactaggtttgagaggttccgctcgacgtgcgatagttgttgcgcggcagagaataacagctacgactagagtacatagatggttatctgagtgtatttacaaatcgttttttggaacttattattccaattactatattaaataccatgaatttcgatatcggagcgagcaatgagtcacccaaccgtaaggctcacgagcatctcgttgaccaatttcaagaacgttcaccatggtgaagtacagctgagacacgtcgagggacacccggcggacatcctcgctctctatggtcaaaatggctctggaaaaacttctctcatcaatgcgctatgggtcttgaagagctgcctaacgggggtctcactttcccgacgggctcagaccttcatctcgtacggttgttcaagcgcaaccattgcctttgggtttaaggtgttgggggcttcgaagtggtatagggtggtttacgaggtcacgctgtcacgtcgcgactccgatggtttggtggatgcaacgggggtgcaaggcatcctccccgtcttcatctcgcgtgaagtgcttaagattgcagcggaagatggaacatcttctgctcggctgcgtacggttatggacacggggcgaggcgatacctttggcccggataccatgaggcgctacttttctggcgacagcaaagacattatctttgacatggcggttgccaaaagggtctctcagagggagtctcggtcgttcatcttttctcgggaattcaaagatttgcgagcagatgatcaaccgcacgtgcgtcgaaatgcattagacaaatcggtcgatgtactgctagacgattgccgaaccgttctcgatgcgctcgctttctatgggcttgatgggttatttgtagttgatactgcttctgttgacacggtggggctgtctgcattgccgctgttctttcgcatgggtgccggtgaaggaagcaggattgcgggccacgcgattcttaaggcagacgctcctgtcaacatccccgacaggctgctatcggtcacaaaaagaatcgtttctagtcttaacattgttctgcgtcagattgtccccggccttgagattgaagtccgcgagatgggcgaagtcactctcgatgacgggagcgacggtcagcgtatacagctcctctccaggcgaggagatgttgtgctgccgttcgattgcgaatccgaaggcatcaagaagatagtctctgtactgcagatactgattctcatgtataacgagccctcggttactgttgctattgacgagcttgactcaggcgtcttcgagtatctgctgggcgagcttctcgggattattgcagatgggggaagaggccaacttatttttacctcgcataatctaaggccgcttgaaactctagataagcagttcattgtgtttacgagtaccgattccaataatcgctacgttcgcatgaggggggtgaaggagaccaacaatctccgaagcctctacttcaggagcattgttctcggcgactctgagacggggctctatgagtacacaagcaatggcgagattgcctacgctatgcgccaggccggtgagaacattgagtaagaaggttgttttcataattgtagagggcccgactgacgaagaggcccttcacgtgctgtttgaacgtgcgttggccgatgctcgcgtgcacattcatgtcgttcatggtgacatcacttctaagaaggggatcactccggctaacgtaagcaaatctatatacgaaatggtgaagtcctacgctgacaacaacgggctcaggcgtagcgactttgcaagagttatccacctgatggatacggatggcgcgttcgttgataactcagtggtggcagaggatctcacggcaactcggccccagtactttgatgacgaaattcgttgtcgcgattcgagcagaatcgttcaacataatgatcaaaagtcaaaggtaatgaggcgactcgctgtgttgcccaatgtttggggtgccattccctacgagccattttatatgtcttgcaatcttgatcacgtgctgtataacctgagaaacctgagtgatgaggagaaggcgagagaagccattcgcttctctcggaagtaccacgatgacattcctgggttcctgaattacatctgtcactcagccttttctgtgttaggaactcggaaagaaacctggcagttcatagagggggataacgagtcgctgcatcgtcattcaaaccttggaaatctgttcgaacgggatgacgactgatgactcggtggcttaggcgctgatctagctcggtcgcgactccgcttgcctgatggccttattaatgtcgcgtgcttgtgccaaagtgtggacaaggttcctaaaagggttccgccctgtcccgcgaagggagtcggcatggcagcggatgcaaagtttgatgcgtcgctctcttatcaggcgcgttctctctggggaaagtcggactatgggatgggagagtgctggctgccgctctatgtccatatggcagactccgctggagtggcatcgcgattgtgggacagctgggtacctcgttccaccagggggatcatcgcgcgggcatttgatggagatgagacgctcggacgatcgttgttcgtgctcctcgccgcggtccacgatattggtaaggccatcacacgtgttcgtctggcaaaagcctcagtggtgtgctatacatgtattggagtgatttccaataagtggttgcctagtttgcttccacgaattctcagcccatatgggccggcccctttttggggcttttttgtttccgctctcttcccaacgatttcttcgccttccctggcgctctcattaggcgctttttgactaccgcgagcataattcgctgctttataacgcgcgctttgtgattcactcaagtatatggctcagggtaatttgtcgcttggaggatagggaattatgtctatgcactatcgaatgggtattgatgttggcctcaagtcggtaggacttgctgcaattgccattgatgacagctcggataatccgcttgatgcaatcccaatgaaactcctgagcgtaatgagcgttgtccatgacggtggaactgaccctgacggggcaaagaccgacacctccagaatgagcagtgcgggggtcgcaagacgcgctcgaaggttgagaaagcgtgcgaccgctaggaaaaagaatcttcaaaagttgttagagaagtacgggtttgatttcgagcgcgcaaacgctatcggtgacttagcgttctccaaagacccatactttagctggtatgctcgcgaacaagcagccagctcctatattccaaatgaaacgcagcgcaaccttgcaatcgccatttcgcttatggcgattgggaatcaccgtgggtggagaaatccgtattcttccataaatatgctaaagggccaaagtttaaagccctcatccttctacctcgagtttgctaatgaactaatggagttgaatagaatccccgcgaataccgatatcaattctgagcatcgccttacccctgctcagctagttgtaagagcaaatttgcttagccctgatgtcaattttcgtggcaacccggcaaatagaagtaaaaacaggcgtgacaggtcggtaaacctcggaatcaccttgatcccgctaggcaagcttcatcagagcgattactactatgaggctagaacgatacttgagatgcagcatgtcgatgagactgcaaagaacgagctccttaccgaactgttctctcagataaaccccaaagatgtcggggccgccgcgtccaaggtcgctcgtgatgatttgcagccgtcgttggccagagcaagtaaggcttctctagagttccagcgtttcaggattcttaccactctccagaacattcgtataaagacgaatgacagtacacgcaggttaagcgcagacgaattggtgagcgcttatgagtatctgtgctccgaagatgctagcttagatgcagatttgagctgggatgatgtagctttgcatatttcgccaagcttgaagaggtctgaccttactggggttggaggtattacagaggacggggaaccaatctcatcaaaacgacccccagtgttgaccactcagtcattaatcgttcgagcaggcaagaaagaggcgctccgtgacgtatcccaatggtgggctcgagccagtgatgatgagaaagagatgttcattaactttcttgggaacgtaggcgctagtgctgaatgccaaaccaatgaggaaataatggcgcggaattccgtcgatgaagagatgtcccgccttgaagaagattccctggccgaacttgagaagatttcaatccccgctgggcgagcgaagtattcaattaataccatgcgtcgcctaaatcatcgaatgctccatgataacctcgatttacatgatgctcgcatgagggagtttggggttgctagcgactggaaaccctctgctgaagagctcggaacacctaccggtaatccggctgttgacagaacgctgcgtatcgtatctcgatgggttagggcatgcgtagacaaatgggggattccggaaagcgtgaacatcgagcacgtcagggacggcttcatgtctcccaaaactgcccgagaatacgataagaaactcgaatttcgttacaaagagaataaaaaaataagagaagaaattgtcaaagctctctccgaagagggtagcgagggtcttttatctaatgagtacgttcggcgctcggacatcaggaagtggcaagctctgcagaggcagaattgccaatgcgcatattgtggacgtcgaatcagtttctttacagctcagatggatcacatcgtgccgaggaagggtgcgggctcaacaaataccttggataaccttgttgccacatgtgcaaattgcaataaagaaaagagcaacacactttactccgtctgggcaactgttgagcagcgcaaagcaactatcgagcgggttaagcactggaatcgagattcctactttgctaacggtaaagagttcgagcagtacaagcgtgcagtaatcgcacgacttaatcagactgttgaggatgaaccaatcgacaatcgttcaatagagtcagttgcttggatggcaagatgtctcagcgagcagattgaaggctatcttattgagcgttcggctgcggattctgaccctggtcgcaaaaacagcgtgcacgtttatcgtggctggattaccgctgaagcaagaagagcatctggtattgagaacgagctcccctggctgggaggagcaagtgggaaaacgaggctagacagacgccatcatgcgattgatgcggctgtaattgcatttctcaggccagctgtggctcaggttcttgtagaacgtgattccatgcggcgtgcttcgctcgatctcggaagagataatgattggaagacgtattgtggcggcttggaagagcattcgatctatttgaattggcgtgacaatcagatgacggcattggggatgcttctttgccgagcaatgttgtcagataaaattgccgttactagcccgctgcgtctcaaactcagcagaggcaaagtgcatgaagacacagtacagaaggcagtctatctgcgtgttggtgatgcgatgacctccgaagcaatcgacaaggcgctgagccctgcggtatggggggctctcactcatcaacccgattatgatcctgctacaggactagctgagaataacagtcgagtcttgaatgtccacgggaaagtgctcccacatgactcaaaaattggcttcatgtctgacaaggcaaagctgatgaaaagagagtatgcccttcgctgccccgtaagaggtggctatgcaaatcttggagactcaatccatcatgcgagaattttccgtatccctggctcacgtggaaaagggttcaggttcgcgatgatgcgtgttgccgaaattgatttggctaggtatcgagacgctgacctcttttccgttcagcttcctatgcagtcaatcagcgttaggtttgcggatgacagtctaaaggctgcccttagagacggtactgcagagtatctcggatggcttgttgtgaacgacgagttggtcattaatcctgacgcatcgcttttctcacctaaaggtaaacaggccatcaacttgtttatgagggcgtttcctggtactcgccactttaaagtaactggattcccccaaagatcgaagataaaaatcgaggcacagatgctgtcaagtgagggacttccagacttgtcatcaattgaagacgatgccgagagatctcgaattattgaagatgtatatggtggtctagcatggaccgatgatgaagtcgacaccattcgaaaagccttcggcgatcatgcggggttactgctctcggtcgacgtcctctttgccacaaagcctcttgtagtcaggcgatcgactcttggatatccgaggtggaggtcgaaatcaaacatgcctctctcatggacggtcgaatagtcaaggattggcgcgagaatgggatggagaacactcgacctaactcatctacatggagaactgggcttctccaaaagaactcgtatgctccaaatcgtccaatacgacacgggggagattaccgaggtggcgccttgtgatatcaatgtaatcttcgctggcgtcggggtcgggattcgggctggcgtggtcgaacacctagtgaacaaggatgtagccatattattttgcgattggaagggatgcccgcttgcaggggtttatccatggtctgatacgcatggacgaattgccgcaaggcaacgatcacaggctgccctatctcttccgaggacaaagaatgcgtggatgagaatagtgagggcgaaaatccgtggtcaggcaaataatcttgacgctcttggattgaacggctccgtacatcttcgggaaatcgcatcaaatgttgtatcaggtgatttgaccaattgtgaggcaaatgcggcgagatgttactggcattccttactgggggagacctttagaagatgcccggggttgcaaaccgataggttgaattcgatgctggattatggctatacggtattgcgtggctactgcatgcgtgcggtgcttgctgcgggacttgctcctgctctcgggctatttcatagggggcgtggaaattctttcgcgctggccgatgacttgattgagcctttccgacccgtggtcgacattgaggtagcccgattaaaagaatctgagggaattgataaccgggaagtcagacgcaaattgctgaatgttgccactgatgagtttgataccggaatgggctccgttcctgcagtaatgattgattttgctcagcagtatgggagatacgtagaatccgaaattaagtatctgccggtacccgagtggcgagcaaatgcattgcattgtgatactgatgattagggagagcgacgcaatgtggtgcctggtactgttcgaccttccagttgaaagtgttgaagagcgtcgtgatgcaagtaggtttaggggaactctcctagacaatggatactcaatggttcaattcagtgtctatggaaagtactctccatcagttaagagcaatcagtcaattgaaaagttcataaaagccaatttgccagcacggggaaaggtctgcattctccatttgactgacaatcaatgggcaaatgcgagtcgatttatttcggcagtcccagaaaagaaggcggagccaccaagtcaattggtcattttttagccgggaaaaaattaagtccattgtggacgtatagtgattttccctccaccgaaaagaaaaatcgagaagatagcgatttgccatctcagcaggtaagttgccacaaatcaatgatattcaccttacacggttggaaatcactctccgttacagctggtagactagctgctgaaccggggacttgccccgattggttggaaatcactctccgttacagctggtagactagggagagctcgggggtgtcctcgatcgtggttggaaatcactctccgttacagctggtagactagaaagacgaatacatctccaactacatagagttggaaatcactctccgttacagctggtagactaggcgagggtgatcgctcgctcgcgcagaggttggaaatcactctccgttacagctggtagactagaggtcatgtccatgttctacaacgtggagttggaaatcactctccgttacagctggtagactaggtgaccagcgcaggggagtccccggttagttggaaatcactctccgttacagctggtagactagcgtacctgcagtagcggtcggtgtcgaggttggaaatcactctccgttacagctggtagactagccgagcgcgtggactgcatcgtcgtcgagttggaaatcactctccgttacagctggtagactagccgggatttgcagcacttatctctcttggttggaaatcactctccgttacagctggtagactagtggaccgacaagtacgtgtatgccgtgagttggaaatcactctccgttacagctggtagactagtccctagtctgcgactcagacatagcagagttggaaatcactctccgttacagctggtagactagagctcgtaggtgccaaatggaaggacttgttggaaatcactctccgttacagctggtagactagcaatgagggcagaagtttggccacggctgttggaaatcactctccgttacagctggtagactagccgtcaggcgcgcgcccg

SEQ ID NO: 3556 - DNA, 16103 bp, synthetic construct
  misc_feature 1..16103: note = Synthetic
  source 1..16103: mol_type = other DNA
agctgcgcctcgtacagatcggcagcgctgtagctccggccgcccgccagaatgctccgtactggctcgacgatgttgtcctcatgtgcatcaaaaaattcgcgtatcgccgcatagcgctctgccaccaacgcactttcatacagcagcgcggcagcgcctgccaaaggcgcaaagtccacgctgacctgcacgccgcccatatcacgcagccgctgcacggcctgcgcgaaagcagcctgcgccagatcgtcaccaaagaactgcagcgtggacggcacgccaaagcgaaactgtttgggccaggctgtcgttgccagactgagctggcgcgaaaacgggtcttgcgggtcatagcccatggccgcctgcaacacactggccgctgttgccaccgtgagggcaaaaatggacacgcaatcaacgctttgcgctgcaggcaccacgccgcgcgcactgatcaggcctttggagggcttgagacccacgatattgttcagccctgcgggtacccggcccgagcccgctgtgtccgtacccagcgcaaagtccacctgacccgtagccaccacataggccgaccccgagctggagccgcctgatacatgcgccttggagaaagcattgggcacggcaccatagggcgagcgcgtgccgttgagcccacaggcaaattggtccagattggttttgccatgcagcgatgcaccggcattgagcagtttgtgcaccacagcagcatgcgctgcgggcgtgaagctgtaggcggggcaggctgcggtggtaggcagcttcaggacatccatattgtctttgaccgcaaagctcaggcccgcgagtggaccctgtgctgcacctggcaggggttttgccaagtgagtgatccaggcttgcggcgccaagcctggtgctttagccgccgcaaaatgtgctgccacctcactgccttggtccgaaattgtgctttgcaccatctttgagcatccaaacttgtatccaagatgcaaggcaaagagcatgccaaaggcaaagagtgctgcatgcgcccatgacaaaaagatgactgtatgaatcgaaaagtaacttgttaacttttttaattactaattagtatttatttatactttagcgtatatttcgatccgcggagggtttcatccaccgtttgccaggctcacaacttcaatgcaaccgtggcccatgcagacacatccggagattaatatgcaacaaacttttctgaaatgggtcgcggtgttaggcaccgcctcactcttggcagcttgcggtggcggcgggggcgacagtgccgcgccggccagtgctccagcagcagacagcaccgtagcgcaaaccgtgtccacccagcaagacctgtctacgctgaaagcagcggtgcagtttgtcgacgagggcagtgacgacaagctgatgcctcagatggaggcatcaggcgagatgaccatgtttgccccgagcaacgcggcttttgacaagctggccgaagaaatgatcggccccggcaaaaagggcaaagacctgctgacagacgaatacaaagacgatgtacgcgacatcatcaaaaaccacatgctggtgggccaggcggtcaaatccagcatgagcatgaacaaatccatgtccaccagcctggacatcagcgccacgatcaacatcacgatcgccaatggcgtgctgaccatcaccgatggccagggccgggtctgcaaagtcacgctcaaagacctgttcaccggcaacggcatcgtgcacatcatcgactgcatcctgatgccgcccaagccgatgctgggcaagtcgatcgtggcggtggcacagaaaacaccccagctgtccagcctggtcgctgcactgggctttgccagcaacgacaaggacctggtcaagctgctgagcaaaaaaggtacctacaccgtatttgcacccaccaacgatgcgtttgatgcactggctgcagaactgctgggcgcaggcaaaactgccaaagacctgctggttcctgccaacaaagacctggtgcgcgccgtgctgcaataccatgtgctgggcgcggtggtgaaaaaggccgacatccctctgggcaagccgattgacccgctgcttgagggtaaggacttcttcaagatcgacgccgtgggcagcaaagtcatcattaccgatggccgcaaccgcacttcagaaatcacggcaaccgacatcctggccaaaaacggcgtggtgcacctgatcaacaaagtgatcctgcctgcagacaaaaacatcgtgcagaccgccgtggcactggcgcctgagttcagcatcctggtggaggccgtggtggccgcaggcctgaccgaaaccctctctggccccggcccgttcaccgtgtttgcgcccaccaacgacgcttttgccagcctgctggccgagctgaaaatcagcaaagccgatttgctggccaacaaagatctgctggtcaaagtgttgacctaccacgttgtcccggccctggtgcttaaagccgatgtgcctgtgggcactgcaatcaagacggtgcaaggcgataccttcaccgtagatgcaatgttcaagatcaccgaccaggccagccgcaagagcgcgattatcaaaaccgacgtgctcaacaaaaacggcgtgatccatgtgatcgacaaggtgattttgcccaagctgtaatgcccaggccacaggaaccctagcctgcgctgcatgcgtaaggctacacaattttcagggcctgccctagccctgcaccggctgccagatgatcccgcaaggatgatctggcagctattttttttatagctgctcccgcgatattctattgggctgagcccggtttttatactaaatcatggatgcggtgacttgtaacagcccacaccacgtatcatctgttgaagttccacactggttgatgcatacaaggacaccgtgaccatgcactcgagagacgactttacaagtctgtttgaaatgctgcccgttgcagcctatcgcaccaaccgcgatggccagatgacccgcgccaatgcggcactcatacgttttcatcgctctggcaatgaagagcagctgctggccgccgctaacgatactagccacaactggtatgtgcaacctggccggcgcgccgagttcagagccctgctggaggcagagggtcaggtgaccaatttcgtatcgcaagtcgtgcgccctggttcagacaaagatgcgcacgatctggtgtggatcagcgagagcgcgcatgtggtgcgcagcgcaacaggcaaagtgctttactacgagggcattattgaagacatcaatgcccgcaagctggccgaggatgcgctgctggaaaaacaggcgcagctgacagggctgatcaatgccatccccgacagcatctggttcagcgacacccacagtgtgtatctgctgtccaatgcatcgcatgcccagcagtatggcctgcgcccggaagatattgtgggtaaatccaatctgcagctgtttggtgccgagacagcggcccgctacgagaaaggcgatgcacaggccatggcgtctcccacgcctacggtgtttgacgattatctggataaccagcaaacggggcgcaggcagtattttgaagttatccaggtgagcatccgcgatggcgcaggcaagccgattggtctgctgggtatcgccagggatattaccgtgcgcaaagaagcgcagatggcactgatggaggccaaagacgctgccgaggcaggcaaccgtgccaaggcagattttctggccaatatgagccacgagatccgcacgcccatgaacgcggtgatcggcatgtgtgacctgctgctggacaccccgctggacgaaacccaacgcgaatttaccaacaccatcagcaccagtggcgaatcactgctggccttgatcaacgatattctggacttttccaagatcgattctggccaccttgagctggagcatgtgcccgtcaacatcaacgaatgtgtggaaggcgcgctggacatcacggtcggcgcggccacgtccaagaacgtggagctgctctactggattgagcccgatgtgccgcgcgccgtgtttggcgacagcacgcgtctgcgccaggtgctggtgaacctgatcaacaacgccatcaagttcaccgccaaaggcgaggtggtggtcaccctggggcagcgcacgtcagccgatggccagagcctgctgcatgcctcggtcaaggacaccggtattggcattcctgcggaccgactggacaagctgtttcaggtgttcagccaggtggacgcatcgaccacacgccattacggtggcacgggcctggggctggcgatctgcaaacgcctgatcaacatgatgggcgggcgcatctgggtagagtcggtgttgggcgaaggttcgaccttccagtttgaaatcccctgcctgcccgtgcccgcagggccgaacgcgtatgtccacaaaaaatccatcgatctgcatggccgccgcgtgctgctggtggacgacaacgccaccaatctgatgatactgaccaagcagaccagtcgctggggcatgcagcccaaggcggcatcgtctgctgcgcaggccttggcctgcgtggatgcaggcgagctgtttgatgtggccatcctggatatgcaaatgcccgtgatggacggggccatgctggccgagcagctgcgcaagcgcgtgaacacagcccacatgccgatcctgctgctcacgtccatgggcatccacggccccaaagtggctgatttgggtgctgtgcagacgctgagcaagcctgccaagtccgctgtgctgctggacacactgtcgcgcctgctgacgcctttagcgcctgtagctgctgcccccgcaacgccctcgcctgcatcgccattgctgggtcatcgccatccgctgaggctgctactggctgaggacaatctggttaaccagcgcgtggcaacgctgattttgaaaggcctgggctatacggtgcagattgcaggcgatggtcagcaggccgtggatgcgatagcgcaggcctttgcccacgccgaaccgtttgaggtggtgctgatggatgtgcagatgccggtcatggacggcctgcaagccaccaaagcgttgcaagagctctaccccgcagcgcttcggccttatgttattgcgatgaccgccaacgccatggaaggtgaccgcgaagcctgcctggccgctggcatggacgactatctgagcaaacccgtgcgcgctaccgccttggcagaggtgttggagcgggccgcccatgcgctgaaagaacgagattagtctatcaattcgctacttttttgatagctgctgccgcgatattccattgggctgggcttggtttttatatataaaataatggcttgcaacctgcctaaccctgagaactacggagacaccatgaagagactatgcaccatcgccgctgtggcggtatggagcctgagcgccactgcgcaagacagctttcccagcaaacccatcaccctgatcgtgccgaacccgcccggcggcctggtagacacctcagcgcggctgcttaacgagccgctcacgcgcatcatcggccagccggtggtgatcgacaacaaaggcggcggcagtggcaacgtagcctacggcacggtcgccaaggccaaggccgacggccacaccttgctcatctcgtattcggcctaccacgtgggcaacccggtgctgatgaccaatctgccctgggccgccaaagacttcacgcccgtggcgctactcacagtagccaccaatgtgatcgccgcgcatcccagcgtgcctgccaacaacctcaaagaattctccagctacatcaaagcgaaccccgccaagctcaactacgccagccagggcaatggctcgctgtcccacatcggcaccgagatcttcaagcagcagattggcggctttgtcacacacatcccctaccgcggctctggccccgccatccaggacgtgctggccggccaggtgcaggtgtttatcaccacgccaccatcggtcatgcagcatgtcaaggcaggcaagctcaaggcctttgccgtaacgggcgacaaacgccaccccggcctgcctgatgtgcccaccacggccgaagcaggcatgcccaagttccagctcgaagcctgggtgggcctgtttgcccctacaggcacgcctgcgcctgtgattgccaagctggccgctgatgtgaagcgcgccatggaagcgcctgagaccaaaacccgcgccgacgcggcgggcattgaggtgcgctaccttggccccgaggctatgggcaagctgctggccagcgaaaccgagtattgggccaaggccatcaaggccgccaagatcacgctcgactgaagacaccatcgagatatgtgcggttattcacacaaatagccgcccatcgccttgggcaagcttctgaataccctatacggggtatatgcggggcgcatgtgcactcctagaatgaatcgtactaaacgatgcatacaggggatcaccatgacgtctctcaacacttccacccagcgcggccagctggccagtttgttctttgccgtggcagtagcaggcagcctggcggcctgtgggggcggaggcggcgggggtgatgcacctgcagccactgcagcgcctgctgcccaggcacccgcacagcctgcgcctgcgcccagcacaccgcaagactctcaactggtgctgacgctggcgacaccatcgtatgccaacggcaccatcaccactgcaggcgcaagcttcacccgcgaatcacgtccgggcgacacctcctctggcaaccaaccctactgcgccatcacggtggacaaagccaccaacggagccaacaaataccagatccaggtgtattttctggttgcgggcggcgcggtcaccaatgtcagcatatttgatgatcgattcaacctgcccaccacctatggcggcaacgccatcaaccctgcagccagcgtggtaagtgtggagccacttttgaaatacgtgaacttcaacaacgctgtcgtgaatgaccccgcactgggcaccacggccaccgtcaacggcaggctgtattttggtgtgcccaacagcaccgatgtctgcggcagatagcctgagtcaccacaagccccgccaccagccgccgcatacaggcgggctgccccgtagcagatagtattaagtcacgttaggcaccaagggctgctgcgaagcccgggcaaggccgtacaatggttttcaatggcctggcgcctcctgaaagctcacgcacgtgaccactgtcgtatttgcagaccttgttaacagcacaggcatctttgaaagcctgggcgatgccaaagcctcgcagtttgtcacccagctaaccacccatgtgggcaaaatattcaccgactaccgtggccgggtcgtcaagctgctgggcgacggcttgtttgtggtgtttgagcacgaggccgatgcgctagccgcctgcgtagtaatccaacagcagctgcaaaaccagcccatccacccgggagacctgccccaggtcgtacagctgcagctgggcgtggaaagcggcgatgtggtggagattgacggcgactgttttggcgaagccgtcaacaacgccgcgcgcctggccgacctggccggtggcgcgcagatcctcaccaccttgcgggtctatgacgcgctgcccagcatgctgcgccagcagctgatcagcctggggccgctgttcctgcgcggcaaggccgacgccactgacgtgttcagcgtgcaatggcagcaagaggctgacagcgaagtcaccgtcatgggcgccgcgctgcagcatgccgcaggcagccgccgcctgagcctggtcttctcgcccagcgctggcggcgatgtgcgccagagcatcacgctagacccaccccacggcagcgcccagctaggccgctcgttgcagagcaccagcggctttggcatagcgcagcagatccatatccatgacaaccgcgtctcgcgcctgcactgcagcgtgcagtggcgcggcactcactggatcgtcagcgacgcctccagctatggcacctgggtctacctgggcaacgaaatcaaccccgtcgtgctgcgccgcggcgagtgccagctgatcggcgcaggccacctcagcctgggctgcgaacgccacgcccccggcgcgcccgtggtgcggttcaagcttgacagcgggttttagatgctatatctttaatagctgctcccgcgatattctattggcttgggggcggatttcactataaggagacacgcatgaacaccctctcacgccgacacatcctgcacacaggtgcatccctcgcagcgttaagtagcctacccggcgcagccctggccgccatggggccgaacgacaagtttgacctgctgatccgcaacgccaacgtgatggacccgagccaaaacctctctggcaagcgcgacatcggcatccgctacgggcagatcgaagcgatcgaggccacgatagcccccgagcgcgcgcagcgtgtgatggacgcggctggcaagctggtgacccccggcctgatagacctgcactgccacacctacccctacggcagcgccatcggcatccccgccgacgagctgattgcccaccagtgcaccactaccgtagtgtcggcaggcgacggcggggcaaataactttgcggcctttcgccgctttgtcgtgccagcgtcgcgcacgcggcagtttgcctttgtgcacatcgccgtggcgggcctggccggctttccggtgcccgagctgttcaacattgactacgccgtgcccgagctggccgcgcgcgccgtggccgagaacgccgacatggtgctgggcgtgaaggtgcgcatgagcgaaaacgtggtggcccgccacggcattgaaccgctgaaacgcgccatcaaagcctgcgagctgtccagtgtgcccgccaaagtcatgtgccacatcggcggcgtggccgatcaggcgctgatgtcgcaaatcctcgacctgctgcgccccggcgacgtgctgacgcactgctactcgggtgcgcccaacaatgccggtatgggcaccaacatcgtgcaagacggcaagctgctacccgccgcgctggccgccaaaaagcgcggcgtggtgtttgatatcggccacggcggtggcagctttgactacaccatcgccgaagccgccatccagcaaggctgcccgcccgacaccatatcaagcgacgtgcacgtcttctccgccaacacccccggcatgccctacctgccctgggtgatgagcaaattcatcggcctgggctttagcatgggcgaagtcatcagcatggccaccgcagcccccgcccgcgtgattggccgcatccccaagcacggcaccttgcagctgggcgcaccggctgatttgtcgatcatggaaatcgttgagggcgcggtgtcgtttgtcgatacgcgcaataacaagcgcgacggcaaggtgtatttgaagcctgtgggcaccgtggtggcgggcgtggcgtcggggcgaccttatcaggcgccgtttacggtgcggtgatggccctggctgttaagcggccttcacttcctgtccaaactttcttgggggacactgctcttccgatttctcaaccgcacccgatcgcaacgaaggccttggcgcgattaaagcttaacgttgagttaaatgctatatgtttaatagctgctcccgcgatattctgttgggctgcaaggctatctcatcaatatggattagatttcatgcttttcaccacgcaaagccgtagatgatcttttctagccacgtctggcgtaggtgaagccacaacgattccatttctgatatgcaactaagtttgacataacgtaacggaatacgcaagaatagaaaaaacccggtgggttgccccaccgggtttttggatacagaaaaaccttgcggtaattctttattgcagcaacggatctcaccccggattactacaaaccacagtttaaggcagtttttgatgaatcacaactcagtagcagcagtttctcaagataaaggctatggaccgttaacttttggctttgatatcggcatggcttctgtaggctgggcagtgcttaatgagacgcgtatcgtggcattaggtgtgcgagcttttgatgcagcggagcacccgagagagaaaatcccactcaatgctaaacgccgcatggcgcgtgtggccagaaatcgcatcgcgcagcgcgcctggaggctcaaacgcctaatgcggcttatgcgtgacatagggcttgtagaaagcgccgatgcagaacgtgaactcgggaaaattcccgcaatcgcagaccgcaacgacatctcaccttgggcattgcgtgcacgagggttacgcgaacgccttggccccaccgaatgggcacgtgttctttaccacctcgttaagcaccgcggatttgcattgttgcgtaaagtcgagttgaacagcgaatccacgacaatccctactgagcgcggggcaggtgcaaacggccaatcctcccctaacgcaaatacacgtcgtgaagtggagggtttgcaacgtggcttagcgcttactcatggagctttacgagaactggcaccccatttcaagacaataggtaacatcttttggtgcgcatcccaaccggaagagtcactgtccccgatggatcgcaaacaccttgaaaagcttgaccccgtattgcgtaaaagtttgcgtcaagctatccgcaataagggtgacagctatgctcatgccagttaccgtgcagacctacgggacgagttgctagagttattcgcggcgcaaaggtcgttcgggaattcgttcgtagatactgcattgtcccccgctacaacgcgacttgaaactgtacaagtactcaatacgaagcgtgatgtttccaatgtgttttgggaacaggtgctagcgctgtttgatttgcagcacccccctatcaccgaacgtcaaatgagccagatgattggtaaatgcgaatttgaaccaacccaaccaagagcgccaaaaaatagttacgccaatgagcgctccacgtggctgcaaaagctgaacaacttagaaattcgcagcgatggcaatacacgccccttaacttccgaagaacgtagttgcctgatcaatctgccgtttgagtatgaaacggttacctacgcgctgtgccgtgaagagcttgtcaagaattgcctgtttccaagcaactggcgcgaggcagccttcagtgttttgacctatcggtcaaaggtcgcaaaaaacgctggatgggtttatgtcgttgatgatacgagcgcagaccgcatcccgctgcacaagtatggcattgacaaatcggtgccaaagcaacttgtgaaacaacgcaaggaagtgatcgggaagttgctagagcgcttagagttcggctccgttaacttcggcgaagcacgacggctgctggaagtaccacaatccttgaagtttcagattgagcatactgatacgcagcttttgacagatcacgatgaagcaagcgagcaaataccctttcacaacacccccgacagacttctatgcgccaacactctgattaagtggatagccagcggcgaggtacgaagcaagaaactctctgcggccctaatgaggagtcttgaccaattaaaagtcggcggctctgttgctacttttgaacagcttcgggcacgagcaatgagcattgaccccaaactgcgtgggtcgtttgaagtgaccagacagaccagtttcgtggttgaaattgagaacgaagaacatactcaaatcccggtggtttttgaaggggcgcaagccatcgaagatgaacctttcgtttcgctaaagggctggcacaagctaaagtacgccctggcgaaacctcatcctgatctttgggaagaattttgtaccgcgtacaaattgcccgagagccaggcgggaaaagttgcagcgtcgcagattgattccatcatgacagctctttccacatgtgcaactgacgctgaaatcaccgagaaactgaaaagcgatgcgggagttgaccctttacacatcgattcactgctcaatgtatctgtcagcgggtttcgaaatctaagtctccttgcattgcgaacaattcttccgcatttggaatctggggcccaatacagcggggcatgcgcgatggccaaatacgatcatgcgaaaccaggggggccgaaaaaacgtgagctttatttgccacccctgcaaacaattgcttttgagcgctaccgtcacggcaacccaataccgaccaagactgaacagcgctacaaagacctgaaaaatccgattgtcgcccgaagcttcaatcaagcgcgactggtattgaattcacttgtagaaaagtacggatcacccacttacgttgcagtggaactcgctcgtgaccttgcaaaatccggggaggaacgcaacaagatcgagagtgaccaggaaatcaatcgtaaaagaaacaccgcagcacgcgctgcgtttataacgagtagggccgatgcggcctctcgccttaagcagccgttacccacacgagaggaaggcacttttgcactcaaattcaaactttataaggaacaaaatggacagtgtccttacaccgacggtgacgacagccacaaacgcattgaccttgacagactgctaactgagggcgaatacacacagactgatcacatctggccgcgttcacgcgtttctgacaacagtctcaaaaataaggtattggttaaggcgggagcaaatcaggataagctaaatcgtactccctatgagtggttcggtcatgatgaagcgcgttggctgcgatttgaaaaatgggttcaagcacaacagggaatgaacagcgacaaaaaggcacgacttttagccaaagaactcgatgacgatgaattttcagcaaggaatcttgttgacactcgatatatcacccggctttttgcgaatatggtgcgcaaccatctgattttcgcaaatcaatcactgaatgcaggacaagacatatcacctgatgacacaggaatggacaggctgaacaaattttttgctaattgcgttcgtacccctcaagggaaagtcactagttttttgcgctcccgatgggggttgtctaaggatcgcgagtcgagcgacctacatcatgcaattgatgctgcggttgttgccgcgtgttccgtcaagctgattcgagatgtcaacaactggcatagtcgcgaagaagccgaaactgggcggtatgcacgccaaagcaatggctgctacttggacagaagcaccggcgaaattttgactagggagcaggcactcacgaaaggactaatcttccctgagccatggaatcattttgccaaggagttgctagcaaggctatctcctgacggatgtacttacgacactacgtgcaatcgcaaatatgacttttccaactatccggcgaatgaggctgtcgccgtcaagagcgtgctggtgtcgaggctggttagatcggcaaaaaatggtgaaatccatgatgcaaatccagtgggtatgtcggcatcttggatacaaaagcgaattccactgaagcagttgacactagaaatacttgatgaagcacgcctgcccgtggcgtacaaagaacataacaaaggactgattgcacagctgcgtgagcgactgcaacagcattcgggcgatgccgagaaagcctttgcagcccctttagactggctacccaaaaaggctagtggcatgcaagcgattcgcctgcccatcatggtaaaaaatggcaagcattttcaagaagcccccgcacaatgcctaacggaagcacaagcctataagcgagttgaccttgaaaaactaacactcaagcacctgacggttgataagctcggagagcagtattaccggcgcaataaagtgttgtttgacgctttgcgagagcgtttggaacagtttgatggagacggaaagaaggcattcaccacagaattccgcaaacccattcactctaggccgcgcaagcctggtgttgctgcgccagaacaaggccccgtggttcgctcagtaaaactgccagtgcctgctaattctggaatacgggtgcgaggtggcgttgctggtttaagcgcaatgcgttgcgtgcacgtttattggacgggtcaagcatatttttttgagcctcaataccaagcgcacgcagaaaaagtcttcggagtggtcaccgctcccactcaagccgtcaaattattcgctcttcgtaaaaacgacctgatagaagttttacgcgccgatggttcgcgtgtttttgggtattttgtaatgttcgaagccaacgatggacggctgacaattcgcaatcatgaccgacccggcaccaccagaaagaaggcggccgaatcagacatggttaacgaatttattggcgaagaaaaagagagttccagcacttcagaccccaccctgcatcgattttccctcagtgctgtgcgcgtccttcgcaaatataaggttggcgtattaggtgactattccgaaatcttagtacctcaaaagcatggtctggcgtagcgtcatcattagccaaccagctaagcttaagcgcgagcacttcgcgctcttggtggagcaagagcagtcagctcgcgtaccttttgaagacattgcggtgattgtgttgaacaatcgtgaaattacccttactcaccccgttctgtctgcctgtgccgaatacggcattggcctatatgccactggcgataaccaccaacccagcggtgtattcctgccttttcaaagccacagccgtgccacgcgcatgctgcgcttgcaattggatttggacaaacccactggcaagcgcgcatgggctgtcattgtgcaggccaagatcaacaaccaagcgttttgcatgaagacgctgaacgcgggtgaccatgaacggctggggtcgtattcacgccgtgtacgctctggcgacacaggcaatatggaagcacaggcagcggcctattactttccgcaaatcatggggcgtagctttcaccgcagccaagaggtgtgggctaacgctgcgctggactacggttatgccgtgatgcgcggtgcctgtgcacgcgcgttggtagcacacggcatgttgcctacgattggcatttttcatagcagtgaacaaaacgcattcaacctagctgatgatttgattgaaccctatcgtgccgtggtggacttgcacgtagccaccagtcgcaaaacagacgagtctgttgatctgagcccagcagacaaagtggctttggtaggtctgctgaatgttgacgttgccatgccgcgcggcgtgatgagtgtgttgtcatccatcgaacaagcagccgaatcgttggctcggctctacgacggtggcagcgaacaagtactggaaatgcccagactaatcggcttaaatcagcacaggtatgagatgtagcggcacacaaccatgagccagaatacgaggcgtttcatgcgaatgatggtcttatttgatctgcccacggtgaccaaaaccgataagcgcgcctacactctgtttcgccgctttttgctcaacgatggttacgacatgatccagtattcaatttatggccgcattctcaacggcaatgatgccgaagaaaagcacatgaagcgcctggtggcaaatctaccttctgagggctcaatacgcgttttaaccgtgacagaaaagcaatatgccagcatgaaactgttggtgggcatgcctctttttcaggaaaaacaggtaaatgccagtcaaatcgtactgttttaggtcattttttcaagacgaaaacccgcgccaagctaagcctggcgcgggtttcgtgggggtcagagtgtagcaatccggggtgagatagggagctacaacccgccaacgctgcgcctacttgtccagcaagagtgtagcaatccggggtgagatagggagctacaacatgggtgcccaagctgtccaagt

SEQ ID NO: 3557 - DNA, 23354 bp, synthetic construct
  misc_feature 1..23354: note = Synthetic
  source 1..23354: mol_type = other DNA
atcaggagatgcggaagccgaagcatgagcagccggtccttgaaagttcccggctccccttcatcggcgttgcacagaacgagaattggcttgtcgccgttggcaggtatcgcgctccatttcctgcccgccggaaagcccgcccctccccttcccctcagccccgacttgctcaccgtctccctgacatcggccgggctcaactcccgaaccgccttttcaagagccgaatatccgccgcgagaacgatagacatcgaaggtctctatgcccttgacatcaatgtctcgcagcagaacgcgcatctgcctgttagagctcccttgctggtcaggcgagcaggccatcagcgcagtctctccagaacccggtcgagctgctccggcgtcacatccgttacgaattcctcgtcaacctgaacgaccggcgccttgtcgcagcaagcaaggcactcggcttgcttcagcgtcacgagtccgtcagcggtcgtctcacccacttttacccccagccgctgctccagggcctccaccacctgcatacccccccgcagcatgcacgccagatttgtgcacacatgtatctcgtgtttccccgcaggctcgagatgcagcatgtggtagaaactcgccgtgtcatatacctccaccggggcgacgccaacgatgcgcgcaatctcttccatcgcctccatgctcacatatccctgctcgcgctgcgcaagccacagcagaggcagcatggcagaccgcgcgctgtgcggatagcgccgcactatctcggcgaccttcgccatgacctcatcgctgaaaacgcccttccccatacccgctcacctgtctatctcgccgagaacgatatcgaggctgcctatgattgccaccacatctgccacaagccgcccctgcaccatcttcttcagggcctgaaggttcatcaacgagggcgcgcggatgtgcatgcgatagggcttttcagtcccgtcgctcacaaagtagaatccaagttctcccttcggcgactcggtgggaacatatgcttcccccgccggcacctggtaaccgcggctgaaaattatgaaatggttgatcaaagcctccatgctcccatgaagaagctctctgggcggcggggtcactttgacggcctttgccttcacgggccccggcgcaagcccgtctgcgcgctgctcaagtatccgcgcgctctgcctcatctcctggatgcgaaccaggtatcggtcataaacatcgccattggcgccaacaggaatctcgaactcatactcatcgtaaccgctgtatggctgcgctttccttatgtcccatctcaccccgcaggcccgaagcgacggccctgtcaacccgagattcatgccatcctcggcgctgatgcgtcccacacccttcgtcctcatcatccagatcttgttctttgtgagcagcgcctcgtattcgtcaagctttccggggaagattttcagaaacttcttcaacttctccatcaggccatcgggcaaatcgccggcaacgcctccaaccctgatatagctcggggtcatacgcgcgcccgccgtcatatcaaacatatcgagaatcatttccctctcgcggaagcagtagaagaacggcgttatggctcccatgtccagagcgtgcgtgcccagccaagccagatggcttgccagccggctcagttcgcacatcatcactcgtatctgctgcgcccttttcggtatctccagttccagcagcttctccaccggcagcacgaaggccatgttgttgttgttgcaggccaggtaatcgagccggtccgtcattgtgagggccttgttgtaagtcttgtattctgcctctttctcgatgccagtgtgcagataaccgatgtaaggaacggccctgaggaccgtctcgccctccagttccaacaccacccgcagcaccccgtgagtgctgggatgctgcgggcccatgtttatcgtcagggtctgcgcgactgccatcagtaccgttcgctccagggctctatgccgccgagcggataatccttcctcagcggatgtccctgccagtcgtccggcatcagaatccttcgcaggtcgggatgcccctcgaatgcgacgccgaacatatcgtatatctctctttcgggccactccgccccagcccatactgaagtcacggaggggacgcgcgggtcgtctcccgcgacccgcactttcaaccttatccgcctcgccgacgggattgaaagaagatgatacaccacctcataccgcggctcttcgcccagatagtccaccccgcagatgtcaattatcgtgttgaaagaaagccttggatcgtctcgcaagaagagacacacctcgacgagcttctcccgcaatacaactgcggttctctcgtctttccaggtctttcgctccgctaccgcgtcggggaacttctgggtaagtatgtcgaggaccggatcttcttccatcgaatagcgtgctaacctttcttcatgccctcgcgctgtatcttatcgtaaagcttcatgatgccattcagaagggcctcgggcctcggcggacagccgccgacatagacatccacaggaactactcggtcaactccctgcacgatcgtgtagttattgaacactcccccgcacgaggcgcaggctcccatggaaatcacccatttgggctccgccatctggtcatatatctgacgcagaaccggcgccatcttcctggacacccgcccggacactatcatcaggtcagcctgccgcggcgacgcgcgaaacagctccatcccgaaccgggcgatgtcgaaatccgatgccaccgtggacatcatctctatggcgcagcacgcaaggccgaatgtagcgggccatacagacctctgcctcgcccacgtgaccaccttctcaacgggcctgatgctcacttgcttcgcccacttgagcatcgtctccagcctcgttgtcaggactctttcccgcacatcctcttccagccctgcctgtgcctctcccgcgccctgaagagccctatcgctgtcctgaaagcccccgggctgcgctgctactcccactccagggctcctttcttccaagcataaacataaccgacgacgaggatgagcagaaaaatcgccatctcgacgaagccgaagagacggagctgcctgagcacgacagcccagggatataggaagataacctctatgtcgaagagcacgaagaggatcgccgtcaggtagaaccggatggggaaccggactctggcaggcgcagagggcacgatcccgcactcatacggcaggagcttcgcatcaagacgccgcctcgggcccacaagatgcgaaaagactacgattccgccggccaaggccgtcgagaatattatcaggacaaggactggtatgaagtctttagccataaggcatgcgaaaatcagaatgtaagttcgctgctcttttcacaaccccttcctatcacacccccctgccgccgtccgtgtctgaaccgaagtcttgccgttacctgcaaaatggccgccctggcaggctccaccgtggtcggcgaaacctgcgcttccgccgccatatatgcggcgctgcggccaggacagctcctcgcggacggcagtcgctctgccctcaatgccggctgaagatattcaggtgctgggccagagcatacgccaggacggcgttggcgagtctatcgggatcgtgacggatgaggtcgccctcctccgatagcagctccccgcctatccacaggtggtcattgtcggcttcagccggatcgaacagcacgggatgcgccccttccttctcccagtaggcttgggcaagctggtcgctgggcatcctggtgttatacatggcggcgtccactcttgcccccagatactgctcgatgcgatgcacaaagtcgcaaaccgagaagccgtgcgtctcggagcggcggctcatgagattgcatatgtgcagaaccggcgctggcgacctcgctatggcttccggcacccccttcaccagcaggtttgggataatgctcgtgaaaaggtcgcccgggcccagaactatgagactcgccccggcaagctcgtcaagcgcttccggattcgctgcggctggaggctccagccgcactctctttatcggaacgagccgctcctgctcccgggaatatatgttggcctcccctctgatcacggtcccgtcttcaagctcggcaacaatatgacagatgtccagcgacaccggcactgccttgccaactgcccccacaagctgacaaatccttcgagcggcctcagcaaacccgaaccggctctccagcacctggagcaggacgtttccaaggctgtcggctccttcccggtgggtgaagatgacccggcacgtctcaccgacctcggtgttccccgccagagctgttatgactgcccgaatgtcgcccggaggcaaaatcccgtatttgtcccggagctcgcccgaatgcccccccgagtcaaacattgtcgggatcccaacgaggtccagaccaggcagcttcttcaaaccctcgagcagcgtggaaaggccagtgcctcctccgaggcatacgattttcattgcagggctcccctctgattattggctcgtgcctggccgctgtggacgcgcctggcgccgtctcatctttcggcctcggtcagcgtgggccaccctgcggccgcctccagcgccctcgcccgtcgaagcgccgtctggcatgcgtctcgcagaaggcgggcccggtcgtatctccatccctccccggtctgcaaatacctgagaaactcgtggtcagactggttcagaagatagtaggcaagcacgcggtgtggaagggctgaggtgaggcggccaggcgcctccaccttgtccgccgcccgggccaggttctccgatcgctcgtgcagccggctcaatgcgccttcggcgcgctctttcgtgatggctccgtttctataatccctgaaccaacccgccgcctctttcaacaccgcctcggcctcaagatcgagcacccttatgagagcggcatattgcgctggcgcatactgcgcgcggccgtccagggcgtcaaaagccttcctgaggtacgccactgcctcgggaagctcgccggtgcgaacgcatacttgaatcaggcgctggagcgcatccctgttttccggggctgcttcgagcaggcgctcgtaactcctgcgcgccttctcccacaggtcgagcctttcatagatgcctgccagattcgaaagagcgtcggcgtcgtcggcctttgtctcaagcagacgctcatattgggcggccgcgtccgcgaaatctcctcgctccagcaggatggcggccaggacgcggcgcgcttcaatatccgccggatctgactcaagaatccgtcgcagctcgcgctgggcagcatcgctgttccccatctgccggtacaacctggcgaggcccagacgcaccgcagccgattccggcgccagctccagcgcgcgcttgaactgctgaagcgcccgctccctatcgcccgccgccgcatatgcctcagcaagaccgctgtggatcgcggcattcctcggatcgcccaccagggcatacctgtattcgactatggcctctgcgtgctggccctgttcggcaagctgctgaccacggctgaaatgctcctcggccccggccggcattccgcgcaaaagcaccggcccatctcgcgcaatatccgccacaacgagagaggccaccatgctcgcccagccgtcaacatcctcgccagcagcaaccggggcggtggcctcgtaactgtgcgctgcgcgagaaacgctcccgccaagcctgagcgtcaagcgagcgctgccggctccctcgggactttccgcgactgtctccagagtccccaggagagtgaggtccgcgccaagaacctggccagcaaggtcaacctcaagctccgaggcgcccgcctccgtcatccgcaggagaaattcgtgttcgcgcgccctgcgctgaacgagaggagattcgcggctgaacagaacgaccgaaagccctggccaggcgctgcgcaggcccgtctcaatagccctggtgagcgggccgcaccgggattccaggccagccccgcagctcagaggaaaaagaaccagagtctgaccggtggccggttggcaggtatgcgtgataatgcagacaagggttgcgaaagcggcagtcagccaggccctgctcaatctgccctccttattgcccccccagagcgcgcagggctgccctgcatgtgcgagccccgtggcttgcatcatcctcgttctgccccgaggcaagctgagcctcataagtcctcagcgcccgttcatactccgctttcgcgtccgcaagtcgctccgtccgatagaagcagaaagccagctcctcacgaacctgcggcgaggcgtcaggccgcttgctcatgtatctttcgtaggttccgatagccttgtcgtagtcaccgaggaggtagtatgtccttgcaagctcggtcgttgccacaattggctgtggcgccggagggaggggtggttcgaggcggcggggaggcgtgggaacgagaggaggcgcaggaattgggccaggggaagtcaacagaggaactctcagggtcctgggcaaggtctcggattcaggcgctacctctaccctctccctggctgcggcgactggagcaccccttctcacgagcggcagaacagacgccgccacaggggccggcgccgccggaggggccgcgaccggcattgctggcatcgctggcatcgctggcatggccgcgcccgtttgcggagcaaccgcagaaactggagccggcacgcgctccgccagcccccgcctggcgagttccggcgtttccccggctggcctcagcgccatccagatcaagcccgggagcaaaactaacagtagaacgaaaccccctataattgccccgcgcgcaatggccggagacactcgccgcctggcaaccggcatcgcctggaggagctgctggagagcttgttggtcagccgcgctcctcgggctcagcgcaagggctcgctcatattccgctatggccttctgccgctgtccagccctctcgtagagaatccccagaagcgagtgggcagaagtgctgttcggatttgctgcaacggcctgctcggcagcctgtatcgcctccgccagaaggccctgatcgctgtattggaaagctaagtctatgagctgctggcccctggcagaatcaacaggcccctgctccacctgaggcgccgctatctccctcagctcggcgccgcagtttgtgcagaaccggttctcgtcgggattctcagcctcgcatcgagggcagcgcatgctcgctccctatgggatcactttcatcagcggatactcgattatatctctcgcccccgccttcttcagctcgggaatgaggtcgcgcgcctgcctttcatcaagcacgacctcgatagcgcaccaaccctcgtcaatgagagccgacaccgtgggctctttcatcgcgggcaataccctcagaattgccggcaaatcctttcgcgccacattcagcttcaggcccactttttcctgggctcgcagcgcgccgagcagaagctcgccgattcccgtcaccttctcccgcttccactcatcctcccaggcagcgcggctcgccatgagcacagtgttcgattccagcaccgtgtccagaatccgcaggttgtgagctgccagcgaggcgcccgtctctgtcaggtcaacgattgcgtccgcgagctccggaaccttcgcctccgaagcgccccatgagaattctacctgcgccttgacgcccttctgcccaaaatacctctttgtcacctcgacaagctcggtggccactcgcttcccatcgaggtcctgcggtttcttcaggtcgctgtccgccgccaccgccagaacccaccgcaccggcttggccgtctgcttgctatagacgagatcgctgaccacgaccacatcggccgatgtttcctcaatccagtcgcggccggcgatccctgcatccagtattccctcggatacataccggggaatctcctgcgctcgaagcaaaacgcactccagctcctcgtcgtcaactgatgggaagtaagagcggtgaggcaccatgatggagaagcctgcccggcgcatgagttcagtcgtagcctcttgcaggctgcccttcgggatgccaaggcgcaacttcacaacaataacctcccgaccgctcgcgccagtataattgccgccccaaaaggtgtcaaccgaggcgcgacagcggccgcgcgaagagccggcccagcccttctgcccttcacgactccgaccgggctctcaggcggtgcgtgaaaagccttttcttcggtcatgatgactggcgccgggaagatatgttgaagaagacggcttcgaagcggcctgtcccgggcccgccagcgtccgacgcacggtcggaccctgtattatcgcatccaactgtagcgccccgccttgcgccggacgagaacctcatgttcccacgcgggctctcggggtcccaggcgcacatccccggggtcggagcggcagctatatggtcctcggcgcggattccagcaggtcgtcgctgatgcgcttgccgagcaggaagtgcttgcggtcgggataccacaggtagcgcgcgcccgcatactcgaagaaactgcaataggtcgcgatctcggtgcgccccatggggccgacaacaaccccgtcatttgacagcagcacccgcggcgccgagaaacgaaccgggtgcgtggaatgcccccggatttcctcgccgagcgcaaaccacgcgggtgtgcggttgcgcgtgtaatcagccggcccgcttcccccgtttgccgtcccatcgttgttgtagaagatgaggaagaagcgcccgtcttcgaacttgtataaggggcagggcgcgatgggattcagcagcggctcgccttccggctcgtaacacagcggcgcgggttcattccacgtgcgcccatcgtcttcggacagcgcaaaataaaccttccccgcgagcgtccgcatcacgcacaggagccgcccgtcggagagcggctgaatcgctggttcctgggccacgctcgccgacgagcccgcgcgcatcggcacccgcagcccgtgcggcgatttcggccatgtgctcacgcacagtttctccgcgtcggtctgcgtgaggatgtcctcaaagcgcagaaagcaaatctccgacgaccgctgcaacaggttgctgttcggatccaccgcgctgcttgcccagcgcgtgaagcccacgaggacctccttctggggcgtcacgattggcgtctgatagacgacccacgtctgcggcacagcgggatcggggtgactcagggcgttgggggcgacgggatagtcgagggtgcgctcgctccaggtcaggccgtcgtcatcggaaaggcggcagcgcagggcgccggtgctgtcctgccgtgcgtcgctgacgccaatgttcttgttgtaaaagcaatagacgcgcgctgcgccgccgcgagcgactccaggcgccacaacagggaaagcccagcttgcaagccccgtgcctggcgggtcatctgccccggggccgtcaatctggatgggttccgaccaggtgagcccgcgatccgcggagcggctcatcaccacgcgctgattcggcgcggtctcgcgggtcgcctgggtccagaaggcgaggaagacgccggagggcgttggcgccacgttgaaatgctgattctcagcgtcagggctttcggcgcctttgggcaggtaaaccacaaaatcgggtttcgaccgctgccactcgttcgtgtatgcagttcggcgcatgaccgtcggcctcgaccgccacccctggcgcagtataagttcaactcgaaaatccatcaaccggccgactgagtaggagcgctcgccggcggcggcgaaaaaaaagaaggcgccccgctgggaggcgccaaacgctccgtagagcgtcgcttgcggacgaaagtccttgctgtaatcagcacgacaatcgtcgctctggtacaatccatgtaataatagcagacagggggcatcctgtcaagggggtcatcatgaaaaattcgcttcttcccgaagaacatgttctggggctggatattggcgccaactcggtcggctgggcgctggtcgccgtcaaggacggtcagcccatgaggctggtccgtgcaggcgtgcgcgttttcgcggccggcgtggagggcgacatcggggccatcgagagcggccgggacgtatctcgggccgtcgcccgccgcgaggcgcgtttgcgccgcaggatgctggagcgccgccgcagacggctgaataagcttgcaatgctgctccagcaggggggattgctgccacccggcgacatcagctcggctgccgctcggatgaccttcttcgccgaccttgaccgctcgcttttcccccaggacctgcggcggtctcacccgcatgtgttgccgtatcgcctgcgggcacgcgcgctcgacgagaagctcagcccctgcgagattggtcgcgcgctctaccatctcgcccagcgccggggcttccttcccgccggcagggtcaaggccgggcgcggcggggaggaggagcagaaggagcaagggcaggtcgagaaggggattgggaagctggaggaacgcatgcgcgagtccggggcgcggaccctgggcgaatacctttcgggcctcgaccccgacgagcagcgcatccgcggtcccgggcactggacagcccgggggatgttcgaagacgaattcgaaaaggtctgggccgcgcagacgccgcgctatccggagatcctgacggaggagctgaagaagagagtccaccgggccattttcttccagcggcctctgaagacccagcgccacctcgtcggcgaatgcgagctcgagcctggccgcaagcgcgcgccgatcgcgctcccctcggcgcagcggtttcggtttgtccagaaagtgaacgacctcgagatcatcactccggacggggagcgtcgcaagccgacgcccgagcagcgcgagacgctcgtgagcgcgctcgagacgcagggcgacctggagttcaagaaagtccgcaagctcctcagcctctccaaggagcactcgttcaatcatgagcacggcggggacaagaagctgatcggcaaccgcaccgcttcggggctcggacagattttcggcgaccgctggaggaccctgtctgcggagcagagggatcgggtcgtcgaggatgtgcgcagcatgcacaatcgcgacgcgctgaagcggcgcgcaatgcgcgtgtgggggctggatgaacatgaggcagagcggctcgccagtctcccgctcgaggacggccattgcagcctgtcccgaaaggcccttgagaaggtcctccctgccatggaacggggcgtgcgctacgcgaccgcgcggaacgaagtgtatggggagaggccaaggcccccaaccgcggcgtttctcccgccgctggaccgggccgtggaggtccgcaacccggctgtggagcgcgctctgacggaagttcgcaaggtcgtcaacgccatcgttcgcgagcacgccaagcccgcgctcatccgcattgagctcgcccgcgacctgaagaagagccgcccagaccgcaagcggatcgccgaggggaaccgcgagcgcgagaccgcgaggaacagggcggcggaggaaatctgcaaggaagccggcattgcgaagcctcgcgcatcggacatcgagaagtaccttctcgccgaggagtgctcctggcagtgcccatataccggcaagcagatcaactgggacacgctcttcggcgactccccccagttcgatgtcgagcacatcatcccgctgcagcgctgcctggataattccttcgtcaacaagacgctgtgcgacctcgaagagaaccgcaagcgcaaggggaaccgcacgccctgggaggcctacggcgcagacccgcagaggtgggaggagatgatccggagagtgaggggcttcaggagctgggcggcccgcgccaagctccagcgcttccagatgaaagacctggaaagcctcgacgactttgcgacgcgtcaactcaacgacacgcgctacgcctcgcgaagggccgtggagtttgtcggcctgctctacggcagcggcgccgacggggttgatcccaagggcacgcggcggatccaggccagccgggggcaggtgacgcggttccttcgcgacgagtggcgcctgaacgccgtcctgggcggcggcgagaagaggcgcgaagaccaccgccaccacgcgattgacgcggtcgtggtcgcgctcaccgagcctggcaccatcaagcgcctgagcgacgccgcggcgcgcgcccgactcgagcggcgcaggcgcttcggaaagatgccggatccgtggtccgggtttctcgatgaagttcgggcggcgattgagcgcctcatcgtctcccaccgggtctcgcgaaaagtgagcggggcgatgcatgaagagaccatctacagcaagccccgcacgggcccggacggcaaggagtgcgtccacgtccgcaagccggtgggtggcctgtcgaagcaggacctggaaaatatcgttgacccgattgtccgggactgcgtcctggcgaagcttgaggagctcggcggtggagaagcgagcagggcgttcagcgaccccaagaaacatcccagcctggcggccagggacggccgccaggttcccattcataaagtgcgcgtgcgagtgagcgctgggaccacctcggtcggcgaaggcgcgcgggagcggcatgtgatattgggcaacaatcaccacgtggaggtcctggaaacgaaggacgcgaaaggccgcgctaagtgggaggggtttgtggtgagcatgtatgaggcgatgcggcggctgaaggctaaagagcccgtgattcggcgcgaccacggcccggagaagaagttcctcttctccctggcgggcggagagaccatcgagattgacgagcatgatggaacacgcgggctctacgtcgtcaggaccgttgccacggggcgcagcgggcagagagagtaccccgccatcgagttcgcgaggctcaacgacgcgcggaaaaaggaggacataaagaaggccggagcatggaagaaagcattggtggaccctctgcgtagggcgcagtgccagaaggtgacaatcacgccactgggggaggtgcggcgggcgagtgactgaggggacttcggggggacaagcgggcttcgtctccgggggacgaatcattgacctggcggaggagccggcgcggctgagcgtgcgcaatctctgcctggtgatcaagtctggggagcggcccgaaacgaccatgccgctggccgaggtcgccgcgctcgtagtttccaacccctgcgtaactctcacgcacgccgttcttgctggcctggcgcaggcgggcgggagcgtcgtagtctgcgacggaaggcatatgcctgtgggcatgctccttccgctcgaggcccacttcacccaggcagaacgcttcgctctccaggcgcaggcgcccctgccgatgcgcaagcgcctatggcagaccgtcgtgcgcgcgaagatccacgcccagggtcgcctgctcaccgaactgcgcggccacgatgcggggctgacccacctcatcccccgggtgcgctctggcgatccggacagcgtcgaagctgaagcctcgcgccgctactggccgctgcttttcgacaacccggcctttcgccgggaccgctacgcgcccgaccagaaccggctgctgaattatggctacgcggtcctgcgggccatcatcgcccgggcggtgtgcgcggccggcctgcacccgtcgctcggactgcaccaccacaaccgatacgacgccttctgcctcgccgacgacctgatggagccgttccggccgatcgtggaccgggcggtcgtgagatactgcgagcggcgcctcgattcgccggggctggacaaggacgcgaaggccgccctcgtcggcgccctgatgcggcggttcaagctggagggagagtcgcgaacgctcttcgatatagcggcgcgaacggcctccagcctggcggctgtctatgcccgcgaacgaaaggcgctcatcctcccggagccgtaaggtgggtgaacgcacgagcctgtcccagtatcgctcgatgtggctctttgcgatgttcgatctgccggtggacagccagcgggcgcggcggaactacgcccggtttcgcaaggccctgctggccgagggcttcacgatgctccagttttccgtctatgcgcggttctgcgggagcgaggaagcagcggcggcctaccgcaaccgcgtgcgccgggccttaccgccggaaggagaggtgaggctcctttcggtcaccgaccaccagttcggcaagatgcaggtgttcctcggaaaaactcgcaaggcggctgagaaaccgcctgagcaactgctgcttttttgagccctcaagaccgggaaacccccgtaaccacaagggttagcgggggcctcgattgtaccagagcgacgattcccggccaactacagtcagcgccgcagctcgtcgacgcgtcaacagattgtaccagagcgacgattcccggccaactacagtttggccgactatcattgctacgacgcggacattgtaccagagcgacgattcccggccaactacagtccacttcgccgtcaggatagcacacctctattgtaccagagcgacgattcccggccaactacagttctggcgcgacaacgggacaagctgggacgattgtaccagagcgacgattcccggccaactacagtctcagcggccagagcttcgatgcgatctgattgtaccagagcgacgattcccggccaactacagtcgatctcgtgcagacagccaggttcatctgattgtaccagagcgacgattcccggccaactacagttaccgcccgcgtgccccgcaaggccccaaattgtaccagagcgacgattcccggccaactacagtcctggtagttgaggccgaatatactgaggcattgtaccagagcgacgattcccggccaactacagtcgccccgtaatgggaccgcccacacccgcaattgtaccagagcgacgattcccggccaactacagtgtgccttgtcgcctcgtctcgttccacaaattgtaccagagcgacgattcccggccaactacagtaggtgccggcggctgccactggccgtgtgaattgtaccagagcgacgattcccggccaactacagtcaatcttgtagcggtagtgagttcccccgaattgtaccagagcgacgattcccggccaactacagttggtttccgtctggggttcggcctcggacgattgtaccagagcgacgattcccggccaactacagtgctcctgtttcaggggatacgcttgccaggattgtaccagagcgacgattcccggccaactacagtgtgaaagtatcaagggatatgggcacggtcattgtaccagagcgacgattcccggccaactacagtcctgcggcgagctttacgctctccggccacattgtaccagagcgacgattcccggccaactacagtacattacaccggcgctcctgtcggcggctattgtaccagagcgacgattcccggccaactacagtagaagaccggaggggtctcatgacccgaaaattgtaccagagcgacgattcccggccaactacagtgcaaccccaagagggcttgcgtatcatgatattgtaccagagcgacgattcccggccaactacagttgcgtggtgctggtctgccgtcacgcctgtattgtaccagagcgacgattcccggccaactacagtcaccacgccggcggactgcatctcgacatgattgtaccagagcgacgattcccggccaactacagtaggtgttcggggcgcgcagcgaaggggctgattgtaccagagcgacgattcccggccaactacagtaagaggaacacgaagcgtggttgcggaagtattgtaccagagcgacgattcccggccaactacagtacatctacatgcagaccgctggggctggcaattgtaccagagcgacgattcccggccaactacagtccaggccgagcggactcaatcgcgcatgatactgtaccagagcgacgattcccggccaactacagtcccctgctccagcgtgatgctcacctggacattgtaccagagcgacgattcccggccaactacagtgatatagtcaacgctgtaacgatcttcaggattgtaccagagcgacgattcccggccaactacagtctctgctgcgacttgcaggccagcgatgtgattgtaccagagcgacgattcccggccaactacagtatccgcaagcgccggccgcatctcatctgcattgtaccagagcgacgattcccggccaactacagtactataacaccgctggctactacaacacagattgtaccagagcgacgattcccggccaactacagtgagggcaggcacgaggtctgcccctacatggtgtaccagagggacgcctgcccggccagggattcccggccaactacgcggatgccgctggctgcgactccgcagcgggacgcctcggggtggcgggcgtgtagattcccttctggatagcgaactcgaccaggcgagcatcgagcaatcggaacttcggcccgtggtctgagtgcttgcagtgggccagctcgtggagcagcgttcgaatgattgcgctctcggaacgaaaggaaccgtctttcttgcgcagccgcacggtaacggccctgccgcggccccggtttgtcccaaggcgcgattctgactcgctctcgctcagccgcgcccacgccagcccgctaaactgcgggccccgatggctatcggggccagattgcggccgggcaagccgaaaggccgacatgacaggccgcaggctttcctcaacctgcgccagcagagctgcggccttctccgcatcaggataggcatagaccgagtagccgttgatctcaatccgctcgcgcaccttgcgcgcctcgcgctcctgctttcgcgccctgtagcgcttataccagtcgagggcgcgccttatgaaccgcagttcctcgtctttgcgaaggtccggggcaagcctcaggatatcgaacccccaccggatgaccaagccattcgcgcgcgggtaggcgcgcgtgaccttgttgcccgtgcgcacgaacctgatatcagtgaccgcttcgcctctcatgccttacctcgaccgaccaacgcaagccaaatctcgctcgtttgccgcgccggtccttcctcccgccttcctccttcatccccccgccctttgccctgtgccctgtgccctgcgcctacaggtctttgccctgcacgccgttgatggtcaggttgatatcggggaagccgtcgcctgccgggcggatgctcgtcgccggaagatagcgggcgcggccatcggcgaaaagatagtttctgccacctcgccagtcccaccatccgacctttacggcatcgtggttcgtcagccattcggccacgacagctttctccgacggaaaggccacggcggtcaaactctgcccgacaggcgcgaagggattgtcctggatcaggtcagattgcctcatccggtttatctgctcaggcgcgaagtaaaaggcggcgctgtagccgtaagatgtgctgtcccatttgttctgagcatccgggtcgcttgggcagacgaggatgtgcgcgccagcgcctacagagaggttcgggtcctgcgaggcatccgcatctcgctgcgccggataagcgagatagagtttcagagtccatctccacctgcgccccatccagagatacggatctcccgtgttcgggaaaaacccgtcgtggtcgtccacatacatggaaagcgccagccctatctgcctgagatttgaaagacacaggctttttctcgcctgttccctggcctgggcgaaaactgggaagatcaaagccgcgagaaccgccatgatgcccacgacaaccagaagctcggtgagggtgaaccccgatcggccggaggggtttggggcggcgctcatagtggaggtcaaccgtcgaacggcgctcaattatagcactgccgcgagaggcgcaggtgtctccgccgcgcattcggtaggggcatccgccgggtggcggagcggctggcggacccgctgacggaaggggagggaccgtcatcttcggccggccggagcgtgggtttcagtgaattgcgcagcagcctcgctggcggatgcccccacacgcggttgcccaggcggtcagattgccttgcggtaggccacgtccagccggtattcgcgcgagtcgctcgaagtcgcgtccttgtcgctgaccaggcccttcagcgtgaggaagtggtcggggtttatctcgcgcgagtattcgaccccgacacttctttcccgcgaatactggccggagctgctgcggtcgagaacgatcatgccctcgaccttttcgcgggcggacaggcagcttcgcaagctcagaagcgaagtcatcttctcgccgcccgtttgcaggtcggtatcctgcgtcagtctcaggatgccagtccattttctcgcgaagcgcatgccgaactcgcccgcgctgcgcctgacttccagtccgccggctggcggactcccctgcttgtccgtgggccttagctgttgggacagctcaaggtaggcatttctgccaagcattgtctggaaggaggcgagatggctgtcgcctgcctgcccggccagggcctgcccggatgccgagcccgctgcgtctctgccaaaataggttacatgcaggcccgccgaggcgggcgacccttcgaccgaactcagggcaagccagtcggccctgcgcctgtaagcccatttatcggcgtctgcaaacaggttgctggccattgcctcccgcgcccacggctgaagcgccgtccctgtcctccaggaggcggagacaaatttcatgcccgcgtgggccaactggtcctgcgcagcgccgttctgctcgccggatgccgccgggctgcgcagctcggccgactggacgccggcccagaggctgatagaaggcgagagttttccctttattgcagtgacctgagtatctgcggaggaaccgttgaccaggtccttctcgccgagcttgcgcgccaccagcgaccatttgctgttcagcctcgccccaagttccgccaggcttctctccgcgcgaacgacctgctccttgccatcctttttctcgatggggttctgatggaacacgccgcgcaggtagaggctgtgccccagcatcgtctgatagcctgccatgcgggtgtcctgttcctgcggcgatgaaacaaatcgcagcgcgagcccgcgcggcggcagggatgcccagggcgcgctggcgcgaacgccgtagcggccggccccagtcaagtagccagagccgctgctctcctgagcccaggcctcaagagcgcgcccgcgatcgaacacgaggctgccaaaagagcgctgcacctggctgccctcgccgttcagctctgtctcaatacctccgtccagcgagaatggcttgggctgtatgtcaagccgaacgacacgatgcatactcttggtcgcgccgccctcctgatgctgaacagcttcggccgagaggttcaacccctcgattatcttcgtggtcagcttgagaccgctcttcgcgctttggttgtcggcgccgggctgccggacggcttcgtagttgcccgtcagttgcagcctgtcgccgcgagaaagcgaagcggcccatttctgctctttgcccgcttttccatcagcagacagaaggttcttgacctggcccgacaaggacatcgagacggcgccgctgcgcttagtctcgaagctgacaagccgctcccctccgccctctgcggtcttcttttgagatacctcggcgccgaatgagagtttggccagcgcgtagttgagcttggccgaggtcacctccgtgtgcttcaccgagccgccgctgtcagcagccacaagctggcgggcgagcgaagctctcatgtgcttggacaggtcttgggcgagggagaaggtcctcgttgttgtgccatcgccgctgccgttctgccttcgctgctcctgctcatcgagagagaaagcgaacttcgtcgccgaagaaagctggaaagacagcgagtggctctgggtggtcttcgtcaggcccctctcgctgtgaccaggctggtcgtttgcgagccggtcgaatcgggaggtcagagaaaaccctctcacaggctggctctccaggttccagttgagcgagcgcataccaagcatgctgctcagctctttcgcctgggggctgcgagaggcaatttcggggagatccgcgaatgcgctgtcaacgctggcaaaacttgccgccagtttccaccggcttcccgtcatggacagtctttgcaggatagcctggctctgctggtgcggcgcacggtcctggccgtcagagaggcgatgcagcgacgcgagcgagtcaaacggcgacggcgcttcctggcggctggacagcggatcggcgaggctgaaccggcggctgtaataaactgcgcccgaatagtcgcttacggcgccggcgccagcgaaagagaaagagctcccatagagaatcctgcccggctgctggccagccgtgccgtttgccggaggattgaatagatagaagacaggaagctcagcagacctggatgggtcgaattcgacgcgcccgaggctgagaggcggcaaattggagccgccgccctcaagcgcctgaacgccggaggccaggagcagcacggcggcggccccgatgaaccgggccgccacccaacacttttcggttttgctgctcagcaacattgtggaggcttcagccctcctctactcagtcaacccggcgcttgaaaagcggcacatttatgaaggccggctggttcttctcgatttttatgacctcattgggcattcgccgcgttgtcagcggccttttcaggtcagccaataccttctttgccagctcaacggcgcgcgactcagtaagtcccggaaggggctcagcgacagcggcggtttcaggttcgggaggcttaggcggtgactcgggctgtgacgctaacgcgggagcccctcccgggactgttacaggaggtgagggctcggaaggcgtgatggactcttgaacatcaggagcgctggcaggctctatcgagggcggcgcggtcagttttctggccacgctgacgaccccgctgctgacgagccggctgatagcgcgggtgctctctgaaatcctgcgcggaactatcgccgcgcgcacaaacccttcttcacgtcgctcggcaacgggaacaggctgcgctgtctgggaagcgaccgctggcgctgtgggcttcgggactactactctttcaggctgcgagatgggaggcgcagagacgcgagcaggccgctggagctgaacagagaaagcgatggccacggctgcggccaatcccgcaaaggcggcggtggccacccaggcgcggcggtgccgaacgctcgccgaaacagtttccacccggcgcagggcaaccgctcgggtcctggcaggcggcgcaagctgcggaagggaagcgacggcggaaactgtagcctgtagaacctcggcctcagaccggcaggcggcgcaatcgctcaggtgacttctcagagcaaacccttcggctgccggcagcggctcgtccatctcctggctgaccagtaagagcgcttcctcacaggagattggtttgggctctgccaggacagccagcttctcggccacctgatgccttatggctctgggaggctcaagctgcggcagcaattgcagcagcccgagcgtttgccgcatctccctcgccagtttgcggcacgagccgcattcggtcaggtgcctctcgaagtgctccgcttcgttctcatccaggtgaccgtccaccttcgcagaaagggcttcctcaaaccgcttgcagtccatctctcgcctcctcatggcgttcgttcccgattgccacccctttagacacaccaggaagcaaaaagtcttgtccgcaggttcccacacgggcacaggcgaacagctatgacgtgctcgacgaccgactgctggtaatccaggcagaaggggggagggaggtccgctccgccgccgacttcgaagggagacgaagagaaatccggagttttctgaccgaattacttgccgagcttccgaagcacaggcaagcgctcgacgcgcgcttcgagcgccgcgcagaaacagatgattacacccggcacagcgtctcgtatttcgtcgagccgggggagagagtcacggcttttctgtgtgtgccgcgcaaagcctcgcagccgatgcctgctatcctgtgtatgcaccagacggtgccccagggcaagctggagccggtagggttggaaggcgatccaacgatggcctttgccgaccgctacgcgcgcatgggatatgcaaccctcgcccctgactgcaaacttgccggagaaaggcaggtgtgcggatacccagcttatgacacgcggcctttccacgtcctggagccccagtggtcttacatggcgaaaatgctgtgggaccacatgggggcgctggatttcctcgcgtcgcttcccttcgttgactcgggccgacttggctgcatcggacattctctcggggcctacaacggcttcttcctggcggctttcgacgagcgcgttcaggcttgcgttgcaagctgcggcttcgttcccctttcggctgacgagaacccccgacgctggtgcagggacaactggtgcgtccacctgccccgcctgcgcccttacattgatcgaggcgagatcccattcgatttccaccatgttttcagcctcgtggctccgagagcgctcttgctcatcaccggactgggagatcacattttcccgaagacggagcactgcgacgaaagcttcaaaaaggcaatgcgcgtttacgaattgctcggggcgccggacaggctggcccatttcgttcatgataagggccactcggtcccgccggaggcccaggcgcaggccgacgcctggctgagccggtg

SEQ ID NO: 3558 - DNA, 23243 bp, synthetic construct
  source 1..23243: mol_type = other DNA
  misc_feature 1..23243: note = Synthetic
aaatgctccgccagcggcccgctttggagcagcacgaagcccgctatcagcaccaggcaaaggattgccagatagggaagtaaccgtgccagtctgcgcatgcgcctacccgaaatcccctatcctcgccccatccggccaagcacatattctgacactcatcctggccgcacgtccaccccggtgttcacatttgccttattcttcccctcccctctggggtgcaagcgtgccgcctgcacaggcggatgcccgctgtccctcctcccgccaagggggccggcgcgtcggcgttgaacttcactggggcatcatctgggacctcgcacggacaacctcatgggatcgagaaactggaccaccaggcagcgtctggtcgcgctgcctgcccttgccgccgcgctcctcggcgccttgggactgctggggtgggcgctgggccttccccgcctcaccagccttgtccccggctatcgggcgatcgcccccagcgccgcgctcgcgctcgtcatcctcggcattgccatggcccgccaggcctccggtcgcattggccgcgccgagcgctccctggccgcctccgttctcgctctgacctgcctcgccgcactcctggagatcatcggctcagctgtcaatgccgacctcaacctcgaggatgccgcgactgcctatctcgcagccgccctccgcatccccttccatcccatgtcacccgcctccggcgtgctgctgttcttgttggccgccgatatgctcgcgctcctcttccagccagtcgcggcaaaacgcgcccggtccctgggccaggcagccggtgccctgggcgctctctccgcggccatcgccctcgtctttgtcatggggtacgtctaccgcacacccctcctctatggcagcggcgccatccccatcgccgccaccgccgccctcggctgcctcctcctgtcagtgggcgccgtgctcagcgccggcccggagcactggcctctgcgcgccttggcgggcagctccacccgtgcccgcctgatgcgcgcctttgtccctctcaccgtcctcgcggtgatcgccagctccatcatctccgactttctcgccggtgccgcccatgtcaaccacgctctcctcgactccctcctcgccaccgcgtgcgtggtcatcgcggcaatcgtggcttcccgcctggcgcggggcatcggcgaggtcatagaccgcgcccaggccgcccagcaggccgccgaacgcgcccgcacggagttggccgagaacctgcaacacgagatcgcccaccgcgtcaggaacaacctcgccatggtggcctccctcctggagatgcaggtcgcccgccagccggagcgcggcgaggccggcgccttgcgccaggcgatcgcccgcgtctacaccttcgcctctttgcacgagctcatctacgagaccggcggcgaggtcgttgacgttaccgccgccatccgccgcatcgccgccgccacccagcaagccctcggcgcctccacggtgcagatctcggtcacaggcgagccggtcgcctgtcccatgaaggccgccactaatctctgtgcgatcgccaacgagctcctcaccaatggcatcaagcacggccgcccagccggcgccgacgctgcgcaagtcgccatcagcctcgcgcggcagggccacacgctcaccctctctgtgtggagttccggcaaccccatacctgacgcattcgaccccaccgcgcagcgcaccatgggcctgcgcctggtgtccgagatcgccaccgctcactacggcggatcgttcaccatccgccctcaccacggcggcaccctcgccaccgtcaccctcgacgaaccccgccttcgccgcgacacctaacgagcggccccggctgacatgaccacgaagacacgaagagcacaatgtctcctcctccttcgtgtcttagtgccttagtggtgatgaactgccttgctcgtgtgtgcagcctcccctgagcctacccgtccagggcgggcccacgccttttcactcgccgccgtgtcatcctgagcgagcgcgcagcgcgacgcgaacggaccccgccttgccgcccctccctggtggggcctggtggggcaggtccgcgacctgcccatctcctctccccttcccgtctcctctccctctgcggtgaacctcccgtctgtgggagccgggcttgcccgcctcaggaggctcccccccgcgatccccggtacccttgtaggggcgcatcgcaatgcgccccaccccgacctctgcgtctctgcggtgactatcccttcgtgcacggagcctgccctgagcaacgccgaagggtgcctttgtggtgagtctctctgcgccctcagcgtctctgcggtgactatcccttcgtgcacttggtgtcttggtggttagccgcaccgcgcccaggccacctagccattgataacctgcccgtctcctctcctaaccccacttcttggcggcctcatccgcccccctccccgaacccgcccctcgtccagccggggacacgaaggcatcgccgcaacacgaggtgatcgcgtgggccgccgttggccccagacaccaggcccacgccaggggtgggcgggctggacgaggggcgggttcgaagagacgatgctcgttgggcaggagcagcgctcctgccatcccccttggtcgcgcaccctccccgagccgggctacggccaggggcttccagtctgccagttcccccctttttccccttcgtgttcgcagcctgccctgagcccctgtccggccagggtagccgaagggtgtctttgtggttagccgcaccgcgccctcagcgcctctgcgctggcccctccttcgtgctctttgtgcctttgtggtgactctctccgcgccctctgcgcctctgcggggagcctggctttgtgccctttgtgcctttgtggtgactctctctgcgccctcagcgcctctgcggtgactatcccttcgtgctcctagtgccttcgtggtgaacctccctccctccgtgggccaggcctgcccgcctcctctcgcctctcacctctcgcctctcatctctctcgcttcccgccccagcaggtatcccccctcccccacagaaccctacctccggccgcccaaaccatcaccgccatcgggggacgtcagatgaggggttgtcataccgaccgcgccttgccgctcctgccgcgcatggatcgcttccggccggtcagctcgacctcgcaggtgctgctctccgctctgtccgccccttgggccgcaaccctcgctctggtacaatgccagagcccacccccgggcaggccgccaggccgcgagcaggccggtaccctatattcggtcactcagttacgggagcgatgacatggcttctcggagaaggttgagggaacccaaggcaaacgagccggccgagcaacctgaagcggaggccgtcgccgtccttgagggccttcaggaagacactgctcgcatccttcacgaggtcttcggcgatcccgaggtcaagcacggcctccgtgtgttcgcggccggtgagccggagaagatcaggctctaccggaagaacggcaagtgctacctgcgctgcctggcccggggccgactcctggtcgcaaagccagaagagattgttcgccagcttctgctggtctggataagggactccctcaattaccccctgtcgcagctgcgcgtggaagaacccgtgcagatgggcgcacaggatacgcggcgcgccgacgtagtcatcttcacggacgatacctgcacacgcaagtacatgatcttcgaggtcaagaaaccagacagtgattccggcctcgaacagatgcgttcctatgtgaatgcgactggcgtcttcttcggggcctggtcaaatggacgcgacatgatcttccagctccgagaagaggaccccaagaccaagggggagccatacgcttaccgtgacatcccgcggctgccgcgccgaggggaggcactcgacgatatcctgaagcctctcaccaaagatcaccttcggcccatccacgacctgaagtccaccatcctccgactggagcacgacgccttggcgaacgccggtgtgaacgccttcgacgaactcttcaagcttctctttgccaagcttcatgacgaattcgacccgagaaagcgcgacaactccccgatggagttccgcgtcccaagagcagatccagacaccatctatgagcgcatcaacggcctcttccaaaaggcgaaggcccgcaagggatgggatgacatcttcgacgcccatgaggaattgaagctgcgcgatgaggcccttatcctctgcgcctccgcgctggagccgttgcggtttcacgacgccgaccttgacgtcattgacgccgccttcgagtatctcatcaacccggaacagaagccacagaaaggtcagtatttcaccccgcgcccggtagtgaagatggcagtgaagatgctcaatcccaaggtggatgagcaggtcatcgatcccgcgtgcgggtcgtgcggctttctcatccacaccatcaactgggtcaagcaagaacaggggtgggagggcaatctcgacgccgtattccgctacgccagcgagcaccttttcgccgtggatttcgacgaccggctcaagaaggtggcgaagacgatgatgctgatcgcgggagacggcaaggccaacgtctactgcgtggatgccctcgactaccgcaaatgggcacgctctcccgcggctcgcgcgattgggccgttcgctccggacgtgcgcgatggcggcttcgacgtggtgatgaccaatccgcccttcgccgggaagatcaccggcagggagcaactctctgcctacgacctctacgacctgctgaggcaaggagagctccgagaggaggaagaccaggagtcagaaggcgaggaacctgcgaacaaccgtcgttccatgcggaaggtgaactcgatgaagagagacatcctgttcatcgagcgctgcctgaggcttctgcggccaggcgggcgcatggcgatagtgcttccccaggggaatctcaacaacatgggcacacgcgccctgcgcgactggattggcgagcgcgcccgcatcctggctgtggtgggtctccacgtcaacaccttcaagccgttcactggcacgaagacctcgctgctgtttctgcagaagtggggagacggggccgggccgtcgcttgcagactaccccatcttcatggcgacgagccggaagagcggcaagaacaacagcggcgagtacgtttacctcaccgacgccgaaggccacctggttgacccgactggtcgccgcgtggaccccgcgagagagaaagcctacgtggatcacgacctggacagcgtagcagatgccttcatcgcgttcgcaaggaagcaaggtctctccttctggagatagccatggcggccatttccaccatccgactcagcgaatcgcgttcctggggccgcatggatgcggagttctttcaggcgcgctatctggacttctacgctcgcctccggccgcagcccgcgcttgcgtccctcataaatgagccgatagtccatcccgccgagatcaaacgcgggtacgttgaccaaggcttccctttcgtcctcgctcagaacgttcggccgatattgcttgactttggcgacgtagcctccatctctcccgacgcggcagacatgctctcacagaaccgtctgcaagcaggggacgtgttgctgacgaggacgggagcgaacttcggggactgttgtgtctatctcggagaacccgccaatgcctatgcttcggctgactgcctcgtgatccaccctcgcgctgtcgcaggggagtaccttgccgtctacctcaacactcggcccgggcgagccctgctgaggcgaggagcctatggcagctctcaaccacacatcgcccctccctaccttcgcaccattcccatcgtgcgtctcggcaagatcgaggacaaggtcgcgagactggtgcgagaggcgcacggccagattcgggacgccaagacactctatccgaaggccgagcggctgctgctggagtctatgggattcgagagaaccaacctccgcaacccgctgtcttaccagaccaggctccgccacgtccagcgagtggcgcgccttgacgcagagtacttccagccagtctatgagcgaatcctttctcatgtcagccgcttcaagtgcttgccgcttgccgaggttacccggcgcatctccaacggcaagaccccagcggcagaagagtacactgcagaagggccgtgcgttctcaaggttgacggcttgacgaataccggattcatcgaggagtgcgacgcacatgtgcctacttcctgggcggttgccaacccgaagggccaggtccggaagcatgacgcgctcatgctgtgcgccgcacatcaccccagctatattggcaagaccggtttgctcatgagggacttaggccctcatgccagagcggttggcgagctcataatcgtccggttcaacgagagaatccacccggggtttggctgcgtttatctcaacctgcctgccattcgcacagtggttcagcgtcttgtccgcggaaacacagcgcatctgtaccccgacgacctttcccttctacctgtccccctcttgccagaggatctccagcaacagatcggcgggttgctggaaagggcctattctgcaaaccaacgatccagaggttcggtggaacgcgcgaagcgactggtcgagtccgcggtcggcgaggtgaccggcctgcactaggtccctgcgctcactcaccaagcccggcccatgggcttccgatcagcgtccatccctgtccgccgaagtccgcctgggcggacgaaggcgaatgcgccccttccccccgcgccctccgcgtcccccgtccaccatagcttccacccgccgtagctttggcgaaggtgggtcagcgacggcggatcgcggttccccttccttcgtgtccttcgtgcctttgtggtgaccctccgccctgcccctccaagtcccctttcccctctctgcccctaccctctctttgtgctctttgtgtctttgtggtgagtctctctgggccccgaggctgcccttctccccttcgtgctctttgtgcctttgtggtcaaccctccgcggtaggtgaaggcccacccgaccacgaagacaccaaggacacgaagtcttctctccgttagtgtctaagtgccttagtggtgagaagtgagaacgccaggcttcccaccgatcgcagaggaagatgagcggctggcagccgccgtggttgacgcggccctgaaggtgcacaagagcctggggccaggcctccttgaatccgtctacgaggcctgcctctgccacgagctagcccagcgcggcattcccttccagtctcaggtcgccctgcccgtcgtctatgaaggtgtgcgactggaggccggcctgcggcttgacctgctggtggccaaccgcgtgatcgtggagttgaaagccgtggacgtgatgcagcccttgtatgaggcccagctgctgacctacctcaagctgagcggcctccgcctcggcctactcatcaacttcaacgtcccccgcatcaagcacggcatcaagcgcatggtgctttgacctttgtgctctttgtgtcttagtggtgagagatggtgatgcctttgtggtcagccgccgtccccctctgcgctctctgtgtctctgcggtgattatcccttcgtgctctttgtgtcttagtggtgagcgcctctcctaccactcccccgcatgatacgaactcctcaccagcggcccgctcagcacatgcctgaaacccaggtcccgggcgatctcgcccagccgctcgaacgcggccggcggtaggtagccggccaccggcacgtgtgcccgcgtcggctgcaaatactgccccatcgtcaccacctccacccccgcctcccgcaggtcccgcagcaccccaaccacctctggctcagtctcacccaatcctagcatcagcccgctcttgatgattgtgagtggcgatagctctttcgcccaccgcaaaacgcgcattgactgtaggtagtcggcggccggccgcacgctgggatagagcctgggcaccgtctcaatgttgtgcccgaaaacgtctggagcggctcctagcaccctctggaccgattctggcccgaaatccggcactaacacctccacccgcgcgcgcgggatcaaccgccgaatttgccctacagtgccggcaaaatgccctgcgccgccatccggcacgtcgtcccgagtcaccgaagtgaccaccacataccgcagtttcagcgcgcgcgcggcctccgccactctgaggggctctgcggggtccaggggggctggtacgcccttttcgatcgcgcagaatcggcaccccctggtgcatacctcccccatgaccagaaacgtcgctgtgcccctgctgaagcattctccgaggtttgggcagcgcgcgctctggcacaccgtgttcacaccccgacccctcaaatcccgccccagagcctccaggtggggtctgcggggaattcgcggtacgagccaatccggtatgcggccgctcacgcccgcccctccccctgatttgcccgctggtgggccacaggctgcccgagcgccctttccagccgataccgcccccacgccagccgccgccccgccacccccctcgcccaccaccccgtcagcccccgcgaaatcgccctacgcaccacctgaagctcccagcgccgcatctccgcggcatccgcgctgcgctggtcggcgtgcagccggtgcaccgtcagcggcgccgccagcacccccaccgcgcaccgcgcgcgtatccggagccacatgtcccagtcctgcgcgagggggagtgactcgtcgaagccgccgcattgcgcgaagcactcgcgcttgacgagggcgctggacatgacgatgcgattggcgcgcagcagcgcggcgcggccgatcaggcgagggcgcggggggcgtgtaagagaggtgggagcgggcgcttggttgccgtggaacctgatggcgaaggtgcccaggagcccgagccaggggtgctggtgaagtgccgcgagttgccactcgagcttgcgcggatgccagaggtcgtcgtcgtcgaggaaggcgaggaagcggccggttgattctgagaggccgacattgcgggcggcgccggggccgcgagctggcccagcgaggatgcggatggggatgggcgagccggcggcaagaggctgaaccgtgtggtcggcgccggccccgtcgtcaactatcaatagctcgcttggcaggcaagattgtgatagcacgctgctgaccgcctgcgggaggaaggcggggcggttgcaggtggggatgatgacggagatggggggggcgtccatcctgcggggtcctgtgtgatcgctgatgccgcgagtatagggaagggtgggcaggggtgtcaatcgaggggaggaacggcggttcaccacaaagacaccccttcggcgttgctcagggcaggctccgggcacgaagggaggggaaccgcgatccgccgtcgctaacccgccttcgctgacccaccttcgctgacccaccttcgctaaagctacggcgggcgagagctacggcgggcgagagctatggcggacgggggacgctgagggcgcagagagaccgaccacaaagacaccccttcggcgttgctcagggcaggctccgagcacgaaggagagaagggcaggctccgggcgcggagagaggttgttggcggggtggggggcgaaaagatacggcgcccctggtgggaaacccccgtgaggcgccgggccgctccgtagagcgttgcctgcggacggaagtccattgctgcaattagccggacaaccgtcgctctggtacaatgtactctccttataccacgtccggaggggacctgtcaaggagggtgccgatgaacgcgatgcaggagtccgcttcaccgaagggagagttggtcctcggcctcgacatcggcgcggcgtccgtcggctgggcgctagtggaagaggtagacgggcggccggtcgggctgagaggggccggggtgagggtgttcccgaccggctcgggagagacgctcagcgacatcaccgcggggagggaggagtcgcatgcggtgaagcgtcggcaggcccggctgcgccgccggcagttggcgcgccggcgccaccgcctggacaagctcgcgctgatcctccagagcgcggcactgctgccgccaggtgagatgcagccggccgacgcggccatggcgtacttcgacgcagtggaccgcgacctgttctccagagcggccaggaaagaggacccgcacctgctcctgtaccgtctgcgggcgcgcgctctcgacggagcgctcacccggtatgagatcggccgcgccctctaccacctggcccaccgacgcggcttcctctccaatcgcagagtgagagcgcgacccgcgggcgcgaaggagacagaagaagaaaaggaagaggggaaggtcagaacggccatcggggagctggcgcgcagcatggcggagtccggcgcgcgcacgctgggcgagtatctagcggggttggacccccacgaacagcgagtgcgggggcgttatctctcgcgcaagatgctggaggaggagttcggggccatctgggctgcgcaggccgcgcatcaccccgacattctcaccgcggacttgaggaagaaggtgcagcgcgcgatcttctaccagcggccgctgaagacggcgcgccatctggtggggcgatgtgaactggagaagcgacggcgccgcgcgccgttggcctgcctggccgcgcagcgcttccgtctgctgcagaaggtgaacgacctgaaggtgctcctcccagacggccacgagcggggactgaccgaggaggagcgcaagcggctgttggaggtgctggagaggcagggcgacctcaagttcccagccatgcgggagttgctgggccttcccaagcgcggctgcaagttcaacttcgagacggagggggagaaggggctgatcggcaaccgcacccggagcaaggtggtggccgtgttcggggagcagccatggcaagcccttggcgcagaggggcaagagcgtgtggtgatcgagctgcgcagcctgcacaagcccgaggccgtgaagcggcgggcgatgaagctgtggcgactggaggaggagggggccgcgcggctggccgaggtggcgttggaggacggctactccaacctttcccggcaggcgctggagaaggtggtgccattgatggaggaggggatgcagtacgccactgcccgcaagcaactctatggggaggagccgccccgtgcagtgcgcagtcttcccgccgtgcagcgggtggtgaccctgcgcaacccggcggtggaacgcgcgcttacggaactgcgcaaggtggtgaacgcggtcatgcgcgagtatgggcggccagaccacatccgggtcgagctggcgcgggacctgaagaggcctcgtaaggatcgcaaagggatggccgcggcgatggcagataaccgcagagggagagaggaggcggcgcgaaggatcatcgccgaagccgcaatccccagcccccgcccctccgatatcgagaagtggctgctggccgacgagtgctgttgggaatgcccgtacacaggcaggccgatcagcttccaggccctgttcggcggcaatccggagtttgacatcgagcacatcattcccctgcaccgcagcctggatgactcgttcgccaacaagacgctgtgctacctcgccgagaaccgcgagcgcaagcgcaaccgcaccccctgggaggcctaccatggcaccgaccagtgggaggagatgatcgcgcgggtgaagcggttcaagagccgcctcgcgggcgcgaagctgcgactgttccagacggaggaggtgcggagcctggaggacttcaccgcgcaacagctcaccgacacccgctacgcctcccggctggcgaccaggtatgtggggctcctctacggcgcgcctgagaccggcgttgacccggaagggcggcggcgcgtggaggccagccgcggacaggtcaccgcgcaactccgcggccgttggggtctcaacgcggtgctgggcggaggagagaagacccgggatgaccaccgtcagcacgccattgacgccatcgtggtagcgctcactgacgcggggacgatcaagcgtttcagtgatgacgcggcgcacgctgcgctcacggagcgtcggcttggccggctggagccgccctggcgtggcctgctcgacgatgtgcggaaggcggttgagggaatggtggtctcccatcgcgtctcccggaaagtgtccggcgccctccacgaggagacggtctacagcaagccgcaccaggacgaggaggggaaggagttcgtgcatgtccgcagaccactgggcgggccgccgaagggcctgtccgagaaggaggtggcagacatcgtggaccgttcggtgcgggaacgcgtgaaggccaagctggaagagctgggggagaaggacccgcgcaaggccttcaaggatccgaagaaccatcccgcgctgcgggcgaaagacggccgggagattccgatccactcggtgcgggtgcgggtccgggttagccctgagctgatcggcgggggcgcttacgccaggcgggtgaagctggggtccaatcaccacgtggagatcgtggaggccaccgacaagaagggcaatcctcgctgggaaggccacgtggtgaccaccaaggaggcgatgcgccgcctgaaggccagggagccgatcgtgcagggcgaccacggcccaggcaagaggttcctgttttccctcgccgacggtgagattgtcgagctgaatgcggaacaagacaagagagcgctgtatgtgatccggacggtgaggactgacagacgggtggagttcgtgggaatcaccgacgcgcgcaagaagggcagcagaagcgagaggggcaccatcaaaggggagggcgcgtggttcacggcggccgtagacaagctgcgcgagcgcggctctcgaaaggtcgtggtgacgcctgtgggggaggtgcgatgggcgagtgactgagcgaatcgtggatctggcggaggcgccggcgcggctgagcgtgcggaactctctgctggtgatcgcgcgaggggaaggggtggagacgaccataccgctgggcgaggtggcggtgctggtgctcgccaacccccaggtgctgctgacccagccggtgctggccgggatggctggggccggggggatggtggtggtgtgtgacagcaagcgaatgcccacggggatgctgctgcccctggagttgcacttcgcccagggcgagcggttcgcggcccaggcgcaggcctcgctcccggtgcagaagcggctctggcaaagcctggtgaaagcgaagatcgccgcccaggcgcggaccctggccgacgtgcgcggcgatgatgcgggcctgggggaactgctggctaaggtccgctccggcgaccccgccaacgtggaggcagaggcttcccgacggtattggccggcgctgtttggggacccgcgtttccggcggactcggtacggcgcgaaccagaaccacctgctgaactacggctacgcggtgctgcgcgcgatggtagcgcgggccgtatgtgcggcagggctgcatccctctctcggcctgcatcaccacaaccgctatgacgcgttccggctggccgatgacctgatggaaccggtgcggccggtggtggaccgcaccgtggccagctactgcctggcccacgggccggaggcgccgctgaacagggaggcgaaggcggcggtgatcggggccttgatgggccggttcaaagtgagaggcgaagagcggacgctgttcgacattgcgcagcgaatggccgggagcctagcagaggtgttcgccgggcagcggaggagcctggccctcccggagatatgaggtggcgcgcctggtgcatgggaagcggccgcgcgatcacggccaacaggtgcgccgcaacctgtcgagttacagaggcatgtggctattcgtgatgttcgatctgccggtggatgacacggcggcgcggcgccagtacgcgcagttccgcacgcgcctgctggccgatgggttcagcatgctccagtactcgatctacgcgcgctacttcccgagcgaagaggccagcgctgctcaccgccggcgggtgcgggccacactgccgagagagggggaggtgaggctgctgtcggtgaccgacaagcagttcgggaaaatggagatcttcctggcgagaagccgggcgccgaccgagaaacctcccgagcaactgctgcttctgtgaccgcaggaagcgctagagacccccgcagtccctggacccgggggtctctattgtaccagagcggcggttcccgaccaactacagtgtgcagtccgggtgaacgggggcggggaacattgtaccagagcggcggttcccgaccaactacagttcaatataccatacggtaggctattagtcaattgtaccagagcggcggttcccgaccaactacagtgccaactgctcggtgcgttggccccgttgcattgtaccagagcggcggttcccgaccaactacagtcgcagcgcgggctgggacaggagatgacatattgtaccagagcggcggttcccgaccaactacagtgagccctgcgttacgagcgtgacgttgtaattgtaccagagcggcggttcccgaccaactacagtcgtcaccggctccggcctcctgcctcccacattgtaccagagcggcggttcccgaccaactacagtttattcgttcgggtgccccttttaggggtattgtaccagagcggcggttcccgaccaactacagtgctgagacctgcatctggccgtcagcggccattgtaccagagcggcggttcccgaccaactacagttgcctatcaccaccatgagcgcgggggccgattgtaccagagcggcggttcccgaccaactacagtcaggcccgcgagctgcgcgttcatgtccttattgtaccagagcggcggttcccgaccaactacagtctctcttcagcgctccctggctagcgatctattgtaccagagcggcggttcccgaccaactacagtccggcccaccgtgattggcggagcggttgaattgtaccagagcggcggttcccgaccaactacagtgtcttctgctgggtgggatgttcgaatccgattgtaccagagcggcggttcccgaccaactacagttgtagaggatccagggtccggggtcgggagtattgtaccagagcggcggttcccgaccaactacagtgtttcgatactggccgcgcggactggtcggattgtaccagagcggcggttcccgaccaactacagtgaccaggggaggagctgcgaggtcagggctattgtaccagagcggcggttcccgaccaactacagtcttgatccggatggcctcccaggatcgcttattgtaccagagcggcggttcccgaccaactacagttctgcttgggcgtgagcctccagaggagcgattgtaccagagcggcggttcccgaccaactacagtccgccatctccgccgcccttcactggcagaattgtaccagagcggcgattcccgaccaagggggggtgagagaggagattggagaggagagaggtgagaatgggggccgtggccgggcggaggagccgggcacgagaagatctcctgccctacgttgcgccttgcctccgcctcccgcgctttcccgccctgtgatggcagcgcggtgatgcattgggttcgtcggcccacccggcacgggaggcggacaaggcgctgggagtgtcggcgaacccgcccttcgtccagccgacccgcccgcgggaagggggttcatggtcgggggcaagggcggcccacgtcatcacgcagtggtggggcggaacctagccatcccgggctggacgaagggcgggttcggggtcgggacgcctgaggccgccgagacggcggcccctcagaccctgaaggagcttcggggtcctgaacgggcgctcccaggtgttgcaccagggcggggatctccgaccaactacagttagtcgcaggctgggagcctgcgccactgatcgtaccagagcggcggttcccgaccaactacagtcctttccgcaagctggaaagcttgcgccaccttgtgccagagcggcggctggccgcccagggattcccgaccagggggagagagagtagaaagtcgagaggagagaggcgagggggaggggggtggcggcgaaggggatcggagattggagagttgagatgcgattgcaggcgaagtacggcaggcggcgggagctgtctgtccccggctggagcaagggcgggttcggggacggggcaggatggcggagaggcggatcggggattggagatttgagatgcgatcgggccagagggggggttctcgcccgaggggaacggcggttcaccgcagagagcgctgagaccgcggagagcggccgatggtgagatccgcagattgcgcagatggcaggctggaagcctaccccaccgaggggagatggcaggcggcggggaggggagatggcaggctgaaagcctaccccaccggaggggcggcttgggtgtattggacgttgccgtaccacatgactttggcaacggcccagattgagttgatgttgccgcggctcgtgctgcgtagcgaagaagtggctaggccctccgggccgccatcccggccttcaggcctagggacgtcgctacttcgcagagcagcaatggtgaagcggaaggtctgcttggcgccggcctggaggttgaaggcgtagaggcggggggagacggcggcgacggccaggcggcccaccgcggggccccaggattccagcggggtgatcaggacgacttgtccctcgacgtagtcgccgttggggttctccacagtaaccaagaaggcgctttcttctcgggcgagcgtgatggcgaggggctggacatcgcctatggggatgacgtcctggaagagctggtcgtcatcctggacgatggcgcgcaagaagcaggagggcgcgtccgcgggaggggtgaccatgatctcatagacggcctgggagccaggggcgatgcgatagggcacctgcctggggatgagggtccaggtggcgggcgcgacgatgcccacggtgccagtgatctcgcgctccagggaatcgttggagacgccgaggccgaagcgggtgttcttcccgcggggaaggacaccgcgcatccagacagtcaccggttggttgccaagcggggcagcgccaaggttgtggtcccagtagcggctgtggacaggctggccgggctcggtggaggggccgaggtcctcagggtgggagggggtgtcgagcaagggggagagacggaggccgacggtggcgatctcgcaggggccgagcgtgacggggagctggacgggacggcgacgacgggcgcgggggatggtgaggtctgcggtcttctgctccaagagatcgcagagccaagcggaggcgggcggcgcggggaaggtgagctgtgcggtgcgggccgccccatggggctcgtagagacgcaagatgatgtcggcggcggtgagcgagcgcctggcaggccgctgctgggggagggggtcgccggctggtttgacggcggtgatgaggacatccggctggtccacgctcaccaggctgaactcgatggggagagggccttcctgaagaggggcctcaagagcaatcaatgggttgctgacttcgcggccggcgcggacgaggcctgcttctcgccagtcgccgcgatggggaagcagcgaatagcggaagacatgggtcttgtgctcggggatgaggaagtgatcgagcttgccctggccccaggggtggcctttccagggggaggtgtgaaagagggggaggacgagggtgttgtctgattcgagggcggcggcgaaggtattgccggtgagcagggcgaggccgtggctgtcggcgggccgggcccccttgtggaagtcgcaggcctcggggatggcgacctcgttggcagccaccgcggttgccagcatctcaaccaaggcggggatgccgccggggtcggaggtgtgggcgaccagagtggggaccgactgggagggactcgtgctacgtagcgaagaggcgtcgctacttcgcagagtagcatcggaggggtcagggcggctcaccaagaccgcggcccaggggccctgggagagcatttcggtgaggcgggcggcggcctgggggttgccggtgaggactcgctttgagtacgcgttgtcgcggccgaggctgatgcgaagcgcgcaggcggagtcggcatcgggatcggcggtgtcgaggaaatgggtggaggtgatgcctctggcgaggagagcttgcagaagtctggggagggcggcgcggtggtggaggtcgggggaggtgacgatggcgcaggggccgaggggcagggcgcggcgggagcggtccgcgcctgtgatccacaatgaaggagccgggccggcgtccatccagttctgcgcggaggcgaggccgcgcatgcggaaatcgcgggggccgcggctgggcgcgcgcacgatggcggcgaagcggtcctcgaagatgggtgtcgggttgccaagggcgagggggaaggtgagggcgagcagctcgtgcgcgccgcggtaatcctggattgaggtacggaggtcaatgcggcgcaggccgcggtagagggtgacctcttgcatgagctggcagcgatcgccgagctggctcttgacgtgcaggcgactgaagacggggccgttggtcacggtgagtttggcgcgctggtcgcgggagcggaggaggtcgccggtggtgtcgagttcgggcgcggcggggtcgccaccggggccttcggcaatggcgagcagctcgttggcggggccggccgcggagttgatgaggttcaggttgagggtcttgtcacggagactggtgaggccgccgccgagggcggcgttcgcggtgatggagaagtgctcgttctcgatggtggcggtgtctgcggctttgccggcctcggcctccgggagggatggagccggtctcaggtagtaggtgcgatagccgagggaggggatgtcggcggcaatgaaagcgatctccaccgctggatggtcggcctctgggagtggtctcgccggcgtgtcgctggtgatctgaaaggcgacagggcggccgcggtcatcggtgagctggaaaccggcggcgagggggccctcgagggagatgagcgcgtgacagatatcggtgcgggaccaggagagggagttgaagacgaccagcgcggcaccgctgcggggtgcgccgcgggatctgtgggtagcgatcctgagcgagaggtaggagagggcgcggcgctccacctctgcggcgagctcgattgactctcggcaggaggcgaggaggtcgaggtaggagaggtcggcgacgcggccggcgagggcctggtggtgctggccgtagaggagcaggcgccaggccttgtcgagggtgcgatcggggtagcgggcgccgacgagtccggcgagggtggcccacttctccgcgttgaggagttggttctcggccaatcgggtggcggacttgaggtcggcgcgggagaggacggctgcggggctgggccgggagagatctctggcaagcaagggcagggatgctttccgaagatgtgcttcactgcggactgcggagaggtagtgctgggggacgctgatgaggacggaggggtcgaggtcggcgagctcctgcacccgtccggagagccaggggggcggaggggtcatctcgccgccgagcagacggaggtcatgcctgatgcccacctcgaactggcggccaaggctttcggtgagggtggcgacgaactcgtcgaagtcgtggggctggtagacgctgggctcgggcttgagcaggaccgcggagccatcaggcgcgagcaggtagcagaggggaggcaggtcgctggggtcggcggcccacaccatcgcctcgaagccggccttggcgaggagctgggggagctggaggcaatggcctggcgcgcggagggagagataggcgctgggagtgaagctcaacaccccttccaggtaatggcggccgtagatgagattgcggatgagggattcgccctgcacgaacgcctcggccaactggctataggaggcggctgcgtcgaagcggttgagggtgacgaggccgcggaggaatgagcgctcctcgccgaaggtggcgaggaatgggcgcaggtagtcgaggtcggaaaggatgacggcgtatccctcctccgcgcggcaggccgccaggtaatgggacaccagatcgcaggcggagcggacccgggtgcgctgatcgtcggttcccaccggcgagaagtggaaacagggggctacgtggatgacggggcgctcttcagccatgggcgtgctttcgttcggttggtaggcaagctagcgctcctgcaggtaacgaaggcgatcccggtagcgggcgaggaccgcctggttgtgatcgtcgccgccaggcagattggagctcatgtagacgggaggtgtgagaccgcgagagaggaggagggcagcggtctcgacgacgagggcctggaggatggcggagccgagcgcagtggaggtgggccccactttctggccgagaccaggcagggagatggcggcgtcgccgggatcggcgtggttgtctatcacgatgtcggcggcctcgtggaggcgcttgccgctggaatggcgcgggggaagggtttccgcatagcgcctggcggtcaccgcgatgacggtgaggccggccgccttcgcggcgagggcaacatccacgggcgcggcgttgcggccgctggtggagatgacaatgatgacatcgccggggcgggcgcccgagctggcgaacaggtccggggtccagccttcctttcgctcccagtcggtggtctcagttaccgggcggcggttgaggatgatgcggtcgtcgaaaaggggttcgatgaggatgaggccgccggcgcggtagaagatgtccatggcgagggcggcgctgtggccagatccgaagacgtagaccaggccgccgccggccaggcagtcggccatcgccttggcggcctgctcgatggccgcgcgttcggaggtcttgacctccgcaagtcgctcgcccacagtgtcgaagaaacgctcggcccacatggctgtcccctacagagtctcttgcgttacggttacgttacagtcgtccacagggacgctctagacggcggtattgcggtactccgcctctgcccgggcgttgaagtcggctccctcgggcaggttgacggacatgtagatatgtggtttcagtcccctcgccgccatctgggcgaccgcctcggagaccaaggcccagatgatgtagcagaaggtgagcccggaggtgggcgcgaccttggcatcaacaccttccacatccagggctgcgtctccgacagctccgcagttgtctatgacgacatcggcgacgtcgcagaggcgctggccggaggaatgctcgctggggacggcgcggctgtaggtgacattggtgatggccacgacggaggcgcccagttgcttcgcggcgagggcgacttggacgacggccggcgctttgccggagacgctgttgacgatcagcacatcgcctggcgcgagggcactgcgggaaagggcgaggtcggcgagggcctcgtcagtggggccgcgggaggtgcgccggcgttgagcggcagtatccgcgcggcggggggcaggagtactctcgaggcccagagagaagcggaaaggcttcatcatgaggaggccgccggcgcggtggagcggctcgtgagagcagtggccggtgtcgtagatgtgcaatccatcgcctgcttgggcggcatccgcgatgaggcgggcagcgcggcggatggcctcggtctgggtggcgcggacgcgggcgaggacttggtcggcgaaggcgaaccagcggtctatgctcatagaggatctcctgcacaggtgctcggggatgcgcgtccgagtccttcgcctggaggcgagggggtcctgccgggtggctggacccttcgggtggctaggcccgaagggccgccatggcggccgccttcggcggcctagccaccgctatcccggtcggcggagccgacccagggaccttggggggccgctaggtctgtggccgccggccgaagagcaagtcgcggagaggggcatgacggcgggcaggtgctcttgcagcttaggccttttgtgtggtatactggaataatcattctagtatagtggaataattactgaggcgtgaaggccatgtatcgagccggctactatgcgacccgtgaggagctgcggaggcgtgtgaccgagccgccccccgcgcgcgttcaggttctcaccggaccccggcaggtggggaagacgacgctgatgctgcagctggcgaaggagtggggcgaccgggccatctacgtcgccgcggacgcgcccgaggcggcgctgcccgggtggtgggaggcgcaatgggagcgggcgacgcggctggcccgcgccgagaccgcgctgctgctgattgacgagatccattacctgcccagctggtcccgcctgctgaaggcggagacggatcgcatgcgccggcagcatcttgcgctgcatgtggtggtcagcggctccaccgctcttcgcgtcggcaagggggtgcgggagacgatggccgggcgcttcgagcgacttgtcctttcgcactggtcagcccgcgacctggcacaggggttccatctatccaaggaggaggcggtggactgtgtggtcaggctcgggggctttcccggaggcatgagcttgcgccgcgatcctcggcggtggagagcgtacatcgtggacagcatcatcgagccagcgattggcagagacc

SEQ ID NO: 3559 - DNA, 18888 bp, synthetic construct
  source 1..18888: mol_type = other DNA
  misc_feature 1..18888: note = Synthetic
atcagcatccccaaccccaacgcccagtgcgtccggtctcccatccggagaccccccttcttcagcccgtccaccctctccgccacctagagggggacataacaccggaaccaactactacggctcgtatcacgtccgcggattgctgtcaagtggttttttccggttttctagcctgtgccgcggtcaccagcctaaacctcccgaaaccaatctcattatacggttgggaacgacagaatgagcgccagtcggaaaattcagacacccagccgcaagcccggccggcgggccctaccgcccgggcgacttccgctgggcgcggaactgctccacgagcgcggcggcgaccggatcctcgggcagcgaaagggcgagggggtaggaggtggtgtgttgaaaacgcgggaagcccgggggtgaggggtgtagcgtcaggcgtgcccgccggacgttctgcgcccggccccgccgttggcggggtctgcctcagggacgactttgggcccgatgttgcccgccagggcataggggcgggttcttaacccgcccgccgttcgccacgcgaacgggggtgtgagggggcccgccggcagcacaactcggcgcctggcggcgccgcgggccgcataagatgcggcccctacgccgccccgccaacgcggggcggcagaccgcctaccccgcgtcaaacctaaaggtttgagttacgatgcgcgtagcccgggaatcgggttgtagcgtcggaccccgccgttggcggggtctgcctcaggcacgacacggagtccgggcgctacattgccgtgccatcctggtgagcgccgttgggccaagaggaccttctcagcagagtaggtgggaggccggctagtgcggaacctcgcggtagtagagtatggccgagccgggagccgaggggatctcgacctttaggtgctgcaaagcctggcccgtgagcaccgcggcgtttccgccgtcctcaaacgtcacttcgtactcggcgttcgcgtccagccccttcaggggcagcgccttcgccggctcggcgctcttctctcggcgaaagacgactgcgatgcccgcgcccaggtcgtcgcggtggaactggtagccgtaccacacctcctccgccgcggtgtgggggaagagcgggtagaagtcgccgagcagatagggcctgatcttcttgtagagagcgacggtcctgttgaccgcgggctcgaccgcatccgaggtgaggtcagtggccaggatgttgcccgcggtcatcgcgctgcggaagaggtagtcgggctccagcgcgaagtcgccgcagccgtgcatcggcagccagcggaagagaccaccgttctgcaattggtccgcggccgggtgcggcccgctgcactgcaagtcgctatgccacagcggcacgcccctagaaagcgtctcgaggtctagccggcggccgccgctggcgcagaggtctatgaccaggccgggatggcgccggcgcagttcgtcccacatcgcgtagaggccctcgaggtggcggatctcggtgatgccttggcggtccggggagtcgttgcggcgccagaagccgaggggctcgatgttgaagtcccagcgaatccaatcgaggttggccgcggtgacctgcacgtctatgtaatcggttagccacttgcgcgccccggggtcgtggagccggaacaactggctccattctccctccggcttcatcacccactcgggatgctccttgtctatggcggtgccgaagtgcacgcgctcgggctcgaaccagagcaggtactccaggccggcggcgtgtgcggcttcgcctatcggtttcaagccgtggggatacttgagcgggtcaggaacccaggtgccggtgccgtcagggaacccccccgggtaccagtgctgcggatccaggtcggaccagaggacctcgatcctgcgcgcggccagcaccggcgcgacgcgcacgtgcgggccttcgtaggaaccgtcggggtcaacggtgctgacgctgccgcagatgggcgagaggacgagagcgccgtgctggcggggcatgtagtgggccatgagcagctggcggaagaggttgttgccgcggagcgggtcgcgcccatcccagaagagaaccagcattctgggggtgcggatggcctctgcgggaaggagcctcaagtgagtcagttccatgcctgcttgagcgcggagcgcattggccccggcgcgttggaaagcggctcgccactggcccgaccagcccactgcgatgacggcgccttgccccccccactcgacgttgaagaagggcaggtagccgtcggaggaacggccgccgttgggcgcgagcaccagcggctcgccgccggcagcgctcagccttcgcttcctgggggcgaaggagtcagccgagttgctgtcgccgagcgagtactcgactgcgaaggccttgccatcccctgtgacgatccaatcgagcgcttggatgtcttcgatgatgggcgtgtcgttgcggccggtgttgcgcagttcgagcaaccactcgacagcggggaagtcgtcgaactcgaccgcggtgcacacggcggcgaggccggtggcggggtcggtgtaggtcacagtgcgctgcaaacgccgctcatcgagtctggtgctgtggccgctcacctgccagccttgtcgcagggcagcgaacggctggccgccgagcacgaaggagaaaggcggcgcggcctctgggctggcggagaaccaagcctgagcccaccttctggccgcgtccgtttccgaggcactcggctgcacgccccaggcccgaccggccattacagaaatcgcaatcaacagcgccagcagttccaggcgcagttgcatatcggtctcctcccgcgtcttcggcaacgctccgaggtgttgagacagccaggcgcggcgggcgctacgcgggccgcgatggccaccggccatcttcgcagattcggcctgagggcctcaaacgttgtgtccaggccgcgggccgcactggtgctcaggtgcctgctcggcccacgagcggggcagactggttggcggaggagcgagagcggggcaccccggcgtgagaaccctcgactggcagtccggaggctttggtgaccaaagggcgagattggacaagatagtggtgggcgggagaggactcgaacctccgacttcttccttgtaagggaagcgctctagccaactgagctacccgcccactaagcggcgcagcccgagcggcgcatccgcgcccagaaaaccggctgcgagcctgagcgcccgccgagcggcccgccgcgagcaagccttgagcctgtggttcgacattgctcacggctcgacttcgtcgccgaagtccaccccgagcctgccgaggcgtcgagagacgccccgagtggtggccccagggggagtcgaacccccgtccccgccttgaaagggcggtgtcctaaccgctagactatggggccgcctgacaacgctcgcaaagcgccgctcgcgggccgagcaccaaccacgcagcgcgcggcccgatccggtgcgcgccgttagatgctatcagaaatgcgcccgcaggtggaagtgcccgcgcggggcggctgcggcctcggtgtcggtctcacgtattgacaatggcgctccggcagcggccaaaggctgccccagacgccgggttcagcgcgtaattcactggagggttgcccaaatgcgtcgccgacttgtagggaggtcgctggtgttcgcggtcgtgctgtgggccaccatgctgtctcccttcgccacgttcacaggagggtctggtatgagcaaggagccgagtggggagcccggggtcgctcaggccgcggagagtgatgagggcattgtggccggcgacccgtcagagccgctcttcggagatgaacccggggacgttgagaaggtgacctccgcgcccctcgtcggcgtcccgctcgcgctccccgacggccgcgtcatcatgtgggacgtcgccggcgagcagggcagtcagtacgctcgcgctgtcttctcgctcgacaacgctcgcacgtggggcgacccgcagcggctcttcgacttccccaaggacaagggccagttcaccaacggcgcggccctcgtctccagggcgggaaccgtacacatcttcggcctcgactactacggcttcgacttcgccgcccgcaagaagtccaagagttacctctggcattgccgttcgcgcgacggtggcaagacctgggacccggtgcagaaggtggacttcggcctcgagtacaccggctcctcgaacaatgctttccaactcaagtccggccgcatcatcgcgcccgtcagcggcctcagcgaacgcaagatcgggccgtgggtcagtctggccccctattccgacgacgacggcgccacctggcaagcgcccgcccagcagataaccatgaacaccggggccgctgactggtacgagtccggcgccgccgagcccgtcggcgtggaactcaaagacggccgcgtctggctgctcccgcgctcgcaagacggctatcagtgggagacgttctcgcgcgacggcggcctcacctggacgcgcgtgcgccacacgcgctttgtgagcaaccagtccgccatggcggtcatgcgcctcgcggacggccgactgatactcttctggaacaactgcggcgccgaggggcagggagacatccactggggctacgcggagcgcgcggtgatggccgcggccgtcagcagcgacgaaggcaagtcctggcaggggtatcgcgaggtcggacgggtgaccggcccggcgcaggtgtcctatccctacataacccagatgaaggacggctgcattctcctgtacgccgcgggctacctcgcgcgcatccggccggacttcctcgccaacgccagattcgtcgaggacttcgcggcgggcgtcaggcgctggtccacgctggcggcggccggcatcagcgccgtgcccgatcctgacggggccggcggcacggtcctgaaactggtgaagcctgaggcggacaagccggcggccgcgtgcatgaacttccccttcggcagcagcggcgagttggccatgtcagtcaggatcgagcccggtttccagggcgcccatttcacgctgtcggaccactacgacctgcccggccttcctcgcgacggcagtttcccgttgcgcattacggccaagggccgggtgcaggtcatcggcagcggcggaacctggctcgatacgccgggcgatctggcgccgggcaagtggcaccggctgcgggtcaagtgggactgcaagcgcgggcgcgcgaagatgtggctcgacggcaccgagattgcggttatggagcagttcgtgcgcacgctggggctctgctacctgcgcctccgctcgctggccaagagcaccgatcccgcgggcctctacctgagatcagtcgaagtatcggtgaggccatagggggccgtttcggtcgcgcgggcgggggcaggagttgcgtgggcggatcgcgggcacgcagccgaggctagaaaaaagggagagcacctcgctggggggtgctcagtggcgctccactggggagcgttgcctgcggacaaaagtccttgctgtgagtagcaggacaatcgccgctcaggtacaatgtgcagtgagtatagcatgccggaaggcatctgtcaagggggaatgtccggtggcagtgcaagcgggggacaagcggtgtgttttgggcctcgacatcggggcgaactcggtggggtgggccttggtggaggagagtgggggaagccccgtcgggttggtgggctgtggtgtgcgtgtgttcgcggccggggtcgagggggatatcgagtccggtagagaccagtctcgagcggtgaagcgtcgagaagcgcggcttcggcgaagaatgctggaacggacagcacgacggctcaccggactggcggtcctgcttcagggcggcggtttgctcccgcaagggccgctctcttcggaggaggagcggcacaggtttttcctcaacctcgaccgtaccctgtcgcttgctctccccgcgggccaggacccggctatgcttccgtaccgcctacgggctcgagcgctggacgaagggcttcaggcttacgagatcgggagagccttgtaccacctcgggcagcggagggggttcttgtccaaccgcagagcaccaagcaagaagcacgaggagagcgaggtaaaggaagggatcgctgaactcgcccgcgagatggaagcggcaggggcgaggactctgggggagtacttctctggtctcgaccttcaccacgcacgcatccgccatcgctggacgtcccggcagatgtacctggacgagttcgacaagatctgggagacacaagcgcagtaccagccgggccttctgacgaacgagttccggcgccaggttcaccgcgcgatcttctaccagagaccagtcaggagcgccagccatctgatcggtcactgcgatctcgagccggggcggaagcgggcggcgtgggctctcctgcccgcgcagcgctttcgtcttctgcaaaaggtgaacgacctggaacttgcgacccccgacggcgtgcgccggcgactgacggggccggagcgggaggcgctcgtcgctcacctggaaacgaagggtgacatcaccttccccaggctgcgcggactgctcagcctggacaaacggacaggcttcaaacttgcggagagcgaagacagggtcatcgggaaccggaccgccgcgaggctgatgcgggtcttgggcgagagccgttgggagggtctgtcgtcggaggacagggagcgcatagtcgaggatcttggcagtattcagaaggaagaggcattggcgcggagagtgcggagggtctgggggctggacgaggagaaggcgcgggagttggcctcgacccgtctggaggaggggtactgcaatctgtcccggaaggccattgagaggttgttgccgcttctggagcagggggtggcgtacgcgaccgcccggaagcaggtgtacggggacgcgccgccgcgggccgcctacgatgaggttccgccgttcgacttgcctcgcaggctggggcgcttgtcaatgcctgaggtgcgcaacccagcggtgaagagggcgctcaacgaggctcggcgagtggtcaacgcggtcatccaggagcacggcaagccggacatcatccgcattgagtttgcccgtgaactaaagaaggcccggaaagaacgcaaggccatttcagagcggaaccgagccaaccgcaaggctcgcgaggaggctgcttcgagactcctgcaggaggcaggcattcagccggctacccgccgggacatcgagaagtggctgcttgccgaggagtgtaggtgggaatgtccttacacggggaaacagatgagcgcgggatccctgtttggggaggctccgcagttcgacatcgagcacatcatccccctgtaccgctgctgggacgactccttcttcaacaagacgttgtgcgaggtgaatgagaacagaaacgtgaaggcgaaccgcagtccttgggaggcgtacgggtccgacagcgagaggtgggatgagatcatccggcgcgtcaagagttacaggggcgccgcggcgaaggccaaactggaacgtttcaagatgactgatctggtgagcctggacgacttcgcgggggcccagttgaatgccacggggtatgcctcgcggctggcccgggagtgcttcggggtgctctacggcgcgggcgccgacggcgtggacccgcggggcaaggtccgggtgcaggtgacgcgcggcggtgttacccgttatctgcgcgacgagtgggggctgaacgcgatgctggggggcgcggagaagcgaagggaagaccaccgccagcatgcggttgacgctattctggtggctctcaccgaccagcgcgcgataaaggcgttgagcgacgccgcggagcgcgctcggtctgtgcgccggcgccggtttgcgcccatcgaggcaccgtggcgctcgttcgtggaggacgtgggacaggcgcttgagactctgatcgtctcacaccgggtgtcgcggaaagtcagcgggcccttgcacgacgaaacctactacagccggccccgcgccgacatggagggtgaggaacgcgtccgcgttcgcaagccgctcaacggagacttcaaggaccgtgacgtggaggcgatcgtggaccccgcggtccgcgagcgggtgcgggagcatctggagaggcacgcgggcgacgccaggaaggccttcggcgatgctgccgacctcccattcctagaggcgaaggacgggcgtcgcatgcccatccgtaaagcccgtatctacaaggccctaaggactcaggcgatcgccgagggcgctcgccgtcgggaggtagcgactgggtctaaccaccacgtggagattctggaggtgcggaacaagaagggcgccgtcaaatgggagggggaagtagtgacgatgctggaggcgatgcggcggttgcgggccggggagccggtggtcaggcgcgaccacgggcctgagaagaggtttctcttctctctctgcggcggggacaccatcgaactggacagcgagggcagccggcaactgtacgtggtgcggagcacaagccccgcggggggaggcagatacgtgctggtggagtttgtgcggaacaacgaggcgagaaacgtagggcatatcaagaaggggggcgagtggtccaaggccctgttggacccgttgcgggagcgcaactgcagaaaggtcgtggtgagtcccctgggggaggtgcgggccgccaatgactgaccgcatggtggatatctcagagcacgccgcccggctctccgtgcgcaactcactgctgctcattgaacgagagggcgaagaggtgaccataccgttgtcggacatgggggtgctggttgttgcccaccctcaggtgagtttcacccacgcggtcctgacggggctggcgcaaaacggggcgtcgttggtcgtgtgcgattccaggcacatgccggcggcaatgttgctgccgctcgaggcccacttcgtgcagggggaacgcttccagcagcaggcgggggcgccgctgcctttgcgcaagcgcctgtggcagcaattggtgcgcgccaagattagggctcaggcgcgctgccttgaggagttgcaggggtgcgagcagggccttgcggatcttgcccgcaaggtccggtccggcgatccctccaactgcgaggctcaggcatctcgccgctactggccggcgctcttcggcgaccctcagtttcggcgggatccggcggcggaggaccaaaaccggttcctgaactacggctacgcggtggtgagggctatcgtggccagagcggtgtgcgccgcgggcctgcacccctccctcggcctccaccaccacaaccgctacgacgccttctgcctggtggacgacctgatggagcccttccggccgatagttgaccgcacggttgtgggattgtgcgcggaaatgggcgccgaggccccgatggagaaggagaccagggctcggctgcttgagccgctcaccgggcgtttcctggtcgagggggagaaccgcaccctcttcgacatcgccgcccgtgtcgcccagagcctggcggccgtatacgcagggaaggggaagaacctagttctgccggaagtgtgatatggcggagcagagagagccgctatcggagtacaagggaatgtggcttttcgcgatgttcgacctgccggtggacgagccgggtgcgcgcagagaatacgcccgcttccgcaactcgctgctcaagcatgggttcaccatgctccagtactcggtgtacgcgcgctactgcgcgagcgaggaggcgagcgaggcgtaccggaagcgggtcaacgcagtgctcccgtcgcgagggcaggtccgcctgctctccgttaccgacagacagttcgggaagatggaggtcttctttgggagaaagcgagaaccgaccgaggacccgcccgctcaactctcacttttctgacccgcaaggggccaacgccctgggtggggacgggggcctccagcgggatcagaaggctgcaaacgccctgtgcgcgccgtgcgtgagcactgtgggagggggatcgtattgtacctgagcggcgattccctgccaaccacagtcttggggggcatgtgctgggcgacccagcgattgtacctgagcggcgattccctgccaaccacagtgggctgattgtggggggacccacaacgcgaattgtacctgagcggcgattccctgccaaccacagtatcgcgaggccgtcacgcaatccctctgccattgtacctgagcggcgattccctgccaaccacagtacgagcgaatgagacctcatcgccgtaaatattgtacctgagcggcgattccctgccaaccacagtgaggtgcaccagatactcgatgcggtggcgattgtacctgagcggcgattccctgccaaccacagtggcggggacgtcgccggcggcgccgccagaattgtacctgagcggcgattccctgccaaccacagtgcaggggcgggagcaccacctgctgacggtattgtacctgagcggcgattccccgccaaccacagttcgttctctgcggcgatgcaggactggcttattgtacctgagcggcgattccccgccaaccacagtgaggttgacaccggccagccgcacgagtgcattgtacctgagcggcgattccctgccaaccacactggcggggacaggcgagacgccgtgtccccgatggcaagtgaggggcgatttcccgccggcctcaatgtcggggacaggcgagacgccgtgtccccgatggcaggtgaggggcgattcgctgccaggcacaggggcggggacaggcgagacgccgtgtccccgacggcaggtgaggggcgattccccgccaaccacagtgccagcggagaggggtaggggtgaggtgtagttgattcagactggcttcagtcaagcgacacgtcggggcttcgggtgaaggcccacaagccgggcgatcaactcggtgggatcagtgccgacgagctaaccttccggctcacgtggatcgcgtggctcagccagcggggtttctggctccactgttggggccatcgcctgtccgatgagggcctggagtacctggctcgttgagcagttgcgccttgcggcctcgtctatcacccagcggtacagcgggtcttgcaggtaaatctcgatgctcggcatcactgccacctcccggtcagattgtacctgagcggcgattccctgccaaccacagtgtcggggacaggcgagacgccgtgtccccgctggcaagtgaggggcgatttcccgccggcctcaatggcggggacaggcgagacgccgtgtccccgatggcaggtgaggggcgatttcccgccggcctcaatggcggggacaggcgagacgccgtgtccccgatggcaggtgaggggcgatttcctgccaaccacggtggcgccgcgcatatcgaagaagtggcctgactactctcacgcccctgtgcctgcgccggcaggctgttgtcgcccagggcctctctctgatatactgcggttccgcgggggtgtcgtccagcggatcaggacgtcggcctgtcgagccgaaggtcgcgggttcgaatcccgtcacccccgccagcgctcacatccgggccgctggtcaggcccactactggtgccgggatagctcaggtggtagagcgagggactgaaaatccctgcgtccccagttcaattctgggtcccggcaccattctgcttccttgggcggccacaactcgctgaccagccgcgcagccaaccggcggcgcagtctcacgcgctgctcgggcttgccgcagggacttagcgcttgcgcgcgccctgggcgctgggccgccagcgcgggtgcccatcctgcgccgggctctgagacacgttcctctgcctaccaccgccggcggtcatcacgtagacctccgcattcccgtccctgtacgatacgaacgcgatgctcttcccgtttggtgaccacaccggctgggtgccgccgccctcggtaagtttggtatcgcccttgccctcggcgcccaccgagtagatctgaggcgtgccttctctcgaggacacgaacacaatcctgcgtccgtccggggaccagttcggtgctccgttcgggccctcgctctcgctcaggtacctgccctcgctgccgtccgcgttgaccaggtagatgccgtccttggtgccgcgcaccgacctgaaggctatcttcttgccgtcgggcgaccagcaaggcgattcgtccggtccgggattgcggctcacgttgcttgcgccggagccgtccgcattgatgaggtagatctccgtatcccgttggcgctgcgccacgaacgccaacttgccaccatccggactccaagtggggtccgacagacggcccaggtcacgcgtgacctgcttctggctcgagccgtcgggattcatagtccacaggtcagggttccccccccgcagggagatgaaggctatcttgttgccgtccggcgaccagcgaggggaatggtccgcgcccgggctgcgcgtcaggttcgtctgctccgagccgtccgccttcatcgagtagatctccagattcccgtcgcggcgggagacaaacgccatgcgcgttccatccggagaccactcgggcgaccagtcccacgcgggcgccttgctgagccgggtcttgttgctcccgcccgcgggaaccacgaagatctccgcgttgtccgggcgcgaggagaagaggatgctggaaccgtcgggtgaccagagcggccgagtgtccgcagccgggctgtgagtaaggcgggtcacgccggagccgtcggcattcatgaggtagatttcctggttgccgtcgcgttccgacccgagcgctatcctgttgccatcaggcgaccaggccggctcggcgtcctgcgccggatcgttcgtgaggttcttcaagcctccgccggcagcattgaccaggtaaacgtccatgggcccgccgccctgcggctgcgcggcaaaggctatcctggttccgtccggagaccacgccaggttgtgcaccggcccggaggtaccaccgggcgtcaggttggtctgctcccatccgtcggcactgaccaccgagaggaggtcgctgccgcgcctccttgaggtgagcgccagccgggcgccgtcgggagaccaggcgatctcgcctatggggccgagattgtctgccacggtcgccaaatgcgcgccggtagcgctcgacatctggatgccgtagttctgccggtaaaggcctaggtaggcgatcttagtgccatcgggcgaccagcaaggctgcccctgcgtctgagtctccttatcagcgagcgggcgcagccctgtgccgtccgcgttgaccacgtacaggctcggcagcctctccggcgccgccaagaaagcaatactcttgccgtcaggcgaccaacgcggctccaagtacgccgagacatccgccagcacggtcgtcctgcgagtcccatctgtactgagcacgcacaggtcggacggcggcaccgagggcacaccgggggccgacgggggctctgctcggcctcggggccaggggcgcaccgacaccacggcaatcttcttcccatccggcgaccagacggggttggtgtcgttgaggttggggtcgcgcgtcaggttcaccaaacccgagccgtccgccttcatgacgcagacctgagcgttgtcgggcgcacgggactcgtaggcgatctgtcccacgcccggcgcgcagccactccaacaggtgaccgccgccagcccacacagcagcacccagcgtgctgcggcgccggcgcgctgacctgtgccaatggtttgccccatgcgggtccttccccacatctacgctgctcctcctaccgcggcccgatcggcttgggcacgccaccggcccagtacgcacccgaccggccgcctgccgatgtgcttggcgtgcccactagaacccagtctccaccggcagcgattcaatgctcgatcactcgttgaagccgccgtcgtagttcgccgtgtcagcatacccaagaacgtacttcagcgtgaagtaggtgtgagccgacatgtagccttgcccgcaggaagtgattgtcctcttgtccggcgtggccccgagcccctggtacacgggccgcagttgctccccgctcttccaggcggggtcggaggcattcagtatggcgttgagatgcatgctgtcaacggctcggggggaggccccaggcgtgcggcggggcggggctagtgagagtagcgacctaccttccagccctcgtccagcatggccaggaagttgcgcacgggcacgtagttcgccaccgagttgcccgtgcccagcgcccagccccccccgggcgcgcactcctccacgcagcgccgcgtgtaggcccgcacctcctcctccgtgccgctcgccatcacgtgcatatccactccgcccagcagcgcgatgcggtcgccccaggcgcgcttggcctcccacaccggctcgatcacgtgctcgaaggaatgcttcgcgtctatgcccacgccgtcaatcaactcgtccatgatcacgcgcaggttcccgcaggagtgcagcaggattggcttcccggccgcgtgcgctatctcgcacatgcgctggtgccaggggaacacgtacttgcgcagcacctccggcgacgccagcggcccgctccggaaccccaggtcgtcgttcagccactgtgcccccacctcttccaggctcacggtgcgctgcacgatctccagcaaggtctcgccaacgcgggtggtgatcgcctccaccagcgccgggtcgtcggccaaggcatagacgaacgtctcgtagcccatcaggaaggtcagattctccagcggcccccccggtatcatgggcacgatcttcatgccctcgggcaggcaccgcgcctgcgcctccagcggccggaaaccctcgtccgtgacctcaggccaggggtagcgctcgaactgctcccaattggtgatcggtcccttcgattcgttgacccagccgcgcttgcctcgcgagagtatggcagtgtccggcgcgtttatgcccggccgcggaaacccgatgctgagcctaccggtcacgtagtcatacccgtggtcgcgccagaacttcgcccaccacctggcccagccgtcggtgtcttctggaggcgtctggggcgggccctgtatggccgccatgatctcctggtcgtggtacagttcgcagaaaggcacgcggtccggctccccctcccgccgcaggaccttcagaaaccggttgaaatcaggttcaggggggcgctgaccgttggccatagtgccgtcctttcaatgccgcgcagcgcccgttgtcaagccacccatccgcaccctccgccccctcgtaggggggacccggcgtggccgcccgccgcaggggcggcaggcttgcctgcgcccgcgacgccggaggcatcgggcagcgccctgcacggagtcagggcgctacaaccaagtgcctcggcgccccgatcttctccatcggtatccgcttgaacccgatccgataggccggcgcgtcctccctgagttgccagttctcctggtccggggccacgaacccaggatcaccctccgtccagttatcccgcaccgtaactgtctcctcggccaagccgtcgtacaggtccagccacctgcccccgacgcagatgttccgctcgatgttgttgcccttgggcaccgccggctcgtcctcgagccaggtgagcaactgcggatagcgcacgctgtatggcggctgcgtatagttcaccgccttcaggcggtccatgagcgtgttgtccctgccgtcgaaccagaaactcgcccatcccatcccgcgcgcatccacgtgcaccgccgggttgcactccacgaagacattgttctcgatgatgttgtcccggccgccgccgaggagcaccccgcgcccgcccttatagcagacgttcccatacacgaacgtccccgccgtgcaatcgtcgaggtagacggactgcacgtccccgtggcccaagtggtggaagtagttgtagcgcacgacgttgccgcgctgggtcacgtcgcggcccatgtagaaggcgcccgcgtcgctggtctccatgcagacgtgatgaatctcgttgaactcgatgaggtgctcgttcccgcccaggattatcgcggagtgcggcgcgtcgtagatcaggttgtttgcgatgtggttgcccaccccgttgatggcgaccgccggcctgtaggtcctcacccaccggctgaagtcgtggatctcgcttttgatgacgtagttgctgcccgcagtcagagtcatccgatccccgccgctcaaggacaccgcgccgtcgcccagttgatagacgtggcagccgctgaccccgttatgcgttcctccgccaatgatgatgcccgtcgtgcccacgttgcgcaccgtgcactccgcgatcaggttgtgggcccctcccttcacctcgatcgccgtgccgcgaacgcattcgagcgtgagtccccgcagcgtgacgtatgaggtatccgccatcgagaccaatggctgctcgagaagggacacgacgacatcgccctccccgatcggctcaggaggccagaagtaaagcccccccgtcttgcggtcgagataccattcacccggcgcgtccagttcctccagcaggttgagcgcgtagtaacgcttgcccgccgagtagccgtagaccccgtgcggctcgcgcgtcgcgatcaccttcgcctgcgtgtctatggacgcgacctgctcgtacgactccgcccaatcccaggtccaatagccgtgcacccagacgtcgtccgcgttcgcccagcgattgggccggtcgccttcgtagttgaacttgcctccgccctccggcacgtccgcgatcttcgcccatccctcgttcggccaccgcgccaacgtcatcggcttgccctggaagaacaactccagcccagccgcatactccggccggccgaacccgcgcggcttcagttcgccgaagttggtgatgccttgggccttgagatccgcgcacagcaccttccctcgggccgctccctcgagacggcttagcacggtcggatcgctgaccggtatgaagccgctcagctcgcggccaccagtcaggacaacctgctcgcgcctgtaggcgcggtaggcaatggggcggtccttagtaccgctgtcctgcgccgtgagcgcaaaggtggtgggccgatggtatgtgccgccccgtatccagaccgtcaccgggcccggcaactggccggcctccttcagttgccctatcgcctcgcgcgcccgctccaaggtcaagaagggcttcgctctgctgcccgggttccggtcgctcccgtgagcggccacgaagaactcaactcgcggtcccggcgccgccaaggcctgggaacacacgaacgctacaatcgccgcaacgagaatggccaatctcattcgcgcctcctcgcacctccggctgtggttcttgagcgcgcataatggcacaggccgccgccgccgtcacctccaacactctgagcgccgcccatgcctgccgcggccggctcagcgacaccggaatgccgaaatcggccacttgtgagaacatatgcacccggtcgtcaccacgatgcccaacgacacagacgagattcgccggcaggttgaccaagccgtctacgagcaggagctgcagccctggctgccgcccacaatctgcgactgccacgtgcatgtcgccttgcccgagcactcggaccccatcagtcccgagagataccaggagatctgggccctcgaggtcgcctcgcaccagtcctgggggcaactgcgcgccacttatcgcggtctgtttcccgctcagggggtgcgcgcgctggccttcggcaacgtctaccgcgagacccacatcgaagccaacaatgactacgtgctcgccggcgtctccgatcctcgcaacaacgcctccggcctcctcgtgacccgcccggaatgggaccccgccaagatcgaggaagcgatggccgccggcttcctcggcatcaagccctatcccgacctcgcgccgcagggcacccacgaggtgagcatctacgacttcctgccccgcgcccacctcgctgccctcaacgacctgcgcggggttctgatgcttcacctcccgcgcgccggcaggctggccgaccccgacaacatcagggaagtcctcgagatcgctgacgcctatccgaacatcaaactcatcgtcgcccacatcggccgcgcctactgccttccgacggccaagcagggcctaccgcacttggccgacacgccaagcgtgtacttcgacaccgcggcccatctcaacgccgacgtcttcgcatacgcgctcgaaacggtcggccccgaccgcctgctcttcggcagcgacctccccgtcactttgatgcgcggcgtgcgcgagcacatgggcgagaagtacctcaactacaccgacggtccctattcctggaacgcgaaccgcaagacgccggcagaggaagcgcgctatacctattatctatacgaagagctgcgggcgctggtggccgctgtccagcgtgtcggactgggcctggaggcgatggagaagatcatgttctcaaactccgtaaggcttctcggaac

SEQ ID NO: 3560 - DNA, 15950 bp, synthetic construct
  source 1..15950: mol_type = other DNA
  misc_feature 1..15950: note = Synthetic
ccagaagaatccccgcgttcgagcgccgcaacagcgagcatacgacatcccaggttagcccggccgccgcgccgatgaccagcttctgcagtccaggtgcacccatcgtattcgtcggcagcgcaaagagtgagaagagcgtccatatgaggaacagtgagccgaatcggttgacgcccttcgccccgactgtcatgacaacaccaacgatgatgccgttgacaatccctcctgtcagcggcacgcccgttagcgcgttcacccccgacccgagcgcgaacgccaggacgaaagctgtcgcagcaacggccccaatgaagacatagtgcttccctgtcacaagtccactccctgcaccacctctacgaaggcctgccgtgctcgctgcgcactcgctcgtgatgtcaggcagaacgcaatatccccttcttgtctctccattttatctccaatcccggcctgaggccccacccgtccagtagtggcttatatgcctccttctccatggcttcccgcagatcgtcaccgtactggtcgaggtagtgtatgtggatggtgatgctcggcaacgagctgcttccctcatcattcctcactagctcgcccaattgcgctcggggaagctccaaccctttgaagcgcccccaggcatggatgcagtccgcaacggcaatgagcgcgctcagcggatatcgaccgaagctgaggtgcctgctgaacatctcatacacctctcgctggtggaacaaagccgcgtgggccgctggtacgtagactctagcgacctgttggagtctctccctctgattctctgcactctggccacttcgggcccagtcacatcccgcacagagcaccgcgaggctccctagggcactgtggtgtcccctggctgcgaaccgaagaacggcattgtcccaaagcttcccggctacacccagcgtgttgctcgtgaccagcagaagctcgtggagtgactcgatgaggtcgtgcgttccggtcaccaccatactatcagcatccgccaggccgtcgcccttgcagagcacgtggtagtcatggagtatccccgccagtagcccgatgtcgctctctgccagtgctgccggatgaaggccagtcgcctcagacccgctcagcctactgcctttgaagatcatatcccacaaatgactaggcgcctgtagaagacccttaccgacgtcatgtgccactgcggacagaagtagcccgtggcagagcgcgttcgcattccactccgtgatagtctgtttgccgccactcgtgctgcacgtcgcctgccagtagggcttgatggcttccgatgccttcttggcaacaagcggtatccgatcactcatcccgagcagggaggccatgtacagactcatcaagaagacctgcaggggatgcaggagctgcgatctcgtctgctcagcctcgtgctccaggcgcgctgcctgatgctgcgcctgcagccacacggtcaggccctcctgttgctctctgtgaagtgacagagcgttggcgagttcccgaacgaagcctttctcgtagtcgaagtagtcctcaacgtacaggagcctatctgtcagttcaggatccagccatctcgcaacgcacttgcgtacgcggcttggcgggaatgcggcgtcattattgcggcataggtgaaggagatattcttggagcttgctgtccaggacctcccgtatgcggaagaagtccgcgggatctgtgaagagtcgctgcgctaccaccatctggccgaacaactggatgatcaccgctgagcgcgagacgtggcttaccagtcgttctatggcagcctgttcgtcgccacttgcgagtttcttgtactcttcatgcctgccttcttgcagcgcttcctgctccgaagatagcgcaaacagacatgacaggaaaccgattgggtgcttgtggtccggaacctcgatcggcagatgcagcacgcctctcgaagctttgaatgtgttggccagcttcgggcctccgccgtcataccccggggcgttggtcgacgggtcatggaacttgaacacggagcctctgtctcggttgcactgcaaggctactatccactcgccaggccatttcgtcgcttcccaataccagagccccttcattttctctggccgcatgctgcccagtatcagcttgcggtaggtcctcgcttccgggggcacttggccttccacgcctacgaaattaccgctttcctcgaccacacagccgccaagcagataggcctggctcagatcaagagctgtgtagcccagcacgagcccacggatgaccctgccgccagcgttccggtagacgtcatacaaggcctggacaaaggcccttgtacccctggttacgtaatcgtggacttccttagcgtgtcttggcacagagtaggaggtggtcactgctcggacccgccatcgcattgactgcctacggattctaccagtagcgctgcagtgagttccgctgatccataggagaggtcggttcgtcgatggttaaagatgctcccgacaggataggagccgtctgcgctagcccacgcgcgcggctgcggattatgccaaccgaagccgaagttggcccacgcggcggccgccaacacgtggcggaatgcagtgtcacaagtcgagagtgtctctgctagccgcgacttaatgacggaacggaaccgctcgagccacgagggcccgaaccgtcgccaaagcctggagcagaaatacaggccctgcagagggtctccgtagtatgggcttgccttccaacagtcgctcgcctccagggctcgggacacgaactgctctactatgtcacgtccttgcccgacaaggtagagatagtagaggacgttgacgttcgagacccagtccacagtgttctcggagcttgggcggtcgaaccaggtgaagaacgtgccgtcgtccgtcaagcagcactccagatctcggacgcgggttgcatgatcgacgtccccacccaactccgccagaaaagcgagcatgaaggctgtgtcatccacatctgcgtggatgtccgacccacgcccaaagaaccgccaccgccagttgtcttctctctctgccatgaggaagtgcgctatcttctctgccgcttgccgtcctgccgagcccgtcgaggcactcagcaaggacgcgcctacgagagcggggaccgccactgtcttcactacacgcggccgactgtagtcgcctccgtggaactgcagagtcggcaaccagggagacgccatcacgcgacgcgataggtaggcaaagctgttctcgagaagctcgttcacagcgggcccccgcggcccagagcgccggtacccagttctcgaggtccgaccgttcgctcacgggactgactgacagctgtgttcgggcctcggaccgagtctcggggacacgcaggtatgcgacgacgagcttcgacaagcgcgctagctagatcgtccacagacatgagtctcggccggaagacaacgtgctgtccatcgtagtaccgccagtcgtgcgtgagcacacgtccctcctcctctagacgcgccgccagttcggtcccaggcaggggggtcagcgccagaaactgcgcgctttcaagagccgccttctcggcgaagccaagcgttctctcgacatcgtcagccgtctcctcatcgccgcccaggatgaacatcccatggatcttgaaaccccaggagtgaaggacgtccgcggagcgccacatgcggtcaagatcctgctccttacggtaggcggcgagctgggacgctgacgacgactcgaacccgacgcacaggaagtgagcattggtttccctcatcagactcaggagctctggatgccctgcgacgtcggtgcacacctgtgtgctccatctggcaggtaccagatcggaccgcaccaacatttccagcacgcctcggtccctggtgcaattggctccgaagttgtcatcacagatgaacagcggcttcccgcgcaaaggcgcgatgtcgtcccgtatccttcggatactcctttcccgtatgccattcccaaacatcttcctgacgctgcagaaggtgcagtgcttgtcgcacccacgcgaggtctgcacagggtaagcctcgatatcaccgccgtgcacaaggctgaaatccggtgtcggcacccggtccagatcacagcgctcatgggaacccaccacggcaataggcgtcggtgtgctgctgggcagtgcttcggccgcatcaggatctccgtcgatggcccggatcacgctcaagatcacgctttcagcttctccccgaacaactacgtccgcgtgctgcgcggcttctgcgggaaggaacgtcgggtgcggcccaccaaggatggttactgcacccgctgccctcgccatgtcacatgcgcgataggcttcatgggctgttgccgtaatcgccgagacgcccaccacatcggcgtgcttcaccgccccggcaaaggcaggatagtcgtcggagaggaacacctcgacgcggtatcctgcgcggcggaggattgtgcccagcaggatcagccctaggcgcggcacgcggtactgcaggaacggcgtcgggaaagagggcccaggctcgaagaggcatacattgcgaatgtcgcgtcgcccgccggacagcgcctcccgacgacctgtgcttgcgtgcaccaccaagccgactccccctgccgcgatgtgctctcagcggggccaccactagatccagctctggccccgacagagccctggaacgccgcacctagcctgggtggctccgtccgaactcctgaccacgctagggcgctctgagcttcttcggcacttgagctagcactcctctatgccggttctgaatcccgatatctggtccacctcagacgagagagaacggcgacgaccagggcctcgtcgcccgtgagatacatctgtttgtgcccataacaccggttctctctacaccatgaagtaccacatcaggcccaaccagactcggctacgccgggccggtctctggccctgatccaaacgcgacgtcgttcaagtcagccgcgagcctcctgccggaaccactcctcaagttcctcgtgcgtaaggaatcccacaccgggtgcaacctgttccccaatcgaggccacaatcagatcactgcacacaacagcctcgcgcactcgccactctgacgtagcagtggtagcgggtgctagcgccgaaagaaccttctgtaggctgcttctcaggtactccacgcggcggctgtgcttcccgacatctcgtctgagtctcagcctgagcctagcttcgtccttcggaacgaatgcgggagctcggtgcttcgcctccagcgcaaccacttctcgcctgttggcggagattccgaggacgtcgtaatcaccgagatcgggcgggaatccgagtccagggaaccgaccgtgcagatccagcctggtgtagacgcaggtctcgcagtagcggccgcagacttccgcggctatacgctccatgcggtcactgagcttctttcgccgcgtctcaagtgcccctgccacctctcgcgctgctggcagatcaaccggccacgtaccgtgtgcagcactccccagcagcaggttcatcgcctggtgcaccaggaacgggccgatgaagcaccgcgcttttcccccagagggaagcaaaaggatgggccgaatggcaagccgtgcggggcgcttgcgcatctcccgccaatctgatgggtcccagctcttcatctggtccggcccgagaagcaggctctccagtgcacgccggacatgagcaggcggcagttcccccgcttgcgcgaccgccgcaacgatgtcatctgcctgtatctcatagcaccattccgttgggatgccgaggacttgcgcgagattgcccaaagctgatccgaccagggctagctcagtgagcgtgaaccccaggtcctgaaagaaggcaccgtcgagttcctccagccacacctccgtgctggggaacatgaggcggtcgatctcttggcttacgccaatccccatcgcgtgagcggccctcctcagcgagtaacctgctcgcgtcagatcgatgaactcccagtctgccaagaacagatcgtctgtgatcgcgacactggccgctatcgtccggtagtggatggcgtcacttgcctgaacgaggacatccagttgctcagcagctgccaggagctcctccaactcccgcgctgacggcgctccgtctcctccgcctgggtaacacgccagggctgcttcagcggcgagacggcatgctcgctggaatcccattgccttgttcgtctctgctgacacacgctctacggggtcgtacccgatgcgatggccgcgggcgtgtgcgtgctgtctaacctgcctaaactgctcgtaaagggaacgctcacattgcgtgacaacggcatctaagagcaagccggttgggtaggcagcaatgacaccaacgaggtccgaccacagcgcagagattatggcgttcaggatcgcggtggcagacttcccctcgtagctacctggcgcccagtccttctcgccgatgatgcgcgcaacctgctgccgcgctcgggccctgcttcccggcccaatatcgatcggcgatacccaagctggcggctcctccacaggcagagtcgctgagaacatgctgaaacgtttggtgccgggcggcacgtgagtgttcaccagttgcgtcgcctgataggtgccttcatgtcgctggaaagcgtagccgatggcctgcagagccgcaagcaacacacgacgctccgccgcgttgccctgctgttcgtacagtcggcacagcctatcaacgtcgagcaggatcaccgcgtgcagtgcctcctcatcgagacgcgtcatccacttggtcggctcgccggacatacgcgccaccgcatccttcagcgacttcccgatgtcggttcgccgaacccagccagccggcatggcatccaggcgcactcgtaggccgggcggcaagacgtcactcaggaacctgtctagcgccgggccgagctcatccaggtcatagtagagggtctcgatcaccagtgagacgaggatcgcctcccggtcctcgagttcgcggggcggcggcgatgtcacccagatgtcgtgttcggtcgtccgcacccctgcggcaggatgccgcccatcacggcgcagtacaccataggcgcgtgctcccagcttctcctcgaccctccatgttctcggatgctcggccgacgtcagctggaacggccccaggctccagaactcgtggagcagtcggtgccgaagctctgtccagtcaccaggatgcacgacaacggcattccacctcttaccccccagcgagaacgcctggcgcgaccggaacatggggtaggagtcaagcgggttcatgctcatcaactcaccgccgtggtggcgcaattcccactcagcgcgcaggtaacgagccatctcatcccagctgtacgcgctctccacgaggcccaggaggtcccagcatcccatcatcttgtagctcgtcctgctggccgacccagggaaggacgcctgcatcacgccgtccggaccgggattggcatagagcgccacgcagtgcacccacgaggacccgccaccacctcctctggcggccgcggctgcttctgccaggacgtcgagtgcttcttgggcgtcctcgataggcaagcctgggccgaacaacaggaagagcaccacttcagaggcgctgactggtatcaccagatccaaccatcgctgatgcgcctccgcttgttgtggccacacctgtacccgaatgttgccacccaactcacgccggcacgtctgcgctatttggctatccaacgcgtattggtcaggatactgcttcagcctgtctgccagcagggagcggtacatagcgccgaaccgcccgaggagcgtctcgttgatagtccgcgggaggaggaacagaacccggtcgccgcttcggagcccccagtagctgggccacagccccttctcccataggtcggcgggccatccgtcggtcgcgtctccgtcatccagttgcgcgtctgcgagtgactggccaaggaacgcatcgcgttcctcagatgaccatgcggcgagccaccgatccagctcatgcaacgagatctgcacggcatcggtgacggcatccctgaactcctggggaggaagctcgattcgcccgaactctgtctctgcatcccgggcctgcgccaacagaggcgcaagatggtcgaggatgcggtcctggatctgcagtgccagggtcaggtacttggcgggatcggccgcgtacgcgcccaggtagtgctccgttagggggcggtggaactggtcgaagtaagccagacggtcatggggggcctcgagcccagatccgtagaagtatcggagactctgaccctcgaaccagaagcgcaccgtgccgtcatcgaggggcggcacgaaatcttgaaggtgcgcgattcccggcggaagagacccttgccagtcgcgtatgaggtcttccaacgctgccgcgtcctcaggcagcggcccgtcgtgcagccgtcctcggcgcgccagttggacccagtagggcccttggatggtcgcccagcgattgggcggccagagcatcagggacgctacgagcagtagttgttcacggcgctcgtcggtaggcatggcgacagactccaaccctcggttccttggctgctcgcgtccagcctgaggccatccgggagaaaggatagcactttgctcgccgagcgcccagacttgggcgcgacgtgtagggcaaaccgaggatgcttcttggatgggcggaggagcaagcggcgctgacacgaggatcagtctcggcagctgttgaatgccgtgacttggtgtggtgcgcgccgccggctctatgctcggccgctgtagccgccggtaccgcatgccccccattcgcgacggagccccaggctatgactccaagccgagggtagccgcagtcgggggctgcccggggccgtcgctcaggatgtgtcatcgccgccagtggcgctcctgctgcagaccgggacgatgtgcctttgcgtgccgttcacggcgacgttccggtgccagctacatggcggctgttccacattgcatcttgtggcccgccgggctgtcgcccacactggcagcgcgcacgcgcccactgaggtgagccaggcatggagacccgactcggaacctgcggctggtccttccgcgactggaaggggacgttctaccctcccggcaccaaggatgagctggcctactacgccagccagttcgacgcggtcgagatcgacagcacctactatcagataccctcagccaaggccgtggatggctggcgggagcgcaccccgccaggattcctgttctgccccaaactacccggcgagatcacccatgagaagatgctcgagggggtcgatgaacaggtcgctgcgttcaccgacgtgatctcccggctggcagacaagctcggcccgatcctcgttcagctccatcccagcttcgcccacgaccagctgccgaagctcgaggcatttctatcgcgcctgccggcgggattccgctacgcggtggagttccggcatcgttcctgggtggatcagtccgatgcccttcagctcctgcgttcactgaacatgggcctggcgatggcgcaacacccctggtacgcgcgtatccgcgaggcgaccaccgacttcgcctacctgcgactgctgggaagacgcgacgtgttcccggacttcggccgcgtgcaccggcctcaggacggcgctctgcgagagtgggcgggattcctgaagtcactgccgtcccaggtcacgcgcgccttcgtcttcgtcaacaaccagttcgaggggcatagtccggctacagtggaacgactccggacgttgctcgcgacctgagtgcggtggtgggagtatgacgccggttcccatcccacaactgacattgagactgcggcgctcgggacctccggcggcccgctccgcctcagagacaaaagcttggcgccccaggatggggcgccgggacggtccgtggaccgttgcctgcggacgaaagtccttgctgtaactagccggacaatcgtcgctctggtacaatacgtcgcttgtaccactccgaaggggaacctgtcaagggggtgtccgatgaaatccgcacagggagtgaactcaggcgacctggtcctcggcctggatatcggagcggcctcggttggttgggccttgatccaactccaagacgggatgcccaaggtgcttcgtgcgaccggcgtacgcgcgttcccggcaggagtggagggcggcgacgcgagcgcgatcaccgcgggcagagacgtgtccagcgccgccaagcgccgcgaggccaggtcgcgccggcgcttgctggcccgtcgcaggcaccggctcaccaagctcgcgctccttcttcagcaggcggggctcttgccgcaaggcgacgtggcgtccggcgacgcgctggtggggtacttcgaagcgctcgaccgggagctgttcccggcagacgcgcgccacgacaccccgcacttactcccgtaccggctgcgagcccgcgcgctagacgagaagctcgccccccatgagatcggccgcgccctctaccatctcgctcaccgccgcggcttcctctcgaaccggcgcgtcaagcccaaggcggcaggcgtcaaggagacggatgaagagaaggaggagggcaaggtcaagggggccatcagcgagctggcccagcgcatgcgagactccggcgcccggacgctcggcgagtaccttgccacacaggaccctgaggaaaaacgcgtccgcaatcagtacctcggccggaagatgctcgaggatgagttcgaccggatatgggccgggcaggccgagcactaccctcacctgctcaccgatgagctgaagcagcgagttcatcgggcaatcttcttccagcgccccctcaagacccagcgccatctgatcggcgactgcgatcttgagaagggacgcaagcgcgctccactggccctgctctcagcacagcgcttccgactgctgcagaaggtgaacgacctgcgagtgcgccccgccgaaggcgaggagcgcgagcttacacccgccgagcggactgcgctggtcgacgcgctggagacgcagggggatgtgacattcgcaaccattcgcagactcctgcacgtgcccagagaaaccactttcaacttccagaccgaaggtgagaagggactcatcggcaaccggacgggccgcaagctggccgaggtgtttggcaacgaacagtgggctgcgttcgcgccgacggaacgcgaccgggtggtcgaggacctgctgagcattcacaatcacgaggcgctcaagcggcgcgccgccaaggcctggggcctcaatgacaccgccgccgaccgctttgcctcgatcgccctcgaatacgggtactgcaacctgtcacgccaagcgcttgccatggtcctccccccgatggagcagggcattccctatggcacagctcgcaagcagatctacggcgagagcccgccgctgaccgccgcggccgcactgccgaggttggaggcggctccgttcactgtgcgcaaccccgcggtcgagcgcgcgctgaccgaggtgcgcaaagtcgtgaacgcggtcgtgcgggagcacggcctgccggcccttgttcgcatcgaactcgcccgcgacctgaagaagcctcgcaaggagcggaaggccatctcggagagaaatgccgccaaccggagggagcgagaggcggcagcgaaggagatcgaggaccttgtcggcccggacccgcgcaggtcggaccgggagaagtggctgctctggaaagagtgccgaggccagtgcccatacacaggcaagcccatcagccgcgacgccctgttcggcgagcacctgcagttcgacgtcgagcacatcattccgttcccccggtgcctcgacaactcgttcatgaacaagaccctttgtgaagtaacggagaaccgcagtcgcaagggcaaccgcactccctgggaagcgtacgggcatgacccggaacggtggggggagatcatcgcccgcgtgagaggcttccagggccaggccgcccgcgcgaagttctcccgcttccagaccagggaggtcgcgagcctcgaggatttcacgacccagcaactcaatgacacccgctacgcgtcacggttggcggtcgagtacctgggcctgctctacggcgcggggcgggatggtgtggacccgcagacccacaggaagcgcgtggaggcaagtcggggcgcagtgacgtatgatctgcgaagcgtgtgggggctgaatggcatcctgggcggcggcgagaagacgcgggatgaccaccggcagcatgccatcgacgcggtagtggtggcgctgacggagccgacggcgatcaagcggctgagcgacgcggccgaacgggcccccctgcagcgccggcggctgttcgctgacatggcccccccgtggcccgacttcatcgatcatgtccgcgccgcgatcgaagccatggtcgtttcgcatcgcgtctcgcgcaaggtcgccgcggcgctccacgaggagacgatctacagcaagccgcacttcgacgacgatggcaagcagtgggttcacgtccgaaagccgcttgaccagaacttctcggccagggatgtccccaatatcgtagacccggccgtgcgccaggcggtgcacaagaagctcgaggaggttggcgagaaggcgctcaaggatgtcgggaaccatccggcgcttgctaccaaggacggtcgccagatccccattcactcggtccgcctgcgagtgcccatcacgacagagcccatcggcactggtgcctcaggccgccacgtcaagctcggctccaatcaccacgtcgagatcatcgagaccaccgaccgaaagggccagcccaagtgggagggcatcgttgtgagcaccctgaaggcgatgcagcgcctgaaggcccggcagccagtggtccagcacgaccacaggccgggtaaggaactcaagttctccctcgccggtggtgagataatcgagctggatgcggaacaaggtaagaaggacggttccgatcggccctgctcggctgccgggctctacgcgatccgaacggtgtcagtgagcaagaccggtcgggtcgaggtggccttcgtgagcatcaaggacgctcggaagaaggctgacatccaggccttgggcgcgtggggcaggtcggacgtagacccgctccggagacggaactgccgcaaggtcgtggtgacgccttggggcgaggtgcggcgggcgagcgactgacgggggagtggcaggagcaagctcctgcccaacgggggtgggcgtatgagtgagcgggtcatcgacctggcggagggaccggcgcgcctcaacgtgcgcaactcctgcctggtcatagctcggcgaggcgaacccgaaacgacgatcccgctgggggaagtggcggtgctgctgttggcccagccccaggtggtgttgaccgaggccgtgcttgccggcctcgcagcagccgggggaatgctcgtcccctgtgatgccaagcacatgcctgccgggatgctgctgccgctggaggcccacttcacccagggcgagcggtttgccctgcaggcgcaggcctcactgccggtccgcaagcgtctgtggcagagcgtggtgaagacgaagatccgtgcccaggcccgagtcctcaccgaactcaacggccacgactcgggtttgtcagagctgctgcccagggtccgttcaggggaccccgcgaacgtggaggccgaggcctcccgccgctactggccagccttgttcgcggacccgcgtttccgccgcgatcgctatggggacaaccagaaccgcctgctcaactacggctacgcggtgctgcgcgcgatcgtggcgcgagcggtctgcgcggccggattacacccgtgtctgggactccaccatcacaaccgctatgacgcgttcgcgctggcggatgacctcatggagccgttccggccgatggtggatcgcgtgaccgcggcctactgtcacaagtacggcgcagacgcgctcctcgacaaagcggcgaaggccgctctgattggggcgttgatgaggcggcttgatgtaggtggtgagagtcgaacactgttcgacgtcgcgcaacggaccgcggcaagcctggcggcggtgttcgcgggcgaacgcaggacgctcgtactgccggagttgtgatgccagcgcggcgcaacctgtcaggttatagaagcatgtgggtgttggtgatgttcgatctgcctgtcgtcgaggcccgggcgcggcacgattacgcgcgattccggacgcggctgatgggggaggggttcacgatgctgcaatactcgatctacgggcgctggtgcccgagcgaggaggcggccttcacctatcgtcggaagatccgggcgatgctgccgcctaagggcgaagtcagagtgctgtcggtgacagatcgccagttcggaaaaatggaggtcttcgtcgcccgggcgcgggaacgccccgagaaaaggccggagcaactgctgctcctgtgaccccagaggagatctgaagcccccggagagcccgactccgggggcctcgattgtaccagagcggcgattcccgaccaactacagtggttgtactgggggtgagcgcacccgttgattgtaccagagcggcgattcccgaccaactacagtagttccgatacgagatgcccaaagaggaggattgtaccagagcggcgattcccgaccaactacagtgaatatatgcgcgtggtgcgactgtggtggattgtaccagagcggcgattcccgaccaactacagtctccctcgacgggcgctcctggggggcgtgattgtaccagagcggcgattcccgaccaactacagtaggccatcctactcaatgagcggttgcctcattgtaccagagcggcgattcccgaccaactacagtcgtggccgatcatcagaccgagaggcaaagattgtaccagagcggcgattcccgaccaactacagtgtttgcccgaggtgcaagcgcgagtacgacattgtaccagagcggcgattcccgaccaactacagtatatcggcatcgctgccgacaccgacctgcattgtaccagagcggcgattcccgaccaactacagtttccggtggacgctcaccgctcgtcgcctcattgtaccagagcggcgattcccgaccaactacagtgggttgccgacagacatcacccaacccgccattgtaccagagcggcgattcccgaccaactacagtgttcctgttgtggaacctcgccagggaagcattgtaccagagcggcgattcccgaccaaccacagtcaccaccgccgagcaccccatgcaacccgcattgtaccagagcggcgattcccgaccaactacagtgcgcggctcacgggagcgctccgcatcgtcattgtggcgtgccgcacgccacacagagaggcaccgacttcgagggcgcggccgcgtcgccgcgaacggcggcggacgttgccctgtgtggggctttcggccgccggctggggttgtgtctcggcgtgctgctgttcgcggcgctcttggcgcgtgtgggcggccggtcgggttcctataaggcgccgcccggactgcccgtcgggttctgcggtcacccacggctcaggactcttgccgaccagcatcgcttggactacactgcgcgtggcagcgggtggcgcggttagcagcgagaggaggaaagcatgacggaa

SEQ ID NO: 3561 - DNA, 14971 bp, synthetic construct
  misc_feature 1..14971: note = Synthetic
  source 1..14971: mol_type = other DNA
caacgtgcaccccccccgccgcgccggcagtagccacggcatgccgggccaccggggcgggcatgctgcggatgtccaggatgttcacccccaccgacatcagccccgcgatcagggcccgcttcagcatgcgggagaccaggtgcatgtcccgggaggtgaccacctccgagccccggtccaggtaggccccgtaggccgcgcccaggcgggtggcaaactcgggggtcaactcctggttagccaggcccttgatccccaggttgccaaacagggaccccggccacttggtgccccagatcaggctcatggtcaccttggccccgcggtcggtgatcttgttgggccacagtcgcaccttgggtgagacggtggtgccctcctccagccggcagcggtcccccaccaccgctccctcctgcaccagcgagccagtcttgaccagggtttcccggcccacgatcccgcccagcacccgggcgccgcgccccacaaagcacccgttccagagtaccgagcgctccacgctgccgcccgcctccaccacgcagccatcgccgacgacgctgcgaatgatggccgccccccggccgatcaggcaattgctcccgatcaccagcggtcccaccaactccgcctcggggtcgatgcgagtcccctcgcccacccagatggagcgccccaccagccggccgggcatctccacctccacccgctcctccagcacatccatattcgcctgcaggtactgctgcacgttgcccacgtcggtccagtaggtgtcctccggcatctggaagccgtagagaggggcaccgcgcgagagcagtagcgggaaaaggtcgcgggaaaaatcggccgggcgctcgggatccaaccgggcgaagatttcgggctccaggatgtagatgccggtgttgacgctgtcgctgaaaacctccccccaactgggcttctccaggaagcgctggatgcgcccgtcctgctcggtgatcaccaccccgtactcaagcggatcctgcacccgcttgagcaacagtgtggccaccgcccccttctcccgatgaaaagccaggggcgcggccaggtccacgtcggtgagcccatcgccgctaataatcaggaaggtgtcgtccaggtgcggctccaggcgcttgacgctgcctgcggtgcccaggggggtgtcctccactgaatagtggatgctggcccctaactcccgcccctccccaaagtaactctcgatctcatccgccaggtagtgcaccgtggcgtagatttcggtgcagccctgccgcaccagcaacctgaccatgtgctccatgatcggccggttcaccaccggcgccatgggtttcgggcgattgcaggtcaggggccgcagccggctcccttcgcctccggccatcaacacggctttcatgtgcgtgccttcgcctccattctccagcacccgtgagcgcgtcacgataggttatagcaatctgcttcgctatctgctcccaggtgaagcgctcccttacccgcctgcgggcagccgcggcccgcgcccgcgcttgctcggggtcgtccagcacccggcagatcccccatgccagcgactccgcattgcccgcataggtcgtgagcccggtcacctcgtgttccaccacagtgggcaggccgccggcatccgagaccactaccgggaccccggcggccatggcctccagggccacaataccaaagggctcgtacaggctggggaaaaccgctacctgggcgcaggcatagtacagcgccaggtcctcctcgggcacgaaccccatcagccgcacctggtcgcccacccccagcgccgccgcccgctgcgccaaccagcctgcctccggcccccccaccagcacaaagcgcgcctgcggatgccgggccagcacccgcggcgctgcttccactaacacgtctatgcctttctcgcgcaccatcctccccacgaacagcaccacttgtgccccggccggggcaaggttcgcgcgaaactgcgccagccgtcgccgctgcgcgggggagagcgcgagccggcccgggtcaaccccattagggaccacccgcaccttatccccaggcagggtgagcacccgccccacctcctgccgcatgaactcgctgcacaccaccacctgcccggcctcgtagccgagcatccactcggccccgtggatgtagcgctgcaggtcgttgtgcaggccgccgttacggccgtattcggtggcgtggatggtggctaccaggggcaggcggaaggcatgcttcagggtgcgtgcggcgaaggccaccagccagtcgtgggcatgaatcacgtcggattccgtcgccagggggatggccgcctccagcaggcccaggttgagttggtggatctgggtgatgaagtcgaggggctgtaactcagggcccgggttgcggtaaacccgcagccggctggcctccggctcgggggtgcgggtctgcgagcccgcggtaaccacctccacccccacgccctgcgccgccagggcatgcgataactcgtagacgtggcgccccagcccacccaccaggcgcggagggtactcccaggacagcatcagcacccgcacggttagcctccacccgaccccacacaaagcacacaccaccggccgggcccccactggggtcggccgcagcgcgggcagcgccgccagccctgcgcttcccgaaagcgccgcatccgggtgagcgaggcataaccccgggccagcacccgccctaactccgggtcggccgcctgggtgcgcagggcgcgctcccgctcccgctcctgcttgctcagcgcgatcgcctccaggtcctcccggcgggggccggccagcggcgccaccagcatctcgggctcctccggcaggggcttgcgctggcgtaccgcgccaaagcgcacgtcccggatcaccccgttccccaccacggccgccagacgctccagaatctgcggcttcatcatctgcagcacctgggcccaggaggaatcactcgcccgtaccatcaacaccccctccaccacgcgctccggctggctgtggcgggcattggcctcccccaccacctcctcccagcggctgatcgccgcatgctcgcgcgccctcccctccaggtcgtgctgccgcaggacctcccgcaccgtctgccccaggctggccgggccccgcctctgtgccatccccgcctacctcactcctccacctgcaccttgcccgccgccaccctcacccggctggcccccgccagcgccgagccgggcaggctcgccaggtcggtgcaggtaatcaccgcctgctgcccctgcagcacctcaaacaggccccgccgccggttggcgtctaactccgagaaaacgtcgtccaacagcaacagcggccgttctccggcatcctcggtgagcatcgccaccagccccagccgcagcgccaccgccgccgaacgctgttccccctggctcccgtacacccgcaactcatggcccgacaccagcaccgcaaagtcgtcccggtgcggtccggccagggtcaccgcccggcctcgctcctccgcaaagcgctgctccaactcctcccggatgcgccttgccgcctccgctgcggtgggcgcctccccccctatctcctgccctcccgccaggcaggggcgatactccaaccccagcaccagcccggtgccacatagattagcgtatgccggaccggccgcctcccccagtctgttcagaaatcgcgcacgcttgttgactaacttgccgccgagtgagcacaattgttcatcccagatgccaagcgcctccagcgtgccccgaccctcgcgcgcctccctgagcagccgattgcgctgttccaccacccggttatactggagcagggtccagtagtaagacttgctcaccagccccagttcggtgttgaggaagcggcggcgttcgcccggctccccccgcaccacctccaggtcctccaccgtgaagagcaccagcggcgccagcccgatcaggtcggaggccttggggcgcaccaccccgttcaccttgatctgccggctgccggcgcgggccagcgccacctccaactccagcgcgccccgctgctcggagtcgagcagcaggcccacgtgcgccaccgcctccccccagcggatgcactcggcctcactgccggcccggggggagcgcccggtgcaggccagggccaccgcctccagggcgttggtcttgccctgcgcgttgtcgccgtaccagatgttggggccgggcccgaggtgaattcgggccgcctcgtagttgcggaagttcttcagggtaagggttcggatttgcacgtcgggctgccgctgccggtgagatagggtcgcctctattctatcggctccggcccccgggcgccaccggccgcgccaggaaaccgccggaccggcccggaatagcgtaccgtgtgccgcaccggtcattctgagcggcagcgaagaatctcgcgctgcaggcgacccgtcccgaatctgtgcgacgagggaaacaccatgccattcctcctgctggtggtgatgatcatgagcgcgaccctggccggcgccgccggcctgcccggccccgccgttccggacggcctgggggtgaacatccacttcacgggcgcccccgctcgcgacctggacctgctgcaggccgggggtttccgcttcatccgcatggatttcccctgggcgggggtggagaaggagaagggcaagtacgattttgccccctacgacgccctgacggccggtcttgaacagcgcgggatgcgcgccctctacatcctcgactacggcaacccgctttacgaggcgggcaacagcgtgcagaccgaggcgggccgccaggctttcgcccgctttgcggcggcggcggccgagcattttcggggccggggcatcgtgtgggagttgtggaacgagcccaacatcaagcccttctggactcccgagcccgacgtcaaccagtacatggccctggcgaaagtggtcttcccggcgatccgggcggccgacccccaggccatctgcatcggccccggcacctccggcctgccccgcgagttcctgggcgagtgcttccgccagggcctgctcgacctggtagacgcggtctcggtccacccctaccgcaaccagcccccggagaccgcggcccgcgatatcctcgccctgcgcgccctgatcggccgctatgcccccgccagggctgacgtgcccatcatttccggcgaatggggctattcctcggtctgggacaagtacgatcccgcccgccaggggcgctacctgtcgcgggagttcctcaccaacctgagcctggggatccccctttcgatctggtatgactggcacgacgatggcccggaccccaaggagtcggagcaccacttcggcacagtcaccctggattaccagcccaagccggcctacctggcgatgcaggagttggtgcgcaacctgggcgggctgcgcttcgtccgccggctgcagtcggccgccgaggactacttgctgctcttctccgacgggcgccggcatgtgctcgccacctggaccctgctcggcggcagccacgagaccgaggccgtaccgggcatgcgcctgactctcaccgaaaccgttgcctacctcccgctggaccccctgcccaaggctatcgcagcccaggccgcctggtcggcgcgggcgcgctggcagggagtgcgtttgggagcggctccgggggagccgctctcccccgagattgcggtccaggtccgcaatcccttcccccaagccgcaccggtgatggtccgcatcaagcccggccccggcctgcagggcgctctgcaggggccagcccgcttcgtcctgcggccggaggcatcgcgcacgctcgtctggcggggacgggtctccgcccgcgcccgcgaggacctgtcggtggcggtggaggtggagtttgcgggcatccggagccggcaggtggtgccgctcctcctgttcaacccggtgcacctgcaagcccggcgcacgcgcggtggggcactggaggcctccatagacaacccggatggggatgccctgcaggccgctctggtggctcgggccggggaccgcaccctggactgccgggtgacgatgggcactgcccgcggccgggtaacgatgggcgaccaggatctgccggtgcgcgtggaggcgaaccgcctgacggtgaccctgcccctgcgcgcccggggcggggacaaggtctggctggcgctgcgcgagggaggccgcaccatcgccgccgaccatttccgggcggtcccggtccccgggctggacgttcccccggcctcctgccggcaggtggagggggatcgccccgagcgggcggccttctccttcagccgcctacccgattcctgggccatggcctacgactgcccgcccggctgggcactggcagtggcccccctgccccggccggtgccccttaccggctccccccgggagattggagcctgggtcaagggcgatggcaccgacgtgtacctctgcctgcgctataccgatgccgccggccgcacctttgagccgctgctggggcgcattgacttctccggctggcgttacctatccgcccgcctggatgaccccactaacgacctcgtggccggaccccccggccccctccgcgtcgccttcccggttaccattgatgccatcgtcctcagcgactcaaacaaggccgccgccaaggggcgcttggagatcgccggctgggaagcggtgtatcgggagtaggcatgccacctctctccctctcccctcgggagagggctggggtgagggggtggcgcctgctcccatatcgcccctccacgttctactaacccctcggcctaagcccgagtcgcggcttgcggcctctccattgcctgccctctaactccgaccgcgcccgccccggccggtaatgcactccggatagcctgacgcccctttggccggagccacactccgcaccaccccaccgggcccaacttccattcggccccccagggtggcccagcgccttgagcgggcggaagaagagcaccagcccggccaggcaccccagcgccagggtcgcactcacccaggccaggggcggctgcaggttgcgggtgccgatcaccatccccaccatcaccgccagggggagcccgttacccagggccaccacccccgcacagaccagggaaacgacaagaatgctggcgccgcgcagggccaggtagatcagcagcgcgagcccgcccagtactgccaggatgcccagcatagcctgcctccgtcaggtgacgtggtgcggaatgccggactgggggggccggtgcagggaggttccccgggccgcccggggtgtcctcctggcgggagcggcgcgggggacctgtcaagtcctggcttcccgctcgcagcactccggcgtgcggcgggagaagatgaagatgtagagcatctccaggaggccggcggtgttgaccaccagcagggtcaggtaccagggcaggtcacggcgccgggccgccttccacagggcgacggctttccagggcaggctccaggccagcagcaggcccacccaccagcggcggggccggcagcgttcgtccatgattgtctccctcctcgcaggatgagggggaggatagcgggggggaggagggatgtcgagagggactccggacagggagagcgggatttctcacccctcgccggctcgggattcgaaatgacacttggcggtactctccatactcgcgcaccaggtcgagggccaggtggtagttcgcgaagctcgggggtgccggacaggcgccgggggtcaatgttcccgaagagcacgatgtcccgcacgagacgcgagtcggcggtctcctccaccacctcgtgggggaagcgcagcgagaggtcaggcccgcccagcggcccgaaatccaactcgaacaggcgataggggtcctggtccgggcccaggtccccgtcctgtcgccagcggcggatggtgtcgccccagaagtgctcccacgtgcccacgcggtcagggatgccgccccggagggtggtcagaatgcgctcgcgggaggtcatcatgcctacttcaccggcgggtagacgaacggcgtggtggagagccgcagcggccggccgtccacctggtaggcggcctcgccgatcagcgccaggtagccgcccgccggcttggcaatctcgcccaccaacgctccgccctccagccgcagcggagtggagacccactgcgactcccgaaagtccgaggtggcgttggcattcagccacacccgcccctcgctgatcggcagggtagaggtcatgcgcagcgtgatcttgtccccgctctctccccactgccaggtaggctgggggaagggcttgcctgcggccacgtgccagaaaaaggccgtcagcccctccatcacccgggtcaggtccttctcgatcgagtgggtggtgttgggggcgtacatgatcgccttctcccccaccaggtcgttccagtacagcgtagccgcgtccgtcgcccagaactggtcgttggcgccgtggatcagcaacttgggcagggtgagcgtggcccggtaggagtaagggtccacaatcgagagtaacttctgcccccggggggtggcgaaccggggctggatgccgcgcttggtgtactcatcaatgctctggctgtatttgccgccgaacatcttgtactggtgcggcatctgcgccatcaggttgagcatgtcaatcaccatcggcgcaatgcccttcacccgcttgtcgccactggccgccgtcagccaggtggtccatccccgcttgctggcgccggtcaccacgaagccctggatatccaggccggccttctgcttgcacaccgcctggatggcatccatggccttgaccgcgctcttggccatgggcaacagcagcggccagtcgtcatcccccccatccaggtactgaaggtaggtgtgggcgatgatgtcgtcctccaccatccccccaaacaggggctggttgggcacgtgcgtcagcaacgccatgggcgcccctatgctgtttgccagcactggccccaactgcccctccagcccgcccccgctcttgcgggtggcggcgtcacccccacccccggatatcagcatcagggcgtggtgggggttggtgacccgggccggcacgaagatcgccaggttgtgccgccaggtgatccctttccaggtctgcgaggtgagcaggacgtcatacatggtggtgccgccgatgttctcctggccgcgcacctcccacctggtggtggcatcgggcctggccacatacttggccagggtgtcgggcggggcgggtagggccgcccacgcctggcaggccagggcgacgagcaacaggatggtcaggacagggctcaagcggcgcatcatcggtcctccggagagcagatggggaatggttcaaccatgccggggagaggacctgctgaggaccggcctgccgccatctgccatctcgagcggtaatcccgcgcttgcgagggaccccgtcgagaaatcccgccccccgtcccgctgccgccgaccaggcccggcgcgtggcccggactgcctgtccgttcaccggcaccgcgaacccgcgacgaccggccagttagagcggggcagagccgtgcgagccgcgaagagactaccgaggaagggcacaagccacgcaaggcccgtcgcgcacccccctatcggccgccgcaaacatgccgccccgcccagcccaaagtaaaaggcgccccactgggaggcgcctgggacgctcctcggagcgtcgcccgcggaacgaaagtcccttgctgtaattcgcaggacaatcgccgcctgagtacaattatactcttaccaaacgagcgcccatctgtcaaggggggaatatgggaactatgtccgaacgcatgcccgcggcgccctacattcttggcctcgatatcggcaccaattccgtgggatgggcacttgtcaatgtggatggcaccggccaccctaccggggcgctcgcggccggggtgcgggtcttccccgtaccagtcacgggagatatctcctccgggctggacaagccccgcggagcagagcgccgggccgcccgcctacgccgccgtatgctggcccgccgccggcagcgtctgaataaactggctcacctgctgcagggcgccggattgctgccgccaggcgcgctggatactccccaagaccaccttgccttcttcgcggacctcgacgcacgcttgttctctgcccaggagcgcaaggaggccccccatgtccttacctaccggctgcgcgcccgggccctcgacgagcctttgtctccccatgccctggggcgtgccctctatcatctcgcgcagcgccgcggctttctctccaaccgtcgccaggagcccaaggagggggatgaagaggggaaggtcaagaaaggcatcagccgcacccacgacgccatgcacgcggcaggggcgcgcaccctgggggagtatttggcgagccttgaccccacccaggagcgcatccgccagcgctacaccgaccggaagatgtaccaggatgagtttgccgccatctgggccgcccagcagccccaccacccccacctcctgactgaggatctccgcaagcgcgtcagccgggccatcttcttccagcgccccctgaaatacccccgcaaccgcatcggccaatgtgaccttgagcctcgttgcaagcgcgcccccctcgcgctgcttgccgcccagcgcttccgcttgctacaaaaggtaaacgacctgcaggtgatcacccctgatggcgagatttgcgcccttaccacagaggagcgtgccaaactggtgcatgccctggacacgcagggcgacctcacctggccgaaggtccgccacctgctggggatgacgaaggagcaccgcttcaaccatgagcaggctgatgaccggctcatcggcaaccgcactaacgccagactggtcgaggtcttcggcgaccgctggtgggccctcagtccagccgagcgggaggccgtggtggatgacgtgcgcagcattgagaagcccgagacgatcagggcacgggccatgcgccgctggggcctggaccaggccgcggcccaggcattggccgacgtgcgcctggaggagggctattgcagcctatcccgccgcgccctggccaaggtgctcccattgctggaagaggggctgagttatgctactgcgcgcaagcggctctatggcgagccccgcaatctcgagcccaaggattcccttccccccgttttgcaagcagtgtcggtgcgtaaccccaccgtgcagcgtgccctcaccgagagccgccgcgtggtcaatgccctcgtgcgccgctacggcaagcccgtgcgcatccgggtggaactcgctcgcgacctcaaaaagaaccgcaaggatcgccaggccatccacacccgcaaccgcgagaattacaggcgccgggagacggcgttgcgccagatcctgagtggcaccgacatcctgcgccccaagcccgcggatatcgagaagtggctcttggccgaagagtgccgctggcgttgcccctataccggcaagcctatctccaagcccgcgctctttggccccgccccgcagttcgaggtggaacacatcatcccccgccagcgctccttcgacaactccttcatgaacaagaccctctgcgagcatgaagagaaccggacgcgcaagcgcaaccacaccccctgggaggcctacggcggcgacccccagcgctgggaggagatcatcacccgcgtcaagtccttcaccggcagcgcggcccgcgccaaacgggagcagtttatgaccggggcgccaggcgggcgcgacctgctcagcctggacgactttgcgacgcgccaattgaacgacacccgctatgcctcccgcctggccgtcgaatacctgggcgccctctacggtgccggggccgatgccctggatgcccagggtacccgccgtctccaggcctcccgcgggcagatcacctatgacctgcgcagcgcctgggggctgaacaacatcctgggcggcggcgacaagacccgcgacgaccaccgccagcacgccatagacgccctcgtcgtggccctcaccgaccctgccaccgtcaaggctttcagcaccgccgcgagccgggcccccgggcgggcccggccagagttgcctccgccctggccgggattcctggatgaggtccgcgccctggtgggccgtctccacgcctcccaccgtgccgcgcgtaaggtcgccgccgctatccacgaggagaccatctacagcaagccccttgccggtgccagtggcaaaccctactcccacgtccgtaagcctctcgagagactctccccgaacgaggtcaagcgcatcgtggatcccaaggtgagggacctggtggaaaggcgcctgcaagacctgggtgaagacaatcctgccaaggccttcgccgacggagccaacctgcccgccttgcccgcaccgacgggccgtatggtcccgattcgcaaggtgcgcatcagcgtctccggtgccgtcttccccattgcccacggggccagacaacgccacgtcaaactcggctccaaccatcatatggaggtcatgcggacaactgacaaacgtggggaggaacgctggcatggcgtggtggttaccacctatgaggccatgcgccggctgcgcaccggcaataggcgggttatcaaccccgcgggcgaccccgccttcctcttctccctttgccagggcgaggtggtcgaactcgacgacggcccgcagggcgggcgcgccctctttgtcgtcaagaagatcaccgtgcgcggggagggagaaacagcccgtagcaccgtcggcatcgtccccctcaacgatgcccgcatgagcaccccccgcggcggcggggaaatcagagaactgcgcgagccctctgcggaggtgctgcgccgattacactgtcgaaaggtggtggttactccgctcggtgaggtgcggcgcgccggtgattgagcacatcattgcccttgacgaccagccggcgcacctcagcacccgtaatgcgctgcttgtcattcgccgggctgccggggagaccacagtgcccctctccgaggtcgcggtgctcctgatctccaatccggtggtcacattgacacaggccgtgcttgcgggtttggccgacgcgggcggggtgctcgtggcctgcgacaggcggcacatgcctgccgccatgctcctgccgctgcaggccaacttcgcccaggcagagcgcttcgtgcaacagacccgggtctccctcccccgccgcaaacgcctctggcaggccgttgtcaagtcgaaaatcagcgcccagggggctgtcttgcgcgctctctatggtgatgacgcggggctctcccgcctcgccgcggccgtgcgctcgggcgacactggcaacgccgagagtgaggctgcccgccggtactggccacgcctcttcgccgaccccgccttccatcgggaccgcgaggccgatgacgagaatcgtctcctcaactacggctatgccgtgctgcgtgccattgtggctcgcgcggtttgtgccgccggcttgcacccctccctcggtctccaccaccacaaccggtataacgctttttgcttggctgacgacctcatggagccttttcgccccatcgtagaccgcgctgtcgtacaactgtgccatgcccgcggcaggacccccccattggacaaggaagccaaagccacgctgctgggcgccctgctcggacgcttcccggtcgcaggggcaggccaccggactgaactgcgatcccttttcgatatcgcctccatgctcgcagccagcctggttggcatctttgccggggagcgcaaggccctcatcctgccccagtggtgggccgggccacacccatagggccccgcgcggagggccagggtgccacgcaagcgcttcatcctgtcggggtaccgtgccgtgtggctgctcgccatgttcgacctgccgattggctccccccaggcgcgccgggactacacgcacttccgcaattccctcctcgcccacgggttcagcatgctgcagttctcggtctacgcgcgcttcttccccaacctcgaaagcagccgcgcatatcgcaatcaaatcctccgcgccatgccgcccagcggcgaagtgagactcctcaccatcacagaccgccagttcggcaaaatggaggtcttcctgcgaggaatccgcactccccccgagaaacctctcgaccaactcctgcttttttgacccaccactaaggctgcacccgcccgcaatcaagccgatcgtgggcgggtgcattgtactcaggcggcgattccctgccaactacagtcgtgcgcttggttgcctgcccgccaagccaattgtactcaggcggcgattccctgccaactacagtgggattctcgcgccccagccatgtcatcatattgtactcaggcggcgattccctgccaactacagtgctcccgctccacgatatcacgcagcaccaattgtactcaggcggcgattccctgccaactacagtacgatgccaagagtctgcctgcggctgaggattgtactcaggcggcgattccctgccaactacagtggctccgctataccgtatagtgccatcgccattgtactcaggcggcgattccctgccaactacagtgtagtaccctgcccccgtgcggcaaattcaattgtactcaggcggcgattccctgccaactacagttggcggcagacgcgggtgaggcggctcaccattgtactcaggcggc

SEQ ID NO: 3562 - DNA, 14897 bp, synthetic construct
  misc_feature 1..14897: note = Synthetic
  source 1..14897: mol_type = other DNA
gtctgaggtcacgccgccggcgcaggcgacatcgcacatgtccgggtaggcgatggtatcagccatcagatggttcgtcttcactccggcatccgcgacgcatacccaggccgagacattttggatcgcggcgagcttcatgtcctggttccagtacccgcaggcgatcgactccacgaacgccttgtctttgttgttcgtgccgtagtgggctgtcgccaacgcgtcctggaggatcgaatccgtgatcgtccctccccagcccttcggccagccgctctggcaggggccccaccagttggcatagttccacgccccctcgttggccttgagccatcccagccagtccggcacggggtagatccacatcgcgccctgctgcaccttcgcgctcgggcaccgccacacatcccggttcttgatgtactcatccagcaccaccgggggctttatgtacggattgccctcgtcgtgaaggtcgcagtcgtcaggattcgattcatcgcccccaccgggcatggtcgcagcatagtcccacaccgcctggctgtgctccgcaggccagaacgtggtcgttgttgtcccccaggtacatgttgatcgccagcgcgatgttcttcacattcgaaaggcagactgccttgcgcgcggactcgcgcgcccgtgcgaataccgggaacaccatcgccgcgagtatcccgatgatcgcgatcaccaccaacagctcaatcagtgtgaaacctcggtaacgtctcatcattcgacctcgcctcctggtgtcaggtcatggaacacgtcgttgctccccggctcggcgacagcgcagcaccacccgatgtcgcgcgtctgccctcctttccggccgatggactcggcgtcacacatcacgggggaactctcggtcgccgagctataccaaaccattttagccccggcctggcccgccgtcattgtacgggagagcatgagtcttgtacgaatatgcagggctttgcggctcgcacgcggcctcagcgcccgcctcgcggaaccaccgcgtggcgccggtactcggccggcgtgcagccgtactgggcggcgaaatgccggtgaaggtggctggcatcaacgaatcctgttctctgcgccaccgcctgaatcggcaagtcgccatcgaccagcgcgtgcgccgcaagcgccagcctcgaccgcaggccgaacttcccatagctcatccccattgtacgccggaacgcctgatggaagcccgagagactcagccggcacgcctcggccgcctctttcggcgacacgcggtccccggggctggcatgcacgagcgccagcgcaggcacgatgcgcgccagatcgtccgaccggatcgctgccgtccgctgggatgaccgcggaggcttccagtcacgcaagagagtcaccagcagctccaccaactgaagcttgaccagcgtcttccatccgggtctcatggcgtcgatctcgcggcacatgcgccatccgatcccgagcacctcccggcgcatctccgccgaagtgacgcgcggacgctggcttgccggcagcgtgaagatgcccagcagatcgagttccggctcgatgtgctcctctagcacctcgggcaggaagcagactatcgccgagcgggcgcctgccttggtgatgcgccaggagtggggctcccacatgccgcccagccagacgtcgcctcgcttcgggctgaaggcgtagtcgccatagcgcagctcgtacccctccttcagcagaatgccgacgtccaggccccggtggacatggacctccagattcgagggttcggcgtctccgcaatccccccagatcggatcggccgaggtgaggtgatggtcatacagctccgccaacctcacccattcaggctgaccccgagacctattggacctcttcgtcggcatgcgcgctatccacccgagtcgtgggcttccccccgagcctgtcgacgatagaagctatctggaaactccgtcaggaggtggcagatagcttgccccaagcactcacgtgacttttcagatgacttctagcacgattccccgccgcgagcttggtccctgcccgcaggcggctgtggtgcagctcccagggctcgacgaagctctcggccaaacagtgatcagcagtagcgtctgacgaggatcgctgaggggcgcgccgcgctgcgcgccggtcagggaggcggcccttcggcgcgctgactcatcgaggccgcggcaggatgcagggctgccgcacgggcgaacgcgcgctgggcccccgctggatcgccggcagcgttcaatgccgcggagagcgtggcccatgcctctgcgtcctccggcgcgatctgaacggcctgctctgcgtagcgcacgctctcctctcgctcgcccaaccggccggcagcggcggcggcgcagacaagcatcacggcatcaggcgctccaaggcggacggccaggcgaaatgcctccagcgcctcgcccgccttcccgcagcgcagacatgccaggccaagattcgcctgggccgcttgcagccggggcgccagcttggcggcccgccgcgccggctccaatgcctgttcgtagcggcccgccctgatctcgcgggcgacgagggcggtcagcgcaagcccgttgctcgggctggcctccgcggcctcgcggatgacacgagacgcttcctcggccaaacccttcgtgtcgagggcctgagagagttcgatcgccagcgtggtgtcgtcgggcgcgagctgatgcgcatagcgcagctcgccgatggcctcctcgatgtcgttgcgggcgatgaagtgcatggcaagctcgcggtgtgcatacgggttgcgcggagccgtcgcgaccgcagccttcgcaatgtcgaatgccttggttgcttgcccgctgttggccagatgctgcgcctgtgccacctgctggtccgagcgagccatctccctctcccgctgcaggtccggcaagggagccgcgcagcaggccgccgctcccagcactgcacccaccagcagcacgcgcaacacgaacctcctcatggcacgcccttctccggcgacacagcggcctgcccggcgcggagcacctccgtccggcggtccttgtatcgccatgccacctcgtactcgccgggcagcagcgaggacagcgccaacacctccgacggaaccccctcgtcaccacgcttggcggccacgtagttggcctcgaccggcgcgcgcatcctctccgccagcgcttcgctgaaaccgtgtcggaataccggcgcgccatcgacgttgtccgggaggtcgcgtatgaagagcacgatcccgtgctcgcctgccgggagcgtgctcgtgagccgtgccgtcgccgtcaccacctgatcggccaggccggcggcttctcgccagggcagcacatacacgaccgtcagcactccggcggcgagaagcgcagccgcaggctggaacccgagccgcgatcggcgcccgccgccggcggccgcgacgtccccgaatagccaggcgagcgccaccgtgggaagatacgccaatctcgtgtcagcgagggtgcctgatacggcggtggcgaacgtccagatcggcgccgacatgatgagtgagtagccgaggtagaaccagagccggcgggccggcacgccgaccagattccagaccgaccagagcgagaacgcggtcatcgctgcgacagctactgcgagcaaaggcctccccccaagccccatgaggaaatccctgttcagcggatagaggaacacagcgagctgtgtcagcagggcggaaggaaatgctgtgttccagagagtgagcgggacatgatagccgcccattgtcccgatgaccgcgaggcgcaacgcgagcagcccggccgctagcacgagataccctccgacgaggcagacagccgttcgtctcccgacccgggcgggcccgagcgcgagcctgagcgcgacgacgcccggcagcgcgagcgccgactccttcgcgagcagcgcaagcgcgaaggcgaggaacgagctcgccactaggcccgcgcgcagccagggcgaaccggaggagagagcgacctccagcaggagaagcgagagcaggctcccggcggtcgccagaagatcgggctgacaggccgcccagaggacgggctcgacatgcaccgggtgaaccgcgaagagcaggcccgccagcgccgccgcgccgcggctgcccagcagccgcccgccgatcgcatagacgaggagcgagttcgccgcgtgcagcatcacgttcacgagatgatagccgagcggggccgcgccccacgcccgcgcgccggcccaccacaccagcccgctgagcggccggaaaaacagcgcgtacggcctgagcgcgagagcatccagcgcgctgtgcgcctctcgaacgcgacccagtatccagaagtcgtctgagaggaagccaatggtcagcccatgcacgaatgggagaaccgcggcgcaggcgatggcagggatgaccagcgcggaactcggcgcccagcctggctgcatagcggtcgcttgccctgccagcagcgcacggcgcgcgcctgcggcgacaagcagacagaggaaaagcgcctggtagctccacctgtatggcccggtggggtcggcgaagaagctgcacagcccgatggccgccagcaccagcacgaccgccgcgtcggcgaggcgccggtcgagccgccccggcgcggcagccgcccgggccgtgcggtccgagtgacgccttcgcccccttgccgcgccggccttgcttcccctcaactcgtggcctcccaacggggcggtgcagagcgtcgcagcccaccatcgctaccacacaatggcatcgatgcctacggacgttcgcgcaatgaagtaacattgggcgaacgtctttcttcaggcatttcgtggctttctgatgaatgtcgcccattacttctttgggcgacattcattggacgcgcgacgtgcagaggtattcggcccccctcggcgctcatccttccgccgcgcccctaccgcacaactcgcagaacgggacgaagccccaatgacggttgccaaatgttacttcatcaggcgaacgtccgtgccgccgaacaccgtttgacatggtgatgcagattgattaatatgcatgagcgagcatgagtcaggggagagccaagatggcacatcgtgtgttgcgcgtgccgatgaccaaagcccgcacccacctgggttccctggtgcgtgcggtgaacgttgagggggacgtggtcgtcctggagaaggacggcatccccgtcgctgggctggtagacatcgacgtgctggaggactacctcgagagcagagaccccgccctgcggcggcgcatgcgggagagcatgaaggcgtaccgctcggggcgcgcccggccggtgcgggagttcctggatgagctgaaagctgagaagtcacggtagcaggatggcgcgccgctaccgagttgtcgcctccagtggcttcgagcgcgaagtacatcgcctgcgcgcccgtctgcctcgcgtgtacgagggcctgctggaggccgtcgaagtcctcgagaccgacccgttcaacctggaggggcgcgccaacatccggaagctcgtagacgtgccgccaggcgaaggacagttccgccttcgcatcggtgactaccgtctgcgctatgacgtggtgggggatgaggtgatcctccactccatgcgccctcgtggccagagctatcgttagccgagcggttggaccgggacgataaatagggacagtcaccgactgtctccctcccgagtgacctcccgcggccgccctctcgaccacagtgtagcaccccatgcccaccccgtccacgaacactgagaccgcgcgacgcgggaaaccggggacgggaaacgggggacggccagctatcctctgcatcccaggctatccttccctggtgcgacagccttggcccggtccccagatcattctatagtagctgactgtccctatttccccacaacgcgcgtctgccggccggcgttgtcatagacatacgtcgtctgctgctcggtgtatctatatgtatagtgcgtcaggtagaagaacacagaggaacatcacgacattgctgccagccagatgcacaatgtgccgaaaactggctctccgagtttcacgcacccgcaagagcaccggccccatcactctactatacgtcacaaagacaatgaacggtgcgacgacgatgctcaacgtcacctgaatcgggtatcccctcatacgtgattcaaggaggacaacgtcaatcatatgcaggaccatcacgaagactgcactgagaaacgctgtcagccgtaccgaccgaggtttcaggaagcgccttgccatagcccacccaacctcgtggtcgtaatcgccgcccggggacaaccggggacagtcactatttgatccctcctcagcaaccctcctcgctcaggccatcgacccgaccggcgatcagggcgggtaccagcgcgaatctccatcggacgcccccatgttgcgcctccattgtcccacccggcgggcgcggggtcaagcgcggtctgggggtgggtgtgaccccaggtttctggtcgcggtcgcgggcgcttggtaggggcgagtcggtgactcgcccaccggaggcgggcaagccctgggcgacccaccgggccgcccctaccgtcttccgacgcgccccggccgccccccaagacagcgagcatccgctccacgcggatgctcgcgaatcgacttccgttcgcgccgaccctactgcgccatgatctcgatgaacggcgggcgcggaatctgagtcaggaggtacaccggggtccgcgccgagttcaccgtcttcaccacctggatgaaggtgtagctcccctccgaccagacccgcacgatcccatcggccgccgcccgcagcttctccagctgctcggccgggaagccctgcgggctcaccgtccccagcaccaccgacctgccaccgcggcagctcgaggtgagcgacgtgaagctggcgtttgcctcctccgccgacatgaaggcgaacagccgcgagacgttcacctggaaccgggcgttgctctcccccacctgctggcagatccggcccaggtcctcggtgatgggctgacagagcggcacctcacccccggtctcctccggctggcagccgaagaacgtcaccgcgcccgacttcagccccttgagcagcttctcctccaggcccgcggtcttgagcagcgcccgccagcgcgagcgagcatcgctctgcgcggcgatgcgcacgtagcggtcccccgcctcgagcgcctccttggcaaacccggcatcgaagatatcctgatggatgtcgacgtcgatctccatcaggtagaagctgccatacgggatgcccccgcccagcagatcgtcgagctgcgggatccccgtcgaggcggcctcttcgaaccggtagaacggctcctggaatggcggcatgacgcgcaggccgccctctcccatgaagtagatgctcggtatctggatgtgcggtgagccgcggctcttcagcacctcgatgtagcgcatccgatgacccatcacatagctgctggtgagctggatcaggcagtcggccacaaactcctccgcccccgtcccgacttgttcggcttcgcggagctcgcgggtgaggagggcggtcagggaggcggctttgagggcgttgacgagggcgtagacggattcgcggaacttgcgcggactctcggcggcgccctggaggttgctgatgctgtcgacaacgacgcgggtggcgctgatctcgttcagcatttcgtgcacgatgccctgatcgcggacgatgtcatgttggagcacgtcgggagaggtgaagagcaccttcagcttgccctcctcctcgagcgcgcggaaatcccagccgaagttctcggcatcacggtagatgcgctccgggaactcctcgaaggtgatgaagagcccggactcgcggtacttggagatgccattatagaggtactgcatgccgaggctcgtcttccccgtccccggcgcccccgcgaccaggatcgcatccccccgcaggaaccccccatagaggagttggtccaggccctcgatgccagtcttcactcgatccatccgtctctcctcagtccagccgtcaaggtatcagtgctagaagctgtttcataacctccatctgaggttatgaaacagcaacacaagccgccaggctccagcaggcgcatttcatgccagcgtctctggcaaacagccaggcggcggcggaagcgaagcttccgcggcgcgcccagcgtgggggctccctgttgcgggagcttcgctcccgctcggttatgaaatgcgctctaccagatgggaacgtcggaacctgcagccccggcgcgacatgctgcgctacggtcatcagcgccggcgcggtggaaggtaacggtagacatcggcgcccggatagctgatcttctggacgaagcgcctctgctccagcagctccagctctttctgcacctgctcgccctcgcgcccgacgcgtatggcgatctggcgcgccgtgttcacggtataggggttggcctccaggaaggcgatgagcttctccaggccgttcaccgaggcgacgagccggcccaggtcgccgctgacgcggtaggtgcggaggccgcggcggatgcggtcggcgaactggtggagcttctcggcgcgggcgaggacgagcttgcgcagctcgacctcatccatagaggcaagcgcgccttgctctttgtcgcgctgggcgaggtaggcatcggcctcggcgaccgcgccctccaggctatagccctgatcgagcgcttgcttgatgaggcagaccttctcgatggaggcggagtcataggtgcggctgccgccctggtcggcgggcttgatgatgcccttgtcggtccagtaagagagctggcgaatggagaccccgcagagctgggccgcctggccaatgcccagttccagacgttcgagaagcctgctgaggtcgatgggacgaacagaagacgatccccggtcgcgtgcgacatccggcatttgactctccttggctggtgcaagtgacaaacccaggcccgctccctcgccacagcggcacagaaggcgttgggatgctagcacagagatgtcggatggtcaagacaggcgtgtgcgggaaagtgagcatggagggacggcaagtcatccacagatgaacccgccggaggcggacaagcgcagatgaacgcggattggccgccttcggcggaacggcgggcgccctgcgggcgagagagtcgagcccccttcgccaaggcttcggggcccaggggattcgaaagtcgaagagtcgaggagaacggccaaggctaaccgcagattgcgcagattgcacagactggggaaccctccttcgccacctgcggcgggctacggcgggcaggctccggcgcaaagggaggggcgagagtagaaagtagagagtggaggggaacggcacgccccgccagaggcgggcgagcctgcgggcgagagagtcgagcccccttcgccaaggcttcggggcccaggggagtcgaagaggggaggggaaacggctggagggagggcaagtcatccacagatgaacccgccggaggcggacaagcgcagatgaacgcggattggccgccttcggcggaacggcgggatctgaccgcaaaggcaccctccttcgtccgcctgcgtcggactacggcgggcaggctccggcgcgaaggggtgatgaaaaagtgcggcgccccaggatggggcgccgggccggtccgtggaccgttgcctgcggacgaaagtccttgctgtaactagccggacaatcgtcgctctggtacaatacatcgcttgtatcactttggaggggaacctgtcaagggggtgtccgatgaaatccgcacagggagtgaactcaggcgagctggtcctcggcctggatatcggagcggcctcggttggttgggccttgatccaactccaaggcgggatgcccaaggtgcttcgtgcgaccggcgtacgcgcgttcccggcaggagtggagggaggcgacgcgagcgcgatcaccgcggggagagacgtgtccagcgccgccaagcgccgcgaggccaggtcgcgccggcgcttgctggcccgccgcaggcaccggctcaccaagctcgcgctccttcttcagcatgcgggactcttgccgcaaagcgacgtggcgtccggcgacgcgctggtccagtacttcgccgccctcgaccgggagctgttccccgcggacgcgcgccacgacaccccgcacttactcccgtaccggctgcgagcccgcgcgctcgatgagaagctcaccccctatgagatcggccgcgcgctgtaccacctcgcccaccgccgcggcttcctctcgaaccggcgcgtcaagccgaaggcggcaggcgtcaaggaaaccgatgaggagaaggaggagggcaaggtcaaaggggccatcagcgagctggcccagcgcatgcgagactccggcgcccggacgctcggcgactatctctcccggctcaaccccgaggaagagcgcgtccgcaaccgctacctctctcgcaagatgctgcaggatgagttcgaccggatatgggcggcccagttcccccacttcccggacgtccttgcggacgacctgaagcagaaggttcatcgggcgatcttcttccagcgccccctcaagacccagcgccatctgatcggcgactgcgatcttgagaagggccgcaaacgcgccccactggccctgctctcagcagagcgcttccgactgctccagaaggcgaacgatctcagagtccgcccgccagacagcgaggagcgcgacctcatacccacagagcgcgctgcgctggtgaacgcactggagcagcgcggcgacctcaccttcgaggcggtccgcaaggaactgaacctccccaaaggcgtcaccttcaacttccagaccgatggcgaaaagggcctcatcggcaaccggacgggccgcaagctggccgaggtgtttggcaacgaacagtggacggcgttcgcgccgacggaacgtgaccgggtggtcgaggacctgctaagcattcacaatcacgaggcgctcaagcgccgggcgacgagagcctggggcctcaatgagaccgccgccgaccgcttcgcctcgatcgccctcgaacacgggtactgcaacctatcacgccaagcgcttgccagggtcctcgccccgatggagcagggtgttccctatgccacagctcgcaagcagatctacggcgagacgccgccgctgaccgccgtggccgcgctgccgcggttggaggcggctccgttcactgtgcgcaacccggcggtcgagcgcgcgctgaccgaggtgcgcaaggtcgtgaacgcggtcgtgcgggagcacggcctgccgggccgtgttcgcatcgaactcgcccgcgacctgaagaagcctcgcaaggagcggaaggcgatctcggagaggaacgccgccaaccgcaaggcgcgagaggcggcagcgaaggagatcgaggaccttgtcggcccggacccgcgcaggtcggaccgggagaaggtgctgctgtggaaggaatgccgagagcactgcccatatacgggcaagccgatcagccgcgacgccctgttcggcgagcacccgcagttcgacgtcgagcacatcatcccgttcccccgatgcctcgacaactcgttcatgaacaagaccctttgtgaagtgacggagaaccgcagtggcaagggcaaccgcactccctgggaagcgtacgggcatgacccggaacggtggggggagatcatcgcccgcgtgagaggcttccagggccaggccgcccgcgcgaagttctcccgattccagaccagggaggtggcgagcctcgaggatttcacgacccagcagctcaatgacacccgctacgcgtcacggttggcggtcgagtacctgggcctgctctacggcgcggggcgggatggtgtggacccgcagacccacaggaagtgcgtggaggcaagccggggcgcagtgacctatgatctgcgaagcgtgtgggggctgaatggcatcctgggcggcggcgagaagacgcgggatgaccaccggcagcatgccatcgacgcggtagtggtggcgctgacggagccgacggcgatcaagcggttgagcgacgcggccgaacgggccccggcggagcgccggcggctgttcgctgacatggtccccccgtggcccgacttcatcgatcatgtccgcgccgcgatcgacagcatggtcgtctcccaccgcgtttcccgcaaggtcgccgccgcgctccacgaggagacgatctacagcaagccgcacttcgacgacgatggcaagcagtgggttcacgtccgaaagccgcttgaccagaacttctcggccagggatgtcgccaatatcgtagacccggcggtgcgccaggcggtgcacaagaagctcgaggaggttggcgagaaggcgctcaaggatgtcgagaaccatccggcgcttgctgccaaggacggtcgccagatccccattcactcggtccgcctgcgagtgcccgtcacgacagagccgatcggcactgggccctcaggccgtcacgtcaagctcggctcaaaccaccacgtcgagatcatcgagaccaccgaccgaaagggccagccgaagtgggagggcatcgttgtgagcaccctggaggcgatgcagcgcctcaaagcccgccaaccggtcatccagcgggatcacgggccggggaaacctttcctgttttccctcgccgggggtgagactatcgagctggatgcggaacaagatgagcggaagctctataccgtgcgaacgatctcagttgacagtggtggccgcgtcggattcgtcagcatcaacgacgcgcgcaggaaagaggacatcgccaaagcgcatgcctggtacagggagactatcaacggcctgcgcaagaggggctgccgcaaggtcgtggtgacgcctttgggcgaggtgcggcgggcgagcgactgacgggggagtgccgcaggttgggaacctgcgccactgtggcaggagcaagtcgcctgaggcgaccaaggctcctgccgaacgggggtgggcgtatgagtgagcggatcatcgatctggcggaggcaccggcgcgcctcaacgtgcgcaactcctgcctggtcatagctcgccgaggcgaacccgagacgacgatcccgctgggggaagtggcggtgctgctgttggcccagccccaggtggtgttgaccgaggccgtgcttgccggcctcgcagcagccgggggaatgctcgtcgcctgtgatgccaagcacatgcccgccgggatgctgctgccgctggaggcccacttcacccagggcgagcggtttgccctgcaggcgcaggcgtccctgccggtccgcaaacgcttgtggcaagccatagtgaaggcgaagatccgcgcccaggcgcgagtcctgaccgagctgaacggccacgactcgggtttgtcagagctgctgcccaaggtccgttcaggggaccccgcgaacgtggaggccgaggcctcgcgccgctactggccagccttgttcgcggacccgcgtttccgccgcgaccgctatggggacaaccagaaccgcctgctcaactacggctacgcggtgctgcgcgcgatcgtggcgcgagcggtctgcgcggccggattacacccgtctctgggactccaccatcacaaccgctatgacgcgttcgcgctggcggatgacctcatggagccgttccggccgatggtggatcgcgtgaccgcggcctactgtcacaaatacggcgcagacgcgctcctggacaaagcagcgaaggccgctctgattggggcgttgatgaggcggctcgatgtaggtggtgagagtcgaacactgttcgacgtcgcgcaacggaccgcggcaagcctggcggcggtgttcgcgggcgaacgcaggacgctcgtgctgccggagttgtgatgccagcgcggcgcaacctgtcaggttatagaagcatgtgggtgttggtgatgttcgatctgccggttgtcgaggccgaggcgcgtcacaactacgcgcgcttccgaacgcggctgatgggggaggggttcacgatgctgcaatactcgatctacgggcgctggtgcccgagcgaggaggcggccttcacctatcgtcggaagatccgggcgatgctgccgcctaagggcgaagtcagagtgctgtcggtgacagatcgccagttcggaaaaatggaggtcttcgtcgcccgggcgcgggaacgccccgagaaaaggccggagcaactgctgctcctgtgaccccagaggacatctgaagcccccggagagcccgattccgggggcctctattgtaccagagcggcgattcccgaccaactacagtttctctgtctgtggggtagcgcgctcctgtattgtaccagagcggcgattcccgaccaactacagttggtatacgaggggtgcaaggggtgagagcattgtaccagagcggcgattcccgaccaactacagtactgggaaccctggtcccccaacccctacattgtaccagagcggcgattcccgaccaactacagtttccgggtcgacgggtgctcggtcgaggtcattgtaccagagcggcgattcccgaccaactacagtccgggatgaacggcaggcccgtttccacttattgtaccagagcggcgattcccgaccaac

SEQ ID NO: 3563 - DNA, 14771 bp, synthetic construct
  source 1..14771: mol_type = other DNA
  misc_feature 1..14771: note = Synthetic
ggtcagaagatggcgaagatggatactgcatggaggtgcttcaggacgagcacactggttacccggctatgcctgagttgtctgctggcggtgactgccttgtcgtccgcatgggggcgggagatcaccgacatggtgggccgaaaggtgacgatccctgacaagatcaccaaggtgtacgcctccgacccctacaccaacgtgctgctctacgtcgtcgcgccagacctgtcgcttggcagtcagccgggatgcctgccgttccggcccgaggacaggcaattcctgcgaaaggagatcgctgggctgcccgaactggcaatgcagcccgtgctgtccagaaactcatctggctccctggacgctgccacagccctgagcgtggcatttccggcggtcgcttacactcctgcgctgagaggagccgaggatgggtggagataccgagttgagattgcactggctgggactaccggtgatcgccaccgcggcgcggctgccgtcgccgtacgcgacgcgtcccggggcagtgactccgagccgagggggtagccggagtcgggggtgcccggggccggcgtcacgggcggctgacaggggcacgcggctccagctcacccaacagacgggcgcccccggtggcgctagcggagcgcgatcttcgcctcagccgtcgcgccggtgaggatatcggtgaccgtgagcgtgtactcccctggcttgtcactgagcgcggaggggagggtgaaggtcccggcgccgtcctcgatgaggaggttctgcccgtaggcgtgcaggaacgctccgtcgggcccgtagacatggcagcgcaccagggcctggtcgcggcgcgatgacgtgaccctgaactgagggtggtccccgaggccggcggaggcgggaccggtgagggacaggctgttcctctgctccgccaggcccagcacgagcgcgccgcccaccgtgacggtggtcttcaccgtatcggtctggccgagcagctcgccagtgcgggcgtcggtcacgtggcactcccgcggtagccgaatggtgatctcctgccgggcgacgtcacccagcttctcgtcgcggtagatggtgacaccgtcttgcccttccactgccctggcgcccacattctcggtgacgatcgccagcgcctcggagtcgccgaagcgatagcgcacgacctgagcgtgagaaagcggccggccgtcggtatcgaggacctggacagcaggccggatgccgaggtgggaaagcacgctgttcaccagcgcgcggtagctgccactggtatcagcagtgacgctgctggcgtcggcttccgcccggcgccggcccgacctcccgtagcggtcgagggaggcattgaggtagaccgcccagcccttccccacttgcttcacgataacggcgtcagtatcgcctatcttgagtagggcggagccagtggtcccggtaacggactcgaccgcgtcgatcccctccagcgccccggcgctcagaccccaggccgcgccctccggtgtcaccgccacgggaccggccacgtgcgccagcagccgctggcccgaggacccagtggcaatcccaaagaagtcgttgagctcacctccctcgacccaggcgcagtgatcgtccatcatccccgcgcccgcgtcggcgatgacgatgccgccgttctcagcgaaggccgtgatcgcccgcacctcttcgggcgagagcgcgacggacagcggcatgatgaagacgcggtacttgccagatgccaacgccccctcctcgagctgcgcgtaggagacgaagtcgaactgcatgcccaggttgttgatcatctgcacccagccgttgcgggcgccggagatctggcggaggttacggccttgtgtgggatgggccgagccgtagatgctgccagcatgcaccgagggcatggagaagtggagggcaatgccgtcctgaagccgttcggactccgcgaacagccgccctaccccctcgaagcggagcgcctggaaggcctcgcccatgtcgcgggcggacctggaataggtgaagtcggggttgaggtacgagtacatccagaagatgttgggatagagcacgtcgtggatggcggcgttccagatggcgttctgcacgccgaggccggaggagccgtagccggtccagaagccgatcatggccccgggcttggcgaagcagcggtggaggtcccactggttgccgccaccgtaggagaggaagtcgtctatcacctggtcgaggcggcaccaatcgcagccgttgtaggcattggtgccctgggtgcctgagacggcgatgtggccctccggatcggcggcgaccacggcgtcgcgggcggcctggtaggcgcgggcgaaggcgatctccatgtaggtgcgatggtcggcccagggagcgaagttgccgctcgccgcggcctcctcagtagtcaggggaacgacggacgcccagtcctcgaagtcggtcttccactcccggttgagggcttccagggaaccgtaatgctgcttcagccactcgcggaacgcggcaagggtatgcgggccccagcagaagtcgaactcgtccccataggaggtgagggagccctcgtcacccacgaagtagtagtccatgttgtacggggacttcgacttcgccgactgatagcaccggtcgtagagatccttcagtatggcgggatcgtcgaagcacggggtgcgcgcaaggaatctcttatccttagtgcgctggtaaagctcgcgcttggtgttgtaggcgagggaggagaagtcgccggtgcgctggtactcggtgatcgcctgctccaacgcctcgggggtggtagggccacggcggtaccagtagacgccgaagtagctgttgggaatgtcgaggtcgttgtccacaccctcggaccaagttgtgcccgcctgcaccccggcggcgttcatgagctggaggcggagggcgctgaagtacggccggatgctcgcgaagccaaggctggcgcggtactcgcggtcgcgccggtgggccggagcgacgtacaccggcgcggcgcggagttcatcgacaatcgtcccttcgctgttggccaactgaacagcgacggaggcgtaccgccccaggaagttgtccaaaggatacgcgaaggcggtgtcagctgcggcgggcctcccctgcctgcacaagatgcgtccgagatcatcagacacctcgagacgcgcgctgaggttggacaagtcgcctgaggcgcggaccgaggcagcaagggtgtcgccgcggcgatagctggcgtcgctcattctcacctcggtgagcatcgcttgtttcggcactgtgatgctggtggcgccgcacgccagactggcgcccgtctcgtcacccgcttgtccatgcacgaccatattgagaaagagccggccgcccggccaacctcgcgtcggtcggaagtctgccatcggaatcgtgatggtgttgtctcccgctgccaccgtcttggcactaccatgagtgacgacccactcccctccttcgcttttcgcggtcaactcgagtccaaccgcacgcgcctcacctgacgtcagacgtatctccacctgctccggggtcgctgtcaggctcctgatcgtgaccccgttgtcgcggcccgcggcccagagaatgcaccgcgccagcagcgcgtattggtactcccagtagtcccagtagatgcgcgtcgcgacgggatctacgggctcgggcatgaacccctgctcgacgtaggcgagggctacgacgcggcctttgccataggtcttaacggcgatgacggggtagtccccggacttcacgagcacctcaccggcggcgcggtacctgtacagtctccggccgacgacgccttcaggaaggaggtcgagaggcagaccccgggtgatgaagtgcggctgggcgatctcccacttcccctgggtgatcgcctccttgttcagctcggggtagccgtcgtccttgaccgtgtcgtcagggcagtccacgaggggcgagatctcccagagacgcgcgtctccctccggctcgtcaccggcgaaagggtggttcttcacatcgccgatgaacgggtggatcagcaccaggcccgcaccttcctcgacgcggcgcaagatcgcgtcgcgcgaggcgcgggtcatgcgggaccagccattaaggccgggaatcaccatgacgtcgaagtgctcccgcccggtgaggtctctctcgacgtagccatagaccaccctgaagtcgtcccggtcgccccgctcctcgtggccgtagtagtcgccgatgccccagcagctgatgtcccactcacggtcaatggagaccgtggtgggatcgagatccaggcgctgcatcagttcaaccatgtcgcggccgtactggacggaggggatgaagaagcccttgatggggccgccggcgagcttggtcgcccagggaacgtgaggcgtcaccacctccctggagtaggtgatgtcgttcttgtggaaggaactgccgcctacacccgcctcctgttcggccgcgctctgcaccccgcggagcggcctggtggcgcgctcgaagacgacgggaagtaagctgccaccttggcccgcctggccctcgattctgctgccgtcagcgctgagcgtgccctcgatcgtggcgttggcggacttcatctccacgcgcagtactcggtcggtgaacgtgacaacgtcggccttggtgccggttccgggatcgttcatcgcgacgctggcggcgagcgcgccgtccgggcccttggagatgtccacgtaaagcttcacgtcggcgtccgcgatgacgagcgtgccagcccacaggcccgtgatgtcgggggcctcggcggcgccgccaagacctgcgacgaggatgaggacggcaaggctcacaatcattcgcctagagcgcatttcataacctcaaatcgggtggacgggcgcgacccacgctggcatgaaatgcgcctgccgacccctgtcgccctggctacgctgtttcataacctgctttggaggttatgaaacagcctctagtcatggttgctctacttctgtgtcacgggtattcacgatggtgagggggaagtcccgtcctgtccagagactcatctgggtcccggaacgcacctgtagcccagaccgtggtattctcgcccctcatgcatatccctgtgctgtgaggccgtgggtggagaagggtgtcggacgagggttggactgggtgggtctgcgcgtgatcgctaccgtggcgcggctgccttgccataccggacgcgtccgcgacggaaccccggccactgccctcgagccgaggacggagccggagtcggggatgccctcaggccggcttcacgggcggttagcagcgacaggcggtctcatccgggcgtagcaagcacactctatcgcgagttgacgagggtggccctctgacacacttcgggtagcgcaggcttcagcttgcccggctctgattagtctgcggttctaccatcaccttcatcgcccgtcgcgactccagcagctcgatgccctcggcgagttgctccagcggaacgcggtggcttatcagctccgccacccgcagccgccccgaggaaagcaatgctagagccgcatcgaaggtgcgcggatttgtgaagctgcccgtcagcgtgagctcgcggcgatagatgtcgtacggggatatgcctatccgcaccgccggcggcgccaccccgaagaagagaaccctactcgcctcgccggcaagtgacaccgcctggtgcgcggtgctctccgcgcctacacactcgatcacgcagtcggccccctccccgccggtggcctgggccaccacgtctgccaggccctgtgtccgcgggtcaatggtgtgcgtcgctcccaactgcgcagccatcgcccgcttctccggccccggctccgagacgatggcgcaggcggccccctggaacagcgccagttggagcatgatgagaccgatcatgcccgcgcccagaatgaccacacagtcgcccgggcgaatgccggcgcgctcgatgccgtggacgcagcatgacaccggctctgtcatcgccgccagatgaagcggtagatccggtcccaccttgtaggcttgtcgagcgggcacgacgcagtgggtggcgaaccctccgtccatgttcacccccagcgcggtcaagttgcgacagaggtggccgagcccccgccggcaaggccggcagacgccgcagtagatgttcggatcgaccgccacctgatctccagggcgcaggtgagagacctctgccccggtcgcctccaccaccccggcgaactcgtggccggccaccagcgggaataccgcccccggaaactcgcccggaaagatgtggacgtcggtgccgcaaatgccgcacgcgtcaacccgcacccgcgccgccccctccggcggccgcggcgccggacgctccaccatcgccaaccgcccgatcgcctcgaagaccgcggccctcatcttgtctgtttcggtccttgcgggttgagctgctcgacgttgagttccttgattgcgccctcgtgatagtcagtgcgagccggaaaccagccgatcatgggccccaccagcgacggcagggagctgccccggtaggtactgtagtctttgatcgtattgatccagtcgtcgagcgcactcttgatctcattcaccgatgccatgctcgcatcgcccctcggagcgccaaccatggtgttctcggcgatcgcttgggactcctgtgcgaggagacatgccaccgtggtcggcgatatgcggcaccagcacccgatagggctacccggctgactgctcggcccgccggcggcagacatccgattggcccccataacaccggctatggatgcagtggcggatgctcgatacctagctctcccaggcctcatgcactcgcttcagctcagcgaggaagaacgtctcctcgtcggtcccgtcgaactcgccgagatccttggcgagggtgaagaatccctggccgggtctgaggtcatccgtatggacgacgacggccgacaacatcggcctgccgcgggcacgctcagtcctcgacacctcgtccagcatcgccgcgagttcattgcggtgggcggggttgtccatgtcaaggccaatcacgcttgcgacgaagttgtatgggatggtggtcgcattgcgagccgccgcctttgccaggtcgtagattcgctgcgttcgttggtccatgcacttacctccctcggcgccgttcgcgactgcgtggaggtcttcgcaactgcctcgccccgccaccgttgggggtcgtagccgatatgggccgcccagggggtgtcccaacgctacttggcatccacagggtgtccggcggttcgatcttgggccggttctccccaggaacgcatccgagccaagacaagctgcgggtcgcgccgcctcccctacggcgactccagtagttccagcttcaggtcgcggatctgcagcgtgacggagatcggtgtctccaactcgcctttctcgatcgccaggtctccggccgcggtctcggcgggggtgtcggcataggcgacgagctgctgccacgtgcccagcttggttagatcgtagcggttcgtgctgaagttggtcagccacttcccggtgtcggcattgacgccgatcttggcgtatggtgccacctgggggtcgacagcatcggccttcatccagagcgagagccgatagcggctgaaggggaggaggccgacggcgacgctggcgacgttccatgcgttgccgggctctcgaccggagaggagcagcacgccctcctcgccccgctgcacctttagctcgattcccggcggggctgaccagccacccgcgccgttcgcgaacgtttcctggtacaccacttgctcccgccgcggggcacgcaccagccgcacttcggagaggccgtagcggccctcagcatcgcggttcgcgagcgccaatgcgatctgctcgccggtctcgggcttcagcatctccagcccgagacggtacagaccgggcggcgtaccagcgggcaccgacagcaggtcctggactgagatctcctcgcccggccaccagagcgtggtgggccggcgcgggaaagtgacggtgcgaacgaccgcctctccctgcgcgttcaccagcgaccagcgcaacgcgtagctgtcatagcagggggcaaccccggcgttcccccaggtttgatagagggcgagccggccgggggcggcgccgtcgaggtggaccacggggttgtgctgcaagccggtcagcgagaagcgaaagccgatgcgtcgggcggcgtcggggacgcactccttcaggtcggcgggcgggttcttcaactgatggtagctggtaatgttgaggtgcaggtagctgatcgggtcctccaggcccttccggaatgtctcgggcacgccccagcgcctctgcagcatctcctcgtacccgctgtggaactcatagttgcagacgacgccccgccttgagtagggtcggtagaagcggttgcccacatcggcggaggggccggagggggtgaggccgtcctgtcggaagtgcatatgatggagggcggcatagtcattgatggtgccgaagtcgcccacgttgaggaagacgcgggtgcgtgggaaggcgcgggcgaacgcgtcaatgatgcggcggtaggcggcgatgtacttcgcatcggtgtagcccgtcgccaccagctcctctggggtccagcgtgagagatgcatctcaccccactcgccgatggagccgatgtctatgaactcgaggccggcccgcccgtccaggtacctacccaggtcggcgatgaactgctcttggatctgcaggtaccgctcgtcccagaagaccgggtccacctgccgcggtacgtagaggccctggtggacgacgaagggcacccccttgtcgaagacccacttcgggctgacgtactcgcgttgggaatgcatgttggaggccatgaagcggaacgcgacccgcttatggagcttggtcacccagaagtcgaagatcggattgaagtactggtcgaagcggtagtcaccctcactgtccggttcgagctgggcccagtcgtcccggaagtagccgatggcgatgaggggcgtgtaccaggcgtcggcggggaggtcttccgggtcgagggttccatagaggtacagccccattcccgggttgacgagcgcagccccgctctgggcagggatcacggtctgcagctctggcgcggcagccgcggggaccatcaccagcaaacagacaagaagggcaagcacgagtgcgtgcactggcagtctcccgagggaagccaaggtggagaaggggttcgtctgggaagtgagctggacctgccatcggcgccagccatgagccggctgttccaccttgcgtcttgtgcccagccgggttgtcgcttacgcacgcatccgccaggcgactacgggcttcgcctatctgcggctgctgggccggcgcgacgtgttccctgacttcggccgcgtgcatcggcctaaagacgacgcgctgaaggagtgggcggggttcctgaagtcactgccatcgcaggtgacgcgggcattcgtcttcatcaacaaccagttcgaggggcatagtccggctacggtggggcggctgcgaaggttactggggagctgagtgcggcggcggaagtatggcaccggttcccatcccacagctgacgttgagactaccgtgctcgggacctccggcgcccactccgcgtcacagacaaaaacttggcgcccctcgatggggcgccgggcggtccgtggaccgttgcctgcggacgaaagcccattgctgtaactagccgggcaatcgtcgctctggtacaatactaaggagtcagtaccatatatccgagcgcaagtcaagggggtttgcgatgaaatcgcctcggcagtcggagtcccagccgcacagcctcatcctcggcctcgacatcggcgccgcctcgctcggctgggcgctcgtcgaggtcggcccggaacggccgcagagtatcaaagcgtcgggtgtacgcgtgttccaccctcctgtggacgagaagaagggcgacatcgctaagggaacggaggtgttccactcggccgcccgccgcgaggcccgcctccgacgccgtcaactcgcccgccgccgacaccgcctcgacaagctggcgggcatcctccaggaagccgggctcttgccgcccggagaccttagctccgccgacgctgcggtgcgctacttcgagaccctcgaccgcgaccagttcccccgagaggcacgccgggccaacccgcatcttctgccctactcgctgcgcgctcgcgcgctcgatgaaagcctcgcccccttcgagatcggccgcgccctctaccacctcgcccaccggcgcggcttcctctccaatcgcagagtcaagcccggcgcgcagggcgacgaccaggagaaggaggagggcaaggtcaagggcgcgatcggcgagcttgcccagcggatgcaagacgctggagcgcgcacccttggcgagtacctctcgcgactcaatcccgaagaagagcccatccgcggtcaaggccactacctcggccgcaagatgctggaggatgagttcgacgccatctggtcagctcaggccgcccaccatccggccgtactcaccgaagcgctgcgagacaaggtccaacgcgccatcttcttccagcgccccatcaagagccagcgccatctcatcggatactgcgacctcgagcggacccgccgtcgagcgccgatgtgcaccctcgcggcccagcgcttccgcctgctccagaaggtcaacgacctcctggtcgaggggcccgacggaaagcatgccctcaccgccgaccaacgcgataggctcctggaagcgctcgaagccgcccgccgcttgagcttcccggacatcaggcgcatgttctccctgcccagagggaccaagttcaatttcgagaccgagggcgagaagagcctgcccggcaaccgcaccgcccatgacctggccgcggtcttcggctcccagcgatggtctgcccttgcgcccgagcagcgcgaccgcgccgttgaggacctccgcagcatccacaaccgcgacgcactgaagcggcgcgcggcgaaggcttggggcctacaaggcgaagcggctgagcgcttcgccgaaatcgccctcgaagacggctactgtaacctctcccgccaagcgcttgctaagatcctcccactggtggagcaagggatgcagttcgccaccgcccgcaagcagctctacggcgatgagccgccccccgcagcggtcaccatgctcccccgcctcgaaagcgttctcgaggtgcgcaaccccgccgtccagcgcgccctcaccgaactccgcaaggtggtgaatgcgatcgtgcgcgagtacggcaagcccgatcgtatccgcatcgagctcgcccgcgacctcaagaagcctcgcaaggaccggcagcgaatcagcaggcagaacgccagaaaccgcgccgcacgcgaggttgccggcgaggagatcgaggatctcgtcggccccaaccccagccgcgacgaccgcgtgaagctgctcctctggaaggagtgcggaggtctctgcccctacaccggcaagcccatcagccgcgaagccctcttcggcgaccacccccagttccaggtcgagcacatcatcccgttcccccgctgcctcgacgattcgttcatgaacaagactctgtgcgagatcgaggagaacagacgcaagggcaaccgcactccctgggaggcctaccatggcactgaccagtgggaggcgattctcggccgggtcaagcagttccgcggcgatgcccgccgcgccaaggtcgaccgctttcagaccgaggaactccccggtcttgacgacttcaccactcagcagctcaacgacacccgttacgcctcgcgtctagcagtcgagtatgtcgccatgctctacggcgccggcgcggatggcgtggacccgcagacgcgaacgaagcgagtcgaggccagccgcggcgcggccacctcctacctgcgcgatgagtgggacctaaacactatcctcggcggcggtgagaagacccgcgacaaccataagcaacacgccattgacgccatcgtcatcgcgctcaccgacccggccgccatcaaacgcctcagcgccgccgccgcccgcgcccccgaggcccgccgccgccgcttcgcaccactgccccctccctgggagggcttcctcgaccacgtgcgcgcgctgaccgatcacatggtcgtttcgcatcgtgtctcccgcaaggtctcggccgccattcacgaggagaccatctacagcaagccccaactggatgagcgcggcaagccctgcgtccacgtccgcaagcctctcgaaagcatcacgaagaaggatctgcccgacatcgtagaccccgcggtgcgcgaggcggtcgccgcgaagctcgaagcgtttggggacaaggcattcaaggacagggccaatcaccccacgctgcgggccaaggacggccgcatgatccccatccacaaggtccgcctacgtacctccgtctcgcccgagcaaatcggcggcgacggcgcctactcccgcagcgtcaagctcggctccaaccatcacgtcgagatcatcgaaacccaggacaagaagggcaacgcgcgctgggaaggctgcgttgtcaccaccaaggaggccatgcgccgcctgaaggccagagaacccatcatccggcgcgaccacggccccgccaaatgcttcctcttctctctcgctggcggtgagataatcgagctggatgcggaacaaagcaagagacagctcttcgcggtccgaaccatcactgtgaagaggacgggccgcgtatccttggagtatgccgccatcaacgacgctcggaagaagaacgagattcaggctgccaatgcatggggcatggcggacgtcgatcccctgcgcaaacgccactgccgcaaggtcgtcgtcacgccgctgggcgaggtgcgcaccgccagagattaggggcttgccccacgtagcccctgggccccgtagccctggcgaaggggccttggcgaagtggggtggggtgatggaacgtatcattgatctggccgaggagccggcgcggctcagcgtccgtaactcgtgcctggtgatcgaacgaggggccgagccggaagtgaccgcccccctgggcgaggtcgctgctctcatcctcgcccatccccagcttcttctcacccagcccgtcctcgcccgcctcgcctccgccggcggcatggtcatcgtctgcgatgacaaacacatgcccgccgccatgctcctccccctcgaagcccacttcacccagggcgaacgcttcgcccagcaaacacgcatctccgaccccgtcaggaaacgtctctggcagagcatcgtcaaagccaaggtccgcgctcaggcgcgcgtgctgatggagctgaggggcgatgacgccggcctgggcgagctggccagcagcgtccgctccggcgaccccgacaacaccgaggccaaggcctcccgactctactggcccgccctcttccgcgacccgaccttccgccgccgtcgcttcggcggcaaccagaacactctgctcaactacggctacgcagtcctgcgcgctgtcgtcgcccgcgccgtctgcgcctccggactgcatccctccctcggcctccatcatcacaatcgctacgacgccttccgccttgccgatgacctgatggagccatatcgccccatcgtggatcgcgccgtcgccttctactgcgaggcctatggccccaccgtcgagctggacaagcgcgccaaggccaccctcatcggcgccctcctccaacgcttcgacgtcgagggagagaagcgcaccctcttcgacctcgcccagcgctccgccgcctccctcgccgccgtcttcgccggccaacgccgcacactcgtcctgccggagctctgaccatgccgccctgcaactcctcggggtatagctgttgggcaggagaggactttgttgcttcggtagctcgctgccgaagcctgatctgcgcaatccttgggccccgtagcgctagcgaagggggctgcggttactctgatcatgccccgtcgtagccgctcaggatacagaggtatgtggctcttcgtcatgttcgatctgccggtcgtcgaaatcgaggagcggcgcgactacacccgcttccgcacccgcctcctcggcgagggcttcaccatgcttcagtactccgtctacgcccgctactaccccagcgaggaggcgagcgtcgccgagcgccagcgcgtccgggccatgctccctcgcaagggccaggtcaggttgatgtcggtgaccgaccggcagttcggcaaaatggaggtcctgctcgccagaaaacgcgagcgggtggagaaaaagcccgagcagatggtgctgttgtagccccctacaagccgcagacgcccccaggaaccgaatcccgggggcatctattgtaccagagcggcgattcccgaccaactacagtcgatcagggaggcctatctctatgtccccaattgtaccagagcggcgattcccgaccaactacagttcaaatcgctcagctacgcccgc

SEQ ID NO: 3564 - DNA, 14552 bp, synthetic construct
  misc_feature 1..14552: note = Synthetic
  source 1..14552: mol_type = other DNA
cctttcgagccggatagaccgcagaaagcaggacaagtgccatcactgccgctgcggagatgaccgctgaggtgctggagtaattgagcgagaagccctcgagcagttcgtattggacgaggaagaacgaggtggtctggccgagtacatagccgaggattaccgcgaccgtgccgaataccgccgcctcggccacgaacagcgagccgatgtgcagcggggccaggcccagcgaaccgaagatgccgatctcgcgctgccgctcgtacaccgaaccgagcatggtgttcagtacgatcatcgcacagatgagcatcggcaccagtattgccccgaatccgcccactcggtcggcatcggacgagagcttataagtgacccgatcccgcgtggaaacatagatgggagtggtcagtcgggagagcagttcgtcgccgatctcgtcggccaacacatcggccgcctcacgggcagaccgcattgcttcggacagttcgggcgagcgctcgtcaacagccggggcctcggccctcaactccaggtaggtccaatattcacggggtacgatggacaccgagatgagggaggctccctgatcccggatgaagtcgaagggcagaaagacgctgttggccgggtccacatgctcatagctatcgacggtgtaggggttcaactcctgcccggcccgtcgcatccagctttcctgtcgccagtcaacgggcgtgatttcttctccatcgacgcctttcacatccgcgacaatcttgtcgttcaacagcccgaccacagggatgtttttcccatgcattcgtattctcggcgtctcttcgttcacctcgccggtgatacggtctggggcgatgttcaagtgtcttgcgacgcggcttccgatgatgatgaccggttcttcgtcatcttccctgaaccatcggccagcggtcaggatgtcgttcaccccggccagtgacggctcgtgcggaaccacccccgccactcctgcgcacaggaactcgtggtggaattcttctgtatctgcactttgcaggagcgcatcggctcccagccatgcccttggcaccaccttggccttgtcgccgaattcggcccgggacaactcgtacaggtaatctgaaatcggctgatagcgggggtcgcgcagtaagatgcccgggtagggcggggtgaatactcggccggttggattcgggttttcgtgggtgatctgctgcgggtccaccgaggtgaacgaaagtacggagaatgtgagcagaaccagcgtggccagagtgagcattgtgcgtgtgcgtcgccgccgcatgtttccgatgcccagcgcacaggccgcaccggtcgcactcatccgcttgaagtcggcgttctgtcggctgcccggcctttcgtgtaaccggcgaacttccagctcgaacctcgagcggatcatcatgatgaccagcagggcgagggccagggcgataaaggcgatgaggatcatcggggcgctgcgggtgatggcgaacgccggatgcaccatggcgatgacgatgaagacgaccaggaatacgccgaagaacccggcgattcgtttgttgacgctggggaagccgaacaggagccgctcgacaaaataggagaacggcaggagcaggaagagatagaagagaacgccggtcagaatgtcggtcgtcgtgccgcggacaatggggtaggcccgcgactgtcgggccagtgcccgctcagattcgacgaaatgtcggtcatagtcgagctcttcgcccgcctggcttgcctgttccagtgattggagggcgcccggtcggataatatctccggcttcgtcgcgggttcccgcgtggagttcgttgactcgttcgttatatactccgtgttccgccagggccctgatcctgtggtcgttcaggtaggaaatgtcccgggtcatcagaaagcgcgtcctgggcaagaggccatattccggaactgcgaagccaattccctgggcgtctgcgtcttcagctcggtaatcgtcccggatgttgagcaacgggagtcgattcccgaggaagccgccccggaacatcagtttgaatcgggtttcgggctggacatagacgacggcagtgggcacgccacggtgtattctgttgccacgtgggctgagtgaaagtccgtaaaaatccggtgtcgtattggttcgagcatcccacacggtgatgtcggtgaatgttccgccctgaagcggatcgaagaaccccatgacactgacggcccggcaccggaatatggggatgcttatttcgctgtacgaggtcgatggagtggcgtggatagggagttcttcggccccctgcgggcccaagtcgggagcgtgggtgatctctccacggccgtacatgtcagccgcttcttcgcccaaatcctcaatcaggtccggggcaggggtgtctgggtcatggaaccggaaggcctcgaattgaaatccggtccagccccagtcacgggtgctgttatgggggatattgagcagctcaaatcgcccgccttcgtcggcgatggtaaaccatccggcccgtatcccggcaaacgattgtggaccggcgttcgggatttgccccgcttgagggcgcgggaagtagcgaacggcgcagagggcgtggggctgggggatgtcggcagtcgccacgctctcccgcaggtcatacaataccacttggccatagacccgaatcgaatagtcgcggagcagggagtcatcgctcaggcgccggtcgtccattgctcgatactgagaacgaatctggggccgctgttccatgccggagacaacttcgcagagctggtcggcctgataggtaagccgtcggatgccgttgtcctgctctatcgcatcgaacgtatcggtcggggtgtcgacccgggttctggcggcgtcaaccgtggcaatggcgacggcttcgcgcccggcgcgctggatcatctcgccgtcgtacccgatgttgccgacgaaatagctgttcccctgtccctccagccggtccggctgcctcagcggatagataatgcgttcataaactccgcgctcttctccggcggttcggaccggcggacgggttcggcccatttcccatatctgctgcaggaggtcgccatagacgctttcaaaactgacgccccttcgatgttcctgaacggatccggtggtgaagaggccgaaccgatcgctcccggtggagaactctagagagtacatgatccgcaggcgcttgttcaaatcgatccccaactcttccaggaaagcccggtgttccaggaggcggaggtattcatggcggtgcatgctgtcgtggcggtcgtagtcctgttcccgctcgatagagaatctgagattgcggcgggttctggggctcatggcgccgaaggggaccatgtcaataaggtcgaacaggttggcgtagtttgagtgggagctgggtgatgtgagcaaccgctgcttgagcatttcgatctcggccagcatcagttgccgtaactcgtcctcaagcccgtccgcttcgcggatcaggtcggccagtctttcatatctggcttcccgtcgctcgacgttaatctcccggtcaatcagctcctggatgcgctcgctcaaggggtcgctggcgagtagttgtttcagtcggtcgaaatgctcgtgcggatcgaaatcaagctctttggcggccgcttcgtagatatcggccagctggtcgccctgctcgatatcttcagcagggggcagctgtgccgcaccgtccaacagagcctggacctcggccatcatccgatttcgcaggccggaatcgatgcccgatagaccggcgacctgtcggcccagcgattcggcttcctcttcaagcccatcccagggcagcggcctggtcgccaggttctcgatgttccggcgaagggtatctgtctcgtggcgcgccccgtcccgggtcatggtattgctccaagacattgcatcggcaaaccaagttgccccggccagcgcctggtaatgtccggcgaatgccacaaacatcacgccttcccggagtcggttttgcgtgaggtgttcggccagccgcagaagcgatgccatcgaactgttcgggtcggcgcccggcgagatgtcaggtgcgatagacatcgaatcgtaaaaggcggagaacgcctggaagtgcccctgctccagggtgccttcggtgccttcgaggaacccaacaatatttcgggcggtgcgggtctcccacaccacatcgctgtccaccgtcgcccgaagcagcaggtctacgtcctgttcccctctctctttcgccgcgagatattcctcctgtgccgcccgcacccggcggacgaggtctctggctcggaggtggccctccttcgagccgcgggtctcggggatccagaaacggggaatgttgacgggatcgtgcaggaacttcaattcggcgtgtcggcggagtgcctctttgccctcgcccggctcgacaaacagtatggcccgcgggccatattgggcgatcatctgccacttcgcgccggtgttgtgttcgatgacgacgatcgacccctcgatgggcagccccttcaagctggcgggccgcccgtcgggcgaataaaggaccgggccggtgacggggccgggcgtggatgaggtctggacccagttgggccacattggataggcggcgacgggcgtgtcgccgagcgtcacatcgcactttcgggtgatgggcacgacgacctcgaagggctgctcgacgacgtggtccactccgatctgtttgaaccgctcaattatgtaccgggctgccttgtcgcagccctcggtgccgctcagtcgggaatcgacgccgtacagcgccatcgccgcctcataggcggatgggtgggcgtccggatcgatatgctggggctcagagttcaccccgctgagagtcttgatctcttcttccaggaagagactggtcggcagttcgaagtcggccgatgcgggcgccgcccacaaggccaatgccaacccgagaatccacacgaacagaccaaccctcgctccgcctcgatgtgtgttcttcattgttgttgcctcacttccctctaatgaaggagcagatatgccggtcaagtacttcgcccccagactgtattgaacatcgcagaatagtcgccgtccagccccatcgacacccgccaggccccgacaatcagccagatgccggcgatcacaaagtggccgacaaggagaccgacgaagaacggaatcgccttctggaacaagctgccacccccatattttagcgcagcccgcttgatgaaccaaccgataaatacgctgaaccagacgccgcccgaaagtccgacggcgacgaatccgatcggatggagcggccaccagtagaaaagatgacggagcagcagcagcccggccataatgatcgcgcccgccaggccgctcaggtaattcggcgcgaacggctggtggatggcctcacgccggacgaaatcgcgctgcagcgtattgccgaagttgtggccgtgggcttccgccatcccttgctccagtcggtaggcaccttcctggtatgggatctggattgcccggacggcgaaaactgccatcaccacaatcgtgatcaggatgatgaaaccggtgaaacggcgtcgcaaattgcccggccggaagaaccggtccgacgtcatcatgaacggcatcatgtgaacgccgtagaaaagctggggagcaatgcacgcccaggtggtaaacgtcggagtcatgtacagcggcagccccaggaaggtcttgcccggtgtgccctgaaagccgaatactcccgcgatgaaccgctgcggcagagagtacacctgataggtacccgtcgggatgcccaactcgcacacgacccgcgtaaggaagatgatcgccaggatcgtcagtgtgaacaggaggaacgatatgaacggattcatccccatgattacacaccacaccaggatggcaacggccgagagcacgatgccccagaacgccccgaaataggggatcggctcctgggaatcgtccacctcgcgcccgacgaagaacgccttcttcacaaccgccgcaagatgccggcgtgccgagatcatcagggcgatcacaaacacgctcagcccaccgatcagccgcgtgccctcgtggatcagataaccatgcacgggcaaatagacctgccaggttgcaccggtctggcgcatatagacccgcagagcgaagtccaacagcacgaacacccagacgctgaaggaaatctgggcgggcaggagaaatacgatggcgatgataaacaggtgaagatcgagggccggcgggatcgcgctccacggctctgctgacagcagcggagccagcgagaagtcgctctggaagttgacgcccggcacctcgggccaataaacgtgaaacccctcgagcgtgaagatgcccacggccaaaaagaaaccgacccagaacagagggttccggaacattgaaccgccaggggtacctgcggcgtccggctcgaacgcattctcgaacatctcaacgtgcgggaacaacagcttctcgtggtccacccactgtcgccggagaacggaggcgatgcagaactggagcaggatcaggagcacgagcaggaccatccaccagaccagcggcccggtccacccgtaaaagcccggcggcgagccctgaaaatagttggctgcgtagaaatccgactcccgggccgaagcgatcgcacgctcgatcgcctgccgatccgccatcccgatctcggccgagtcgcgcagctgcttggacagtcgggcatacaccgaggcatcgtcggaaatcgtccgcacggcgttgtggatgaggccctctgtctgctcgaccatccgccgacggaccgaaggcgggagcgaactggcccggatttccgctgccaggtccacataagtcagcgcccgctcccggccgaacgcctggtcccaatgccaccagttatgttccaggtcggtctcctgcgccgcaaggatcgccgtctcaaggccttcccaccaggtttcgacctcggtgtccttgatctcgtcggccatctctcccatctgttcgaggacgggcgcggccgactcgccttgctcccagagagcggccacctcttcgatcatctcccgcatggccgccgcccgatcccggtccagcggctccaggcgttcgagccggtccaacatggcgccgatgatcaggccgttcagaagctcggtgtcttcagctccgtcgagttcccccgccttctcgatggcgacagccagcggatcgagcgcctgttcgcgtcctccttctaatatggcgagaagggcctggtagtacggctgctgcgccccttggcgcacccgcaggcggtcgatgtcctcgagaatctcgtcgcgcagcgccggctcgaggtcttcggccgtcctgatcgcttcggagagatcgtcatacgccgccagtcgctcctcccggtactcgggcgtccatcgccaggggggaaagagcgtatctgtctgtcgttcctcctcgattgcggtgcgcagctcgcgccgggtatccgtgctgatcgcccgggaccggccgagccggcggcgaatactgtcatacgcatcgagcgcgtgttcgggaaacacgggcgtctgcggttcgtagataaagctgatgttccccttgaggatgtcgacctccgccagcatcctctcccgcagcggctcctcgagctcctcggcctcgcggatcagttcggccagcccgtgatagtcttccagccggtcttcgcggtctacaccgtgcttacgaatccagcgccaccagggcgtccgcagcggcgggggctccagatagacccgcgcctgctggacgtgcggcggcgggttcagcgccggcatcgtcccgctcgtcgtctccgtcaccgcctgcagcgggagggtcggggcataccgcaggtccaccccctcgggcggtctttccggcacccccgaaaagaaccagttcaaattctcctggtactggtcggctgccatcgcccgctcgcggtcctcaatctcgtacggcaggatgcgttcgtcgagcgtccacagaaaatcatccgcatacccgctcgcctccgtcgcaccctggatcggggaggggagggcggtgaacaggttcgaaacgaggaaaagcgtccccatcgacaccagcagcgtacacagaacaaccgtcagctcgccgcggtccaggcccacccccagcttgcggacgaccatgttgatgagcagcagcaccaggaccgggaaaatcacgatcgccggaaggtggaagccggtcagtatctgcaggttgagccggagataccaatagggaaggaagtaggcgaagactgcgacaagaaccaagctgacgccgatcgcccgcaagctgaaccagcgctcgccgccggtcctgccgtccatccgccccaaactgtcctggacctcaaaacttgcatcggagggttgcgacatattatgccctgctcaccaataggtatgaagttggccgaagcttcctggttacttgcccagaaactgaattatacctctgcgatcaccaatttcaagtcgcctcgaatttgccaaaaccacccgctcgcccgccacccacgcggaacctgcgtcggcgagccgacggtcgatctccaaaggccggccggggacatgcactcgcccgccgccactaccccgaatagagccccgccgccgccttcacctccgccatcacatcggcggcgatcgaccgcgcccggtccgccccctcggccaccaccttccgcacaacatccgggtcggcctggagctgctcgtaccgctcgcggatcggcgtgagcaccgcgatcatattctccgccagcaccttcttgcagtccagacagccgatccccgccgaccggcagccctcttccacccacgtgatctcgtcgggcgacgaaaaatacgtgtgcaggtgatacaggttgcacttcgtcggctcgcccggatccgtccgtttcacccgggccggatcggtcaccgccgtcgccagcttctgccggaccgactccggcggctccgtcacaccgatgtgattgcccaaactcttgctcatcttgttcaccccgtccagccccatcccccgcggagccttcgaaagcagcggctggcactcggggaagactggcccgaacgtgttgttgaacttgcggatgatctcgcgagccagctcgaggtgctggacctggtcgtcgcccaccgggatcacctcgcccttgtacagcgcgatgtccgccgtcatcagcaccggatagttgaacagccccaccttcacgtcccccccgatctgctccgacttctgcttgaactgagtcatccgggccagcgagcccatcggcgtcaccgtgtccagaatccagcacagctcggcgtgctcctggacctgcgactggacgaagatcgtgcaccgggccgggtccagcccgcacgccatattcaccgccaccgcgtcgagcgtacgctgtgccatcgccgacggctcataggggaccgtcatcgcgtgcaggtccacaatgcagaaaaagcagtcatactcatccagcatctccgcccacgtcttgatcgcccccagataattcccgatgtggatatcccccgtcggctggatgccgctgaacgaacgcttcatcatctctcctcaaacacaaacagaatgaccagggcagattctacccaaaacccgcccccaagaaaagccccgcaaagcactggtcatcgaagataaaacggaatgtcgaaaaaaaagcgcgccacgagggacgcgcataggtggggctccgtagagccatgccttacagcgaaaactcgctttactgtaacttgccgagcaatcgccgctcaggtatactacccataacatagccccgggagactgacatgtcaaggagtttttgaaatggaatcgaaaagggacggttcgcgttggctgggtatagacctgggatccaattccatcgggtgggctttgctcgacacgcggaaagacgacgcggccgagatgatcgacgcaggagttcgtactttcccagccggcgtcgagggcgacatcgacagtgggcaggacgcgtcccgaaacgtcgaacgccgcgaagcccgacaacgtcgccgcatgacgatgcgacggagccgccgcaaagcaaagatcgcccgcacccttcagcgagccggcttgctccccgacggagacgtgaccgatcctgtccggcgcgacacgctcctcaaagaactcgaccagtccatatatacgaaatacgaccgcgtattggatgacgattccccggaacgagcagcactcgagcaactcccctatttcctccgggcacgagcactcgaccacaaactcgccccccatgaactcggacgcgccttttatcacctgagccagcgacgcggatacctgtccaaccgcaaagccccgccgaaaaaagacgagaaggaaggcgaagtcaaaaagggaattgccgaactctcccgcaaaattgaaaacgccgaagcgcgaaccctgggcgaatactactcgaaggttcgacctgaaaaggccgacaccaagcggatccgagaccggtggactgcccgggcaatgtaccagcgcgagttcgaccgcatctgggaggctcaggccccgcaacacccgaatcgcctgactgacgggttcaggcacaaactgcataaagcgatcttctaccagcggcccctcaagagccagcgtcacctcatcgggccgtgctccttggagcacgggagacgccgcgctcgttgggcgctgcaccactgccagcaattcagaatgctccagcgagtcaacgacctcgaagtaacggacccggaaggcgttaaacgctccctctctcccgacgagcgcattcgcctccttgatgctctcgacaccgacggggacctcactttcggagcgatccgcaaattgcttggcctgagagggcatacgttcaacctcgaaggcggcggagaaaagaaactccccggaaacagaaccgctgcccgcatcatcgaagcaatcggtgaggcccgctgggacgggctcacgtccgaagaccgcagcgcattggtgcaggacctcatcagcatgcgaagccgcgacgcactggcccgccgggctcagggcgcatacggactcgatgaagagaccgcaaacgaactggccgacgttcgcctcgagatgaccttctgccgacactccaccaaggccatcaaaaaactccttccgctgatggaaggcggcgtcccataccgcacagcagtagaagagatatacggcgaacagggcccgttcgccgagccggtcgacgcgcttcccccaatttgcgaagtggatcccacactacgcaacccggctgtactccgcaccctcaccgaactccgcaaggtcataaacgcccttgtccgtcgccacggcaagcccgacctcatccgcgtcgaactcgcacgggacctcaggaaaagccggagtgaccgcgaagatgcatcgaaacgcaatcgtcgaaaccagaaagctcgggaagacgccaaacagaaaatcatcgacgagatcggcagcgacccgtcgggacgcgacatcgaaaaggtcctgctcgccgaagaatgcaactggacctgcccatatacaggccgcaccatctccatgcgggcgctggtcgggcaaactccccagttcgatgtcgagcacatcatacctttccaccgctgtttcaacaattcgttcttcaacaagacgctgtgctaccacgaggaaaacaggagccggaaaaaaggcagcaccccttacgaggcgtatgcgggcagccccgacaactacgccgccatcctcgaacgtgtgaaaaaatttcaggggagcgccgcccgcgaaaagctccggctgttccggatggaagacctcgaaccgctcgatgatttcgcatcccgacagttgaacgacacacgctatgcctcacgagccgccgtcgaatatcttggcctgctctacggcggggccattgatcgcgccgggaagcgccgtgtccaggccacccgaggcgccgtcacccgatacctgcgcgacgaatgggggctgaacgccatcctcggcgacggcgggtcgaagtcaagggatgaccaccgccatcacgctgtcgatgccgtctgcattgccctgacaaggcccggcgtgataaagcgactcagcgatgccgcaaaacgggcagcccaggcagggaggcgtagattcgctccgattgagccgccctggccgggctttctggacgacgtgcgaagtgccatcgaaacaatcaacgtctcccaccggcccgaccgcaaggtcagcggtgcccttcacgccgagaccaattacagcccgcccatcgtcgagaccgatgagaacggtaacaccgtcgaataccaccgcgtccgaaagccgctcggggccctgtcccgcaaggcaatcgagaaccagatcgttgacgatgctgttcgggaggccgtgctcgcaaaactcgacgaattgggcggcagctcaaagaaagttttccaagacccgcagaaccatccgcaacttatcgcgggcgacggccgcagaattcccatccacaaggtccgcatccgcgtgcccgaaaaggcggtccccgtcggctccgggcaccgccgccgccacgtcctgaccagagcgaaccaccacgtcgaaatcttcgagacgaccgaccggaaggggagggcaaagtgggacggcgaggtagtcaccatgctcgaggcacatcgccgagtcggcgccggggaaccggtcgtccgccgggaccacggccccggcactcggttcctgttctcgctgtgcggaggagacatggtcgaaattgatcataaggccgaagggcgcgcactctatgttgtgcgaacgattgcaaaggaaggggaaaaagaaagcattcgcttcttgttggcaccagcttccgatgctcgcagaaaaaccgacatgaccaaagccggtgttctggttcgaccagggcttgaatcactacgaaaacttaatccgcagaaggtaagcgtcgatcccctcggaatggtgaggcgggccaatgactgaccgcatcatcgacctgtcgggcggcccggcccaactgcacgcccggaatggcctgctggtcattgaacgggatggcgagccggacgtgaccgtcccgctgaccgaggtcgccgcacttgtcgttgcccatccgcgtgtgacgttcactcagtccacggtcagcgggctggccgacgccggaggtatcctggtgaccagtgacaaccgcttccttccggccgctatgatgcttccgctccggtcaaattttatccagacacagcggctcactgttcaagcgggtgcctcgaagcccactcggaaacgcctgtggcagcagatcatctgcgcaaaaatttgtgcccaggcaaaagccatcgaggaccgcaccggtacgccctgctcaatacgaaagatggcccgtcgggtccgatctggcgacccgaccaacgtcgaggcccaggccgctcgcaggtattggtccgatcttttcggcaatgagttccggcgggatccggaccgggacgaccagaaccgcctgcttaactacggatacgccgtcctccgtgcgaccgttgcccgggcgctctgcggctccggactgcacccgtccatcggcatccgacaccacaacagatacaaccccttctgcctggccgacgacattatggagccgtggcgcccaactgtcgacggcgtcgttgttgattggacagagcggcacggtgccgatgcgccgcttgacgcccaagccaaagccgctcttatcgagcggattaccggccggttcgacctcgacggttcgtcgaggactttgtttgacgtgctctcccggacggccgcgtcgttggtggccgtctatgccgggaaggaaaaggaactgaccctaccggaattctgacggtggcacggggaagcaaagaactgtcggggtacaaaggtatgtggttgttcgccacgttcgacttaccggtcgacacccgcaaggcgcgtcgcacttatacgcagttccgcaaactgcttctgcgggaaggattcatgatgctgcaatactcggtgtatgcccgatattgcccgggcgaggaaagcagccggtcatgccggcggcatgtccgcaacgcgctacccaactccggccgggttcggatgttctcagttaccgaccggcagttcgaaaaaatggaggtttttgatggaaaaagtcgcgagccggtcgaggaacccccgccccaattcatgcttttctgacggagaatgcggcccatcccccgcacccccaaggggatgcgggggaggcagtatacctgagcggcgattccccgcaagccacagcggtgtatgccgctcttctgctgccagagggagtatacctgagcggcgattccccgcaagccacagc

SEQ ID NO: 3565 - DNA, 14137 bp, synthetic construct
  misc_feature 1..14137: note = Synthetic
  source 1..14137: mol_type = other DNA
ttctcctcgccgaaggcgagccgcagattggtcatcacgatcctgaagtggcggggcgagacgtgcctgatgagggtaccgatagcgctcccgagtcggtagccagcccgcgccgggaggctgtggtagcggcgcgcgatccacaggagggccgcgttgcccaggcgcgtctgcatcctgcggtgccaggcgtagagagcagagcggccttccggcccgtacatcgcgggcgagccgggccgctcccgacgactggtattcacatcacgcgcttctcgcgcagcaggcaagtcagctcctccgagagggtcgggccgcccggccgtccggccagctccaccctcagggcccagaccggcctcaccagcgcctcctggggtatcctcaccgcatccttctcggtggtcacgacccagcgggcctccaccggctgggcccgcagtgcctctctcaactcgtccgcccggtacgggtaatggtccgggaagcgaagtcgtgtcaccacctccgcgcccaccttctccaggcttcgctcgaaggcgaccgggttgccgaggctggagagcgcgcacacaagctgtccgctgagctgctcgggctcgacctcgtcatcggttcccagctggcgcagcctcaccgggatgtgcgcggcctcccatacccgcgagcgaggggccaggctctgcacccgggcgcgaagcgcttccagatcgtcccgtctcaccaggtcagagtgggtgagccacactccatcggcccgtgtcaggttcgcaggtggctcccgcagcaaccccctgggcagcagataggcgctgcgcttgctggcggagccgctgggctctgcggctgccatcgcagcctctgtgcaatgatacccgaagggcatgagcgcgtccaccagcaccaggtccacgtctcgcgccagcctctggtactgaaatccatcgtccagcacgatggcgtccgcgcctagcttctccagggcgagggcgccggtgcgccggcggtccttgccgaccaacacgaacacctctggcaggagccgcgccaccatgtaaggctcgtctcccgcggccgtgacggggagcaatggtccgagcccttcggagacgatcagcgccctgttctcgccatgtccgcgatagccgcgactgaggtaagcaacgcgacgtccttgctcttgcagccagcgcgccacggccagggcggccgtggtcttcccggtgcctcccaccgtcaggttgcccacgctgatgaccggaacggggaatcgggtccgccgcgccaggccgagccggtaggctgtaagatgggccttcagagcgaggccataccccacggataggacccagaggccggccgcggcgaggcgctctgccggggcggtcggctcacctcgcaccacgcgctcccaaaggcccttaggtgacgagatcacggcgcggactcctgtcccagaagcgcgcaggccacctccgcgcagcgccgcgcggccccgcgctggcgcgcgatcagcactcgtgcggcggccgcgatgtcgacgcgcagcctcggatcgccggcgatccggatcagctgttgggccaggtcgtcggcatcgcggacgcggaacccgaccccggactcgaccaccaggtcggccacgtccgagcagttctctgtgtgaggcccgaacagcaccgctcgccccgcggccgtcggctccaggaggttatgacctcccaccggcaccagagttcctccgacgaacgcgaccgcggccgaccgataggcgtcgcgaagctcgcccatggtatcgaggacgactatcgcctcgggggaggcaggccttccatcgctccggcgcgccaccggccagccttgcgccgctaccagggcggcgaccgcgggcactcgctccagatgccggggcgccagcaggagtcgcgcccgggggaccgcggagcggagtcggcggaatgcagccagtgccgcctgctcctcacccgcgtgcgtgctgccggccaccacccatacctcatcaccggaaatgcccaggtccgaggccaacctctcggccgggctgctgcccggcgcggccaagctgtccaccttggtgttgccggacacggtgacccgatggtccggcaggccgagccggcgcagccgccgggcatcctgctcggactgcacgcagaagtggtggggaagggagtagagccactgcacgaaacctcgggcccagcgggcgcgcttcatcatcctgtccgatactcgtccattcactaccagcaccttcgcgcccgagaggcgggcgaggccgagcaggttgggccacagctccttctcggtgacgaccaggagctgcgggcggaggcgcgccagcgcgcgccccatgcagccgggtccatccaatggaaggtagaagaaggcgtcggcctggcaactccgacgggcgaggctcatcccggctgcggttacgctggacatcgcgatacgcgcgctggggagcgcggctcgcagcgcctccagcacgggctgggcggccatcacctcgccggcggagacggcgtggagccagatgcgcggccctccggagccggccacccgcggcacgaggcccaggcgatcgcgccaggggcccagcggcctacgacgaaacagcgatcgccatagtagatagcaagcgattgccggcgtggcggccagcagtaggaggctgtatgtgagcaggcggagccagaggagccggtactcacctcggtctgcgtgctctctctccggcggctcggcgcgcgggctcatggtgcgctcggcgcctcctgcctggtggctgagagttgggcctcgtagaggcgccggtaggcatcaccccggcgcagcagctcctcgtgccgtccttcctctgcgattcgtcccccggccagcaccaggatccggtcggcccgctggatggtggacaggcggtgggcgatgaccacggtggtccggccctgcatcagccgctccagcgccctctggaccagggcctccgactctgcgtccagtgcgctggtggcctcgtccaggatcagcacccgcgggtctagcaggagagcgcgggcgatcgcgatccgctggcgctggccacccgagagcttggcgccgcgctcgccgatgcccgtaccgtaacgttggggcagagcctggatgaagtcatcggcgttgcccgcccgcgcggccgcgcgaatctcctccaggctggcctcgggccgcccgtaggcgatgttctcggcgatggtgccgtcgaacaggatcggctcctgaggcacgatgccgatctgcgaccggagagatcgcaggctgacggtggccacatcaactccgtcgagctcgatgcgccccgcggtgggatcgtagaacctcgggatgaggctcaccaggctggtcttccccgcgccgctggcccccaccagggccaccatctgaccgggctcgatcatcaggtcgagcccgcgcagcacaggctcctcttcgcggtagcggaaatccacgtcgtggaaggctatcctgcccttcacccgcgccaggtcgggcgcccccggcgcctcccgcacctcctcgtgcgtatcgaggacctccaggatccggtcgcccgcggccgccccctgctgtgcggagagccagatcttgccgagcaggcctagcttgctccccaggctctggcccgcgtaggcgaaggcgatcagagtgggcaagctgagaggccccttgatcgccatgtacccggccacgcacacgaggatgagcatccccaccgcgcccacgaactccaccaggggtgtgagcagggagattgcggcggccacccgcaggttggcccggtagttgctgtcgttgatctcgcggaaccgtccggcctcgcgctcttccatcccgaagatctggacggtctccacgcccgacagccgctcctgcaagaaggcgttgagcgcgcccaggcgccgctgcatctcccgggagagcctgcgcacgcgttcgccggagcgcgcgatcagcagcgagacggctggcacgcaggccagggcgaagatggtcagacgccattcgagggaggccatcagggcgagcgcgatggcgatcgttaccggccctcgggccgcgtccaccaggtcggtgccaagcatacgctggagcacgacgacatcattgctgacgcgcgagagcaggtcgccggtcgcgcgggcgcggtagaaggtgagtgactggcgcagcaggtgctcgtagagccggcgtcgcaagtcgcggatgatgccctgcgcgaagtgttgagcgaggtagccgcggccgaaagcgaagaggctcttgaggaaccaggccgccagcatggcggcgccgaagatcagcaagctgcgcagccttccctccgcactgccggtctgcacccagcccaggcgctgaatccagtcgaggtgtgctcgccccccgagggccggcatcgccgcggcgggcgcaatggcgagcagcatgaaggcgaggagcaccgggatggcgccgttctcgaccagggcttcgccaaacaccgaccccagcgcgccgtaggccgagagacggcggccccgcgcctcggagagcacacgcctgagcactcccagggcgtgggcccggtcggccgacctctcagccccctggctcacggcttgcctccttgccgttcaccaatcccaacaccatctccgcggtgcgtcgggtggcgccggccggacccagacaggcgaccaccagcccgagatcggagcggaggcgcgccctccgcccctggtccgagagcagagacgccacctcctgcgcgatcgcctccggcgtggcggccgagcccagcaactcccgcaccacctcgcggccggcgatgatgttcggcatggcggcgaatcgctgcccgcccagcagcccgcggatcaaccgatactgaagcgtggtggcccgacttgcccggtacaccaccaccatgggcacgcccaggcacgcgaactcgagcgtcaccgtcccggagcagaccatcgccgcctccgccaactggagtgcgtcgtagtccatgccctccagcagcacggcctcgacgccggcgcggtggaggaccgccatcacgtgctctcgcgccagggaagcggccaccggcacgaggagctgaaggtcggggagctggcctgccaggcgccgcgccgcctccgccatcacgggcaagacgtagtgcatctcctgctgtctgcttccaggcgccagcgccaccaccggcctcacggcgtcgaggcggtagcgtgcccacgcttcttcgcgggtgatccgggggcgcgccgtttccaccaccgggtgccccacccactccacgcgcgctcggcctccctgcagcagatcccgcgaccagggaaacggtgtggcgatcgcgtccaccagatcgcgcacctcgacgttccccgcgcgttggcgccacgatcctggggggaagtagtaaagcgtggggagacccatccggcgagcggcacgcgcgagcagcatgttgccggccccgaagtcaatcaggacgagcgcggaagggggcgcctgggcgaggtgcgcgcgggccgcgcgcagggctcgccagacccgcggcaccttggtggcggcctcgaagaccccgatcgcgccccaggtggagctgtccgcgagcaggtcaacaccggccgcggccatttgtcggccgccgattccggccaaggagaggccgttccgcagagcgcgcagctcccgggccagcagccccccggcccagtcccctgaggcttcgcccgccgccaggaacacctgggctgtctggtctgatgccccccgctcgccgccctggtgatctgtcgggggttggctgcttggcatggctagctagcggcttcttgctgacgccccacccgaccgttgcgcatccgccagaggaaatctacgaggtagcgaacctccgggaagctgcccaactcttcgctgaccttctccaaggcgctggacatctcgatcccggagcggtagatcagccggaaggcccgctgcaccgcctgacgcgtctccggcgagactccggcccgacgcagcccgatcaggttgggcccgatcacccgcgcgggcttcccgtccaccaggctgaatggcggcacgtcctggctgagcttggagtagccgctgaccatcgccagcgtccccacgcgcacgcgctgatgagagcctaccatgccgccgatgatcacccggtcctccagcaccacgtgtccactcatgcccgagagcgtcgccaccatcacgtgatcgccgacctggcagttatggcccaggtgagtcatcgccatcagcatgttgtcattgcccacccgggtggcattgccctccccgctggcgcggtgaatcgtgacgtgctcccggatctggttgcgatctccgatgatgacgcgggtgggctcgtcgcagtagcccaggtcctgaggcggcgccccgaccgccgcgccgaagtagaggtggcaactcgcgccgatggtggtatgctccaccagcacgtgagcgtccaccacggtaccggggccgatagtcgaaccgtagcggatgatggagtaagggccgacctccacgtcgtcggccagctcgcagtccggttcgacaatggccgtcgaatggactcgccccacctcactcctcctcaccgcggccggtgtcgagcgtgttctggccctgatccgcccgcagcgcgaagaggtactcgccctcggccaccacatggccatccactttgcccaccacggtgacgcggccgatgtctcccttcgccttggtgagtgtgacctcggtgatgagctgatcgcctggcaccaccggtcgccggaagcgcagcttgtctatacctgcgaagaaggcaagcttcccctcattccccgaggtgaccaacaggaggatgcctccgacctgagccatcgcctccacgatcagcaccccaggcatgatcgggttccccgggaagtgcccgttgaagaaggcctcgttgaccgttacgttcttgaggccgaccgcgcgcttccccggctccaactccagtactcggtccaccagcagaaatggatagcgatgctgaagtacagcctggatctcgttgatgtccatcatccgcagctctcctcgtcgcccgcctcaggcgggctgtcaggcaggctcgcgatgtccgccccgacccgttcgccgtagctcagggtcactccgagcggcagtcgaggggcgagggcagcccaccggccggccgctccctgccctatcgcggcggctggctcggtccgccgaacgcggcgcgcagcgccttggccagggcgacgttgacccggtggctggggcgcaaggccactacctgggcctcgaacctgtgcccgcacagggcgagatcacctaccaggtcgagcgtcttgtgccgggcgatctcatctgggaaccgcagcggcccggagtagcctgcgggcccgaccacgaaggcgttctcgacacctccgccctgcgctagaccggcggcccgcagtgctcccaactcgtgctcgaacgcgaaggtgcgggccggcgccacctccgctgcgaaccgccccgcggtcagcggcaggcacacgagctggcgcccgatgacggttcccgagaagtctacgcccaccgtcaccgagagccccctcgccggcagcgccatcgcccacgagtcatcctccgccgcccagacgggcctggccagcacatggactgcccgccgccgactcaagcgtctccgtcccgcctggcggagcagctccacccactcccgcgcgctcccatcgcaggccggcgcctccgggccgttcaggctcaccctgacgttgtccaggcccatgccgtagatggcgccgagcaggtgctccacggtccggacgcgagcatcgcccagtcccaatgtgaccgcccggtcggtggccaccacatggtctgcggtcgccgggatctcggccccggactcggacaggaagatgatcccctcgtccgcttgcgccggcagcaacgccacggcggtcttggcccccgtatggaggccaatcccttgcttgcacacctggcgagcaatcgtcgtctgagcggcagggcggcggggatggcccgcagccgctgtggcctcacgcaggttcgctggaggtcttgctgccacttcgtgcgccaactcgggggctcacccttcggtctgcccgttgcggcgcattatagcatggccgcgcggccggcgcaaaccgatcccgggaaggggggcctcgccgcttcggctgagttccgcagccgccgccgcggctcaggccccgaggggcgagccgatgagcagcgccaccagagggtctaccacgacccgccagagcgcatcccaggccggagtgcgcatgaacaggagcagcgcgatcaggcctaggggcgcgagccggcctatcaggtaggggtccctgatgccgagcaagcgcgcggccacgtgagacccatccaggggcgggatcggaaggaggttgaacaccagcaggcccaggttcaccagcaccccgatcaggaagaacccaagcagggcctgcaagaggctggggctgagcgtctggaccgcgaggttcgagagtgcgagcctgaacagcagcgcccaggccactgcctgcgcgccgttcgcagccgggccggccagggtgacgaagacgtcgtcgcggccgggatgccgcagccgctcgagagataccggcaccggtttggcccaaccgaaaccgacgccgctgagcgtggagaccacgaagaagatggtgcctatggggtcgaggtgggagagaggcgacagggtcaagcgtccggcgcgcttggcggtatcgtccccgcagaggtaggcgacatagccgtgcgcgacctcgtgcaagacgatcgccagcagaaacaccggcaggctgactatgattctggtgagcgcgtcctcgggcatgtggcgtctatcccggcgggtggccgccgcggggtggcgacgcgcccggaggtggcctcccggaccctcaccgggtggtcgggaccggcacctcgtcgagcacctgggccaccaactggtgcgcgttggcctgccgcacccgcgcctccggcttcaggaaaatgcgatggcagagaatggccggggccactatcttgatgtcatcgggcagcacataggagcggccctgaatggccgcccgcgcctgtcccgcgcgcagcaagcccagggaagcccgcgggctcgcgcccagagagagcatggggtgcccgcgggtcgcccacaccagttccaccaggtactgcttcagggactgatctatgtggacgctcttcacgtgctcctgcatcgtgagcacttcgtcgagctgcaccaccggcttgacggagtagatcgggtgctgcttcatctgccggtccagcaccatcacctcttcctccggcgcgagatagcccatgtggatacgcatcagaaagcgatcgagctgggcctcgggcagagggaaggtgccccggtactcgatcgggttctcggtggccatcacgaagaagggccgggtcagcaggcgggtggcgccgtccaccgtcacctggaactcgtccatgcactccagcaggctggactgggtcttgggggtggcgcggttgatctcgtcggcgagcaagatattggtgaagaccggcccctcccggaaggcgaactccgccgtcttctggttgaagatgtaggtgcccgtgatgtcggccgggagcaggtcgggcgtgaactggatgcgccggtaggtggcgcccagcgaagccgcgagcgccttcgccagcatggtcttgccgacccccgggatgtcctcgatcaggatatgcccgttacagaggagaccgatgaccgccagctccaccgactggcgcttgcccacgatcacggtctcgatctcgtctatcagggcctgggcccgctccgccacccaggccgcctgctcccgattctccattgctcggactcccgagaggagattatagcaggccgggagaggggcagcaacgacgaggttccggccaaaaagcgacgcccccacgtaggagggcgtccgggcgctccgtagagcggagcctgcggacagaagcccttgctgtaactagccgggcaaccgccgctctggtacaatgcagtctgagggtagcagatacctctgacttggtcaagggggacaccgtggaaattgtagcggattcaggacgttcccgcagcgagtcggtgttgggcctggacataggcgcagcgtccgttggttgggccctggtggagacccaagatggtacaccgtgcaggctgatcgccgcgggcgcgcgggcctttgcggccggggtcgaaggtgacatcagcgccggccgagacgagtcccgcgccgcgaaacgccgggaggcgcgcttgcgccgtcgagtgctcgcgcgccgccgttatcgcttgaccaagctcgccggcatcctgcaaagcggcgggctgttgccggccgctgaactcgactctcccgaagctgtagacgccttcttcactgaactcgaccgcgagctgttcacgcaggacatgcgggcccgcgatccccacctcatgcactaccggcttcgcgcccgcgcgctggacgagaaggtcacgccggacgaaatcggccgcgccatctaccacctcgcccagcgccgcggtttcctgtcgaaccgtagggaaacggcccgcccgcggcgtgatgacgacgagggggtggtcaagaaggagatcggggaactcgaacaacaaatgcgggacgctggctctcgcaccctcggcgagcacctctccaagctcgaccccgagaagaagcgggttcgcgatcagtatctctcacgcggcatgatcgagtgcgagttcggcgcgatctggcaggcgcaagccgcccattacgcggatctcatgaccgacgagctgcgcacgcagatccactacgccatcttccaccagcgacctctgaaatccccaaagcgcttcattggcttctgcgagctggagcgcgaccggcggcgcgcgccacttgcgctgctgggcgcacagcgtcatcgcctcctacagaaggtcaacgacctgaggttcaccacgaaggacggtcagacccgcgacctcactcccgaagagcggaggaagctctcccaggcactggaggccagggccgagatgaccttcggcgcgatccggaagctgctttcactgaaggacggccgcttcaacttcgagaccgagggcgagaaagggctgatcggcaacaagaccgcagctcgcctggcgcaggtgttcggcgacgaacgttgggaggccctgtccccggcgcagcgcgaccaggtggttgaggacctccgtaccatccacaaccccgcggcgcgcaagcgccgggccatgaaggagtggggtctggacgatgagggcgcggcccggttcgctgaggtgcggttggaggacggctaccacagcctctcgcgtcaggctatatcccgggtcctgccgctgatggagcagggcacgcaatatgccaccgcacgcaaggcctgctatcccgaccgtgcggaagggaggccgcgcgatctcctgccacctgtccacgaagtcagggaggtgcgcaaccccacagtgcagcgcgccctcactgaggtgcgcaaggtcgtgaacgcgatcgtgcgcaagcatggcaagccctccttgatccgcatcgaactcgcccgcgacctgaagcgcaaccgcaagcagaggggggagatacacaagcgaaatgccgagaaccgcagagatagagagcaggcggcggccgcgctgctgcaagagaggggcatcaccaagcccctccgttcggataccgagaaatggctcttggccgaggaatgtgggtggacttgtccctacaccggccgtcagatcagtgtggaggcgctgttcggcgacgcgcctcagttccaggtcgagcacatcatcccgttcccgcggtgcctggacgattcgttcctcaacaagactctctgccacgtcgaggagaaccgccgcaaggccaaccgcacgccctgggaggcctatcacggttctgaccagtgggataacatcatctcccgcgtcaagagcttccaggggggtgggcgcggcagagcggcgcggaaccctaagctgaggcgcttccagatggagaaggtggagagcctggacgagttcacaagccagcagctcaatgatacgcgctacgcgtctcggctcgcggtggagttcgtcggccagctctacggcgcaggggccgacggcgtggacgcgagcgggcgtcgccgcgtccaggccggacgcgggcaggtcacggcggacctgcgagccgagtggctgctcaactccatcctcggcgggggggagaagacgcgcgatgaccaccgccagcacgcagttgatgcggcggtagtcgcgctcaccgatccgggcacggtgaaacgtctcagcgacgcggccgcgagggccgaatccgcccatcggcgacgctatgcgcccttggaccccccgtggcctacgttgctggatgaggtgcgagatgcggtcaacgccatggtggtctcgcaccgcgtctcacgcaaggtcgcgggacccatccacgaggagaccatctacggccggccccgtcccgacgaggagggccggctccacgtgcacgtccgcaagcccatcaactccctctcccccaaagacatcgccagcattgtggacccggctgtccgccagtgcgtgcaggagaagctggctgcgctgggcgagagcgacccggccaaagcgttcaagtcaccggacacccacccgacccttcggagccgagacgcgcgcgaaatccccatccacaaggtccgcattcgcagaagcgatgccactcggcagatcggcctgggcgcgtacgcgcgggaggtccaactcggcaacaaccaccacgtcgagatcgtcgaagccatggatgcgaagggccgcctgaggtgggaaggcgtagtggtcaccacctatgaggctatgcgccggctgaaggagggcgagccagtggtcattcgcgaccacgggccaggccgaaggttcctcttctccctggccggcggtgaggtgatcgagctggacgagcgcgagggtggcgaggcagagggcggagccgtccccgcgcggctgctgtacgtcgtgcgcaccatcgccctcagtggcagccgggtctcgctcgcgttcgcgcctactgccgatgcgcgcaggaaggaggacataatcagggccggcgactgggggagagccgacgtcggcccgttgcgaaggcgcaactgccggaaggtggcaatcacggcgctaggtgaggtgcggaacgccgcggactgaccggagtgtggaagaaaccaagagaggggctgtagcgtgctcatcgccccacttgggaggtggaccacgcccggagccgagcgcatcattgacctgtccgaagagccggcctggctgaatgtggacacctctcgcctggtgatctcgcgcgacgaacagcccaaggtgagcataccgctcgccgaggtggcggtgctggtggtggcccatccccaggtggtgatgacccaggcggtgctggccggggtggcggagcagggagggatcgcggtgatctgcgatggcaagcggatgccggccgccatgttgatgcccctcgccgggcacttcgctcagggggagcgcttcgcgctccaggccaaggcctccctacccacctgcaagcggctctggcagtcgctggtgaaggccaagattcgggcccaggctcgggcgctggctgatctgcgaggagatgacgcgggcctcccgcagctcgcggagaaggtgcgctccggggatccctccaacgtcgaagccgaggcctcccgccgctactggcctgccctcttcgccgaccccaggtttcggcgcgaccgggatgggggcggcccgaccgcgctgctaaactacggctacgccgtcctccgcgccatcgttgcccgggccgtctgcgccgcggggctccacccctccctcggcctccagcatcacaaccgctacgacgcctttcgtctcgccgatgatctcatg

SEQ ID NO: 3566 - DNA, 4056 bp, synthetic construct
  misc_feature 1..4056: note = Synthetic
  source 1..4056: mol_type = other DNA
agcgccccagggaagcagatcatggcattctctgcgctcgccgagactcctgtgctgggaggcgctgaggatggagaaggatgccgagcggggagtgaactggtcgggactgccggtgatcgctatgtggcacggctgctggtcggaagcggcccagcgattgggcccatagcactggctataggctcagtgactaagagagggcgacaggaggtcctgcgggaacctcccgcgcgttctctccgcagtcccatctctcaccggctcactgacccgccagggccaaaaagacgacgcccccgcgtaggagggcgcctgggcgctccgtagagcgtagcctgcggacgaaagcccttgctgcaattagccggacaatcgccgctctggtacaatgtgcccagagggtagcagataccaccaacttggtcaagggggaagcgatgaaaatcgcgggcacagggcgcacccagagcgagttcgtactcggcctcgatatcggtgcagcttccattggctgggcactcgtggaaacgcgcgacgggcagccgcaaagcctgaaggccgcaggtgtgcgtgccttcgcggccggcgttgagggtgacatcagctcgggccgagatcagtctcgcgcagtcacgcgccgcgaggcgcgctcgcgccgccgactgctgtggcgccgtcgtcaccgcttgacaaagctcgcctcgcgattgcagcaggccggccttctgccgcccgtcgaactcagcacacccgagaccatcaacggctacttcaccaacctcgaccgcgacctgttcccgcagcacattcgtacccgcgatccacacctcatgcactaccggcttcgcgcccgcgcgttagacgagaagctcaccccctacgaaatcggacgcgccatctaccacctcagccaacgccgcgggttcctctccaaccgcaaggagacagcccgcccgcgccgcgaggatgacgagggcgtggtgaaagaagccatcgggaaactcgaacaggagatgcatgccgccggtgcccgcaccctgggcgagcacctgtcgcgcctcgatcccgaacaggaacgcgtccgcggccgctatatctcccgcggcatgatcgaacgcgaactcgaggccatctggcaggcccaggccttccaccacccggacatcctcaccgacgatctgaagctcgcggtccggcgtgccatcctccatcaacgccccttaaaatccccgaagcgtttcatcggcttctgcgacctggagcgcgaccgccgccgcgcgcctctcgctatcctcgcctcccagcgccatcgcctcctccagaaggtcaacgacctcaagttcatccccaatgatagcgcaccatgcgacctcacccccgagcagcgggccgcgctcgcccaggcgctggacaccacgcctgcccttaccttccctgctatccgcaggctcctctccctcaagggcggccgcttcaacttcgagaccgaaggcgagaagggcctcatcggcaacaagaccgccgcccggctcctcgccgtcttcggtgaggagcgctgggccgcgttcacaccccaggagcgcgaccagatcgctgacgacctgcgcaccatccacaatcccgacgcccgcaggcgacgcgccgccaagtggggactcgatgaagaggccgctgcccacttcgccgacctcgtcctggaggacggccaccacagcctctcccgccaggccctcgcccgcatcctaccgctcatggaggagggtcagcagttcgccactgcccgcaaagcctgctaccccgaccgcgccgaaggcaacccgcgcgatcttctgcccccgctggacgacgtcatggaggtccgcaatcccaccgtcgagcgcgccctcactgagctgcgcaaagtggtgaacgcggtcgtgcgcaagtacggcaacccatactgcatccgcatcgaactcgctcgcgacctcaagcgcaaccgcaagcagcgccaggatatccactcccgcaacatcgccaatcgcagagatcgtgacagagcggccgccgtgctgctccaggagcgcggcatcaccaacccccgccgctccgatatcgagaagtggctgctcgccgaggaatgtcgctggacctgcccctacaccggccgccagatcagcctcgaagcgctcttcggcgacgcccctcagttcgaggtcgagcatatcatcccgttcccgcgctgcttggacgattcattcctgaacaagaccctctgccacgtcgacgagaaccgccgcaagggcaaccgcacaccctgggaggcctatcacaacaccccgcagtgggacgacatcattggccgcgtgcgaagcttccagggcggcggccgcggcagagccgcccgcaaccccaagctcgaacgtttccagcgccaggacaccgacgccctcgacgacttcgttagccagcagctcaacgatacccgctatgcctcacgccttgcggtcagattcgtcggccagctctacggcgccggagccgacggcgtggacccgcagggaatccggcgcgtgcaggccggccgcggccagatcacctcagacttgcgcaacgagtgggcgctgaactccctcctcggcggcggcgagaagacccgcgacgaccaccgctaccacgccatcgacgcagtggtgattgccctcaccgacgccgccacggtcaagcgtctcagtgacgccgcagcccgcgccccctccgcccaccgccgccgcttcgcccccatggaacccccctggcccaccctactcgaagacgtgcgcaccgccatcgaagggatcatcgtctcccaccgcgtctcccgcaaggtggccggggcgatgcacgaggacaccatttacggccgctaccgatatcccggagaagacggaaaggagcgggactgggctcacgtgcgcagaccattgtccggctcgcgatccgcactcgccaagaatgacatccccagtatcgtcgaccccgccgtccgccgctgcatcgaagagaagctcgccgcgctcggcgaaaccgatcccgccaaggcattcaagaccgccgacacccaccccaccatccgcgcccgcaacggccgcgaaatccccatccacaaggtccggatccgcaggcccgacaccacccagcgcattggcctcggccccaccgcccgcgacgtcaagctcggcaacaaccatcatatggaaatcgtcgagatcactgactccaaaggccaaaccagatgggatggcgttgtcgttaccacctaggaggccatgcgccgcttgaggatgcgcgagccggtgatccatcgcgaccacggccccggcacacggttcctcttctccttgacacaaggcgaggggatcgaactcgacgatgacggcaagcgggtcgtgcacgtcgtgaccaaaatcacgagacgaggcgaggggccgcgtgaacgccgcaccgttggcatcgttcgccatgatgacgcgcgcatgagtgctgcccgagacgggagcgaagccagggacctgaaggaaccctctgccgaagtgctgcgcaaagccaactgccggaaggtgctcttgacacctctcggcgagatgcgcaacgccaacgactgacccgaatatggaataacccagagagggactcacgcacgctcccggctcttccctggaggtggcagaccacgcccggcaccgagcacatcatcgacctctcggacgagcccgcttggctcaatgtcgatctctcgcgcttggtgatctcccgcgacgagcagcccaaggtcaccatccctctgtcggaagtggcggtattggtggttgcccacccgcagatagtcatgacccaggcggtccttgccggcctcgccgagcagggcggaatgatggtcatctgtgacgcgaaacggatgccggccgccatgctgctgccattggaggggcacttcgtccaaggagagcgttttgcccttcaggcccgggcacctcttcccactcgcaagcgcctctggcagtccctcgtcaaagccaagatctgcgcccaggc

SEQ ID NO: 3567 - DNA, 3998 bp, synthetic construct
  source 1..3998: mol_type = other DNA
  misc_feature 1..3998: note = Synthetic
tggtcacctgctctaccgctaacggctccttgtcgccctcgcctttcgacacctgagcaggcccgaagttcacgggtgagtctaccacatttgcgggaggaacggcaacggaggggttagggtctaggggttagggttcaggggctaacgcaaaaaacatggcgccccgctggggggcgccggacgctccatggagcgttgcctgcggacgaaagcctaagcttttctccattgctgtaagtagcctgggcaatcgtcgctctggtacaatatgcaggcgtcttgtaacatatcggcagaaacctgtcaaggagaatttgcatggccgcgacccaagagggcagcagggcacaggactcgctggtgttggggctggacataggggcggcgtcggtggggtgggcgttgttggagaaggagaatggcagtcccgcgcgcctccgggccagcggcgtgcgtgtgttcgaggccgggacggagggcgacatcgccgcgggtaaggattcctcccgcgcggcgggccgacgcgagaagcggggtcgccggagactgctggcgcggcgtcgtcatcgtttgaccaagctcgccaaagtcttacagcaggccgatctgttgccgccgggagagctggagccggccgaggccgcgatcggttacttcaacgcgttggaccgtagtctgttcgataccgagcagcgcaaggccaacccccacctcctcctctatcacctccgtgcccgctctctggacgaagaactgacgacgcatgagatcgggcgcgcgctctaccatctggcgcagcgccgcgggtttctgtcgaaccgccggttcaaggccaacgcgccccctctagcggatgaggaacaggcgacggagagcaagcgcaaagccaaaccgaagccccgcgagaaggagaaagacgagggcaaggacgatggagtggtgaagggcgcgattcgcgacctacagacccagatgcaagatgccggcgcccgcaccctgggcgagtacctgtccactcgcaacccggaggagcggcgcgtccgcagccgctatctcgggcggaagatgctgcaagacgagttccacttgatttgggccgcgcagtccacctatcacccacaactccgcacggaggaactgcgccaggcggtctacaaggcgatcttcttccagcgtcccctcaagagccagcgcaagctcatcggcgagtgccagctagagccgggacgcccccgcgcccccatggcctccctggctgcccaacgtttccgcctcctccagaaggtcaacgacctcctcatccagtcccaggcaggagaacagcgcagactcaccgacgaggagaggaagacactcgtcgacgcgctggagacgcagggcgacctgagtttcgcggcgatccgcgagctactcggactgcccaagcgcggcgtcaagttcaacttcgagacggagggcgagaaagggctgaaaggcaaccggaccagcgtgcatctctcccgcgcgtttggcgagcgctgggagaagctgtcggccgaagagcgcgggcgcgtggtgacggagctacgcagcgtgcagaagcccgagacgatgaagaagcgagggatgaagctgtgggggctggacggggaggcggcggcgcgggtggccgaggtggcgctggaggatgagtattgcagcctatctcgccaggcccttgccaaggtgcttccacgaatggagaagggggagcagttcgccaccgtgcgccaggatatctacaagacctctgacctgccggcggccgatcaggtggagtcgctgccgcggctggaggcgaccgggatagaggtgcgcaaccccgcggtgcagagggcgttgacggaggtgcgcaaggtggtgaacgcggttgtccgcgcacatggtcggcctgacttcgttcgcatcgaactggcgcgcgatctgaagaagaaccgcaaagaccgccagcagatttcactcaacaacgcggcgaatcgcaaagcgcgagagaaggccgcgcgagagatcatcgccgcggcggtcggcctcgccaatccgagtcggcgcgatgtcgagaagtggttgctcgccgacgaatgcgcgtggcagtgcccgtacacaggcaagcagatctcctgcgcgagcctgttcggcgagcacccgcagttcgacgtggagcacatcatcccgtttccgcggtgcctggacgactcgtttatgaacaagacgctgtgcgacgcggagtggaaccgcacgcgcaagggcaacgacacccctttcgaggccttccgcggtgaccccgaggagtgggagcggatcatcagacgcgtgaaaggcttcacgggaagcggccgggggccgaagctggcgcgcttcttgcaggaggaggtggcagggtttgaggagttcaccacgcagcaactgaatgacacgcgctatgcctcgcggctagcggtgcggtatctgggaatgctctacggggccggcgtggagggggtggacccgcagggccggcggcgcgtgcaggccagccgcggcggagtcaccgcgtttctccgcaacgagtgggaactgaactcaatcctgggcggcggtgagaagacgcgggacgatcaccggcagcacctggtggacgcggtggtggtggcgctcacggagccggccgcaatcaagcgcctcagcgacgcggccgagctggccccggaggcgcgccggcgccgtttcgcacccatgccggctccgtggcctgggttcctgggggagatgaagaagcgggtcctggaggaggtggtggtctcgccgcgcgtctcgcgcaaggtggctacggccctgcacgaggagactatctacagcaagccccacgaggatgaagagggcaagccgtgcgtccacgttcgcaagcccctggggtccctctcaacgaaggacgtgttcgacatcgtagatcccgcggtgcgcgactgcgtgctcgcgaagctcgaggccctgggcgaggaggatcccaggaaggccttcaaggaccccgcacagcatcccgccatgcgcgcgaaggacggacgcatgattcccatccacaaggtgcggattcgcacctccgtcacgcccttccctctggccgcgggcgcgcaccagcgccacgtcaagctcggctcaaatcatcacgtggaaatcctcgagacgaaggacaagcgcggcaacgtgcgctgggacggttgtatggtcagcacctacgaggcgatgcaccgtctgcgcgcccaccagccggtggtgcagcgggatcatggtccggagaagcggttcttgttctcgttggcgggccgcgaggtggtggagttggacgaagacgaggatggatcgagaaggctatatgtagtacgagatgtaagcgtaagagagagcgggtacgttagagttagattcgtgggtatcaatgacgcgcgaaagaaggatgacatagcgaaggccggcgcgtggtacgagaagcccatacagggcctgcggagggcgggctgctgtaaggtagtcgtgaccccgctcggcgaggtgcgtcgggtgggtcgtgactgacaatcgggtctgaaggggcgcatggcgatgcgcccctacggcctgtggcgggcgtgggtccctgtgtctgcctgccggcggaccgggatggcggcttcgccaagccacacgtccgccctgcaggatcatcatgcacagtgcaggcgagacgcctgcgctcccagcggggtctaggatggagcgcatcattgaactgtcggaggggccggcgcggttgaacgtgcggaactcgctgttggtgatcgcgcgcggggaggagccggaggtcaccgtgccgctggcggaggtggcggtgttagtgctcggtaatctgggccggccccgatttgatggacacctcgatagtgtggacggtataacagaatcgaggtgagagatgagagagcgacggaagttcacgaacgagttcaagatggaggcggtgaagc

SEQ ID NO: 3568 - DNA, 14065 bp, synthetic construct
  misc_feature 1..14065: note = Synthetic
  source 1..14065: mol_type = other DNA
cttggctgattcctactaatattccttctgctaataattatagggtgaatattaccagcttatcagttaataatgtgagtgggcaaagtcctaccaattttacgattgcagatggagattccatcaaaatcaccaatcccatcgccaatgctaatttaataaaaaacactacttttaatattacatggactacaaatatcagtagccgaaatgtaaccctcgaattaatagccaatggaaatgtagttaccaccattgccactaaccaaaccaattcaggtacttatacttggagaatccctgccctaagagaaaatgaccaaccgttactcgctggtgcgtatcgtgtacgcgtgcggacggcaagtggagatatggtaagtgataatagtcctctttttaacctcagagaacctacttttcaaataggtacgccaagcccaggcgagcaattatttagaggtttttcctacccaatcacatggatttctaatttggaaggtggcgtaagaatagatttgtacaacagtaatgttacacttattagcaatatagctatgaatgttacaggaagcgtattcaactgggttatccctctcgatttgccagaaggtaacttttatactattagaattacaagcctcatcaacccagccatctctacagcaaacactgcaaatttcagggtcgtacaaggacaactccaagttaccaatcccagaggcggcgagaattggtacagcaatggattccgttacgctatagaatggacaaataatacccaaaaacctgtaaaggtagaactgatacgcgctggaaatgtagtaaccaccattagccccagtacgacagctttgaacttggatttttccttgcctgatggcttggcagatgccagtgattacagaataagaataagtagtatagagaataatacgctcgttgcacaaagcaatcccattcgaatcatcagacctgttctcacacttacttctccgcgagggggcgagtctttaatccaagaattaaactatgtaatcacttggcagagcaatttgcctgcggacgaattggtgcaagtcgacctctatataggcaatatttttaatcggactatcaatccatctactccaagtggtggaagcgcgaactggggcgttggtggcaatattcctgtgggggctaactataatattcgtgtgagtatcgttagaaatttggctgtttttgggcaaactgctgcgccttttagtgttatcagggacaatgtgcctcctgtaatttcaggagaagattttcctgcgctttttaatgggagtagcagtgcagtgctttctgttgacccttctgtgagtgcaagtgataatctgggcgcattaggattgagggttttttgtttttataaaagtataagcaaagcgacttggggagaaacgaagacagaggcaatattgcaggctggcaataggtatcaagcatctattccgctaaacgaatttagaaacgagataggtgtagaatattacttcgaagctaccgaccgcgcaggcaatgttacacgtagcccacgcgaaggtcagcaaagaccacaattagcacacattcgctacgcaaatcaaaatattccaaatcctatttttggagaaacagtagaagactatcaaatcatttctattcccttagtgctgaatgacaactccgtcaagggaatttttgaaaaaatattacagccgtatgatgaccaaaattggcgtttgttgcgctatgaagcaggtacgttattcgaagtaaacaattcagaaaaaccactgacacaaatagaacctggtaaaggttactggctcattatcaaggagaaaccaattgaaaacctcaccacaggcgaaggtacaacggtcagagtaagttctttaaacccttttatgcttaatttagaaccaggctggaatcagataggtaatccttatacttacaacctttcttgggcagatattttgagaggaaatacaaatgcaaacgtactgggaaacctcaaaacgtatgacaaaggctataaaaacacagatattcttccactttatcgcggtggatttgtatttgctgcccagccaatcacactcagattccccactaccaaaaatcgcacgattaatcctggaagagttgaaaatgaggaaattacaaatccgctttcttcgccaatttgggaagtaaaattgctggcaagtacaggaaaagtaaccaacgaatttgcgggttttggtatgaaccccagcgcagaaattctcaaagacaagtttgatgacatgactttgcctcgttttggcaattatgtggaagtaaacttcaatagacctgattatttttattctaaatttaccaaagatgttgtccctaccaaagataatttcgtgtgggaatttaccgtagaggcaaactcacctgacaaaatgaccaaacttcaatgggaaaacgcttattttgggaatgagaaaaaattgatgctcttagaccaagagttgcagcgttttgtagatatgagtgccgtcaaggaatatgctttcacgcgcaccgcagacaaataccgcttcaaagcaatttttggggacgaaaaattcatagctgaaaatttgcaagcagacaagatagtttttgataattttcccaatccttttggaaaccaaacccagtttaacttcacactacccttagattatgcaaatagccacgtcagcctcaaagtgtataatagcatggggcaggaagtagccacactgaccaatcaaagctatgccgcaggttttcatcagttaaaatgggaagcaaaagaccaacaaggaaattttcttgccaaaggattgtatatctgtcgtttacagattgaaaatagagcaaaaggattaggaagtgcggtaaataggtctgtaatagtagagtaggggaggagtcaccgaagaaatctaatatctcttttgacgcagataaggtacaacgccttatctgcgtttgtttttaattttggcaagatagtttttgcttaaatgtaaaaaaaaggtaattttgcaaagttcaaaaccattttaattttcaaatttatgttaaaaaaattacttcatatagaaaatgctcctttacaaacagaccttgctttgctggtcattcggattgcttttggtgcattgatgatgcgctacggttggcaaaaatttgaaaattttgcagaatggtcgcctggctttcttaactttttaggcttaggtggcggtgtttcgcttgggcttgccatatttgccgagctattttgcgcttttttggtcattattggtttgtttactcgttttgttactattccattgattatcactatgttagttgctttttttcaagcacataccaatgattcttttgatgtcaaagaacatcctttggttttcttgtttccgtacattgccttgctaatggcaggtgcaggcaagttttccctggacggtatcatgtttggcatgagaagaaaatattagaaactcataactttatttcgtttatcaaagttaagtgagcaatagataaacttacttaaattttttgatgaaaacactacgacttctgctgggcgaccagctcaatcatgcacattcttggtttcaaacagttgataatgaggtaacttacgtactaatggaagtcttccaagaaaccaattacgtaacgcaccacattcaaaaagtagttgccttttttgccgcaatgcgaaactttgctcaagagaaacaagtaaaaggacaccaatttatttacctcaaattagacgaccaagacaatctgcaagacattcctgcaaacttaaacgcgctcattgaaaagtaccattttgtagcttttgaatatcaacttcctgatgaataccgtttagacgttcagctttctgaattttgtaaaaaactgaaaataccttatcagtcgtatgattccgagcattttttgacaagccgctacgaaatgcgcgattttttcaagggaaagaaaacgtatttaatggaaagtttttatcggagtatgcggaaaaagtacaatattctgatggaaaatccaacagaaccagtgggcggaaaatggaattttgatgcagaaaatcggaaaaaatttgataaaaaagtaaatgtacctgtgccactaaatttcaaaaatgaggtcaaagaaatttttgaaatgattgaaaaaacgcaggtcaaaacgattgggaatattgatgtagcaaattttgattggtcgcttacgagggcgcagtcattagcattgttggatttttttgtgaatcactgtcttcactattttgggacttaccaagatgcgatggaaaccaatttcccttatttattccattcacgactttcttttgccctgaatatcaaacttttaaaccccctcgaagttgtaaatgctgctatctctcattgggaaaaacaccaagacaaaatagatatttcgcaggtggaaggctttgtgcgacagattattggctggcgcgaatttatgcgaggtgcatattgggcaaatatgccaaactatgccacattgaatttttttgaacatcaaaacccacttcctgagttttattggacaggtaagacgaagatgaattgcctcaaacacgcgattgggcaatcgctggatttggcgtatgcacatcatattcagcgactgatggttacaggcagttttgccaacttagcgggcgttcacccagattatgtagatgaatggtacttaggcatttacatagatgctatcgagtgggtagaaatcaccaatacgcgcggcatgagccagtttgctgatggtggattggtggcgaccaagccctacgtaggcagtgccaattatatgcacaaaatgaccaattattgtgctaagtgccactacaacaaggacttgcgatatggcgaaaaagcctgccctttcaatagtttgtattggcatttttaccatcgccaccgagctaagttagaaaaaaatccccgaattggcatgatgtacgtgatgctcaacaagatggaaactgctgagttagacaaaatattagcacaagcagaagcatatttggagaaaataaatgagttataaaattattgttatctttggggaataaatcaaaataacaattttataatcaattatttaactttgatgaaaacagcagaaatacacaccgaaaaaggcgtgatgaaaattcagttttttgaggctgatgcacctattacggtggcaaactttgtaactttggcagaaaaaggatattatgatggcactatttttcatcgtgtcattcctaactttatgattcaggggggcgaccccacaggtacagggtcaggtggacctggctacaccattgccgatgaactcacagggggcaatcagtaccatgaccgaggtgtactctctatggcaaatacgggcagaccgaactcaggcggttctcaattttttatctgtcataacagaacaggaacacaacatttagaccgtaaacatactgtttttggcaaagtctatgaaggcatagaactggtcgaccaaatcagacaaggggacaagattataaagattgtcattggtgaaatagcttaaagttgtgaaatgaggctgtctaaaaaacccatcgttaaaacggtgggcttactaaaatatttaaaaccaatggtttgccgttattatagcttaccgttttaacggtaaaacataggtaagaaaaaaaattggctttttggacagtcttgttttattatcgtatcgttagctcgcctcgaagcgaatcttctaatttttgtttgataagctcgttatcatgttcattaccaagcagaaacattagtttggtaatggctgcttcgggtgtaatatctccaccactaatcacgccaatttcagccaatcgcttgctggtttcgtacaagccctgcactacgccgccattacactgcgatacgttatagataaaaattcctcgttcaatcgcattttttaaaacacctacaaactcgtcatcagaaggggcattgccagagccaaaagtttccaataccacgccgcgcaaattgggtgtatgcaaaatatgcgctaaataaatacttgaaagacctgggtataactttatgataatcacgttactatctaacttattgtaaaaccaaaaaggctcacttggttgtggtaaaatgagctgcctttcatagttgatgtcgatgcctgccactgctaaagggggacagttttgagatttgaaagcagtaaatttgaaactctgtactttgcgggcgcggttgcctctgagcaacaaatcatcaaaaaaaatacaaacttcggggacaagggctttgccattttcatctttgcaggcggcaatctctaaggctgaaatgaggttttcgcgtgcgtccgtacgcgtaacgcctatgggcaactgcgcgcctgtcaaaatcacaggcttttccaaattttctaataaataactcaatgccgatgccgtataagccatcgtatccgtaccatgcaaaattacgaaagcatcataatcgttataaaaatcataaatcatgcgcccaatattgagccagtgatgaggctgaacgttagatgaatcgataggctcattcatggcaagaacggtcagttcaaaatcaaaacgtttgagttcgggtactttgtcaataatatatttgaaatcaagaggcacgaggtgatttttggtgtcatcatagtccataccaatcgtaccgcccgtataaatcacaaaaatagaggtatctgtgctactatttgccgcagttttgatattggtcgttgggtagtagttgagcatggattttacattttacgtttaaggtttaaagttcaaggtttaaggtttaaggtttaaggtttaaagttcaaggtttaaggtttaaggtttaaagtttaaagtttaaagttcaaggtttagagtttaaagttcaaggtttagagtttaaagttcaaggtttagagtttaaagttcaaggtttagagtttaaagttcaaggtttagagtttaaagtttaaacttgaattattactttaattttagcccatctaatagcttgatatacagcataataccttctcttacttcgtccaaataaatatattcgtcagcagtgtgcgaacgggcagagtccccaggtccgattttgatagaatcaaaaggcatgagtgcttggtcagaagtagtgggggagcagtaatgctgcctaccaagcctgatgccctgctgcacgatagggtgggagagggggatactggaagcattcaatcggatagacctttctttgacttcgcagcccacattttgctttattacgtccaatatttctgcatttttgtaaatgtcagtggggcgaatatctacggtaaaagtgcaaatatcaggtacgacattgtgctgactgcctgcattgatgatagtaacagtcattttgacctcgcccagcatttcagaaattcgtggaaatttgtagtttctgaaccaatcaatatctttgagtgctttgtaaatcgcattttcaccttcattgcgtgcggcgtgtcctgctctccctttgacggtacaatctaccaccatcaagcctttttctgctactgccagttgcatttgtgtaggctcgcccactatcgccaaatctattttgccaaactgcggcaaaaccagctctactccgtcgctaccactgatttcttcctctgcggtgggtgcgataatgaggttaaaaggcttattttctacctgattgtagtaaagaaaggttgcaatgagagaaaccagcgcaccgcctgcgtcattgctgcccagcccgtacagctttccatcttgctctatcggagaaaaagggtctaaggtatagcttctgttgggctttacggtgtcgtggtgtgagttgagcaggatagtaggtagctgattatcaaagttttctgaaaaagcccaaatattattgatttggcgaaacgttttgatattgttggattggagatagttttctatcaaatcggcagtttggttttcctctttgctgaaagaaggggtgctaatgagtttttttagcagttggattgcctctgtggtaagttgctcgatgcttcgttgatgttttgaaatggtcataaaataaagatttgttcagttatttttttacaaacgtagtaaatttttggtaaaataaggttagaaaattttgagtgtataaaaatgaaattttctaaatcaattctttacatttgaaatatgtttttgtgtggtgcttttgcttggtaggtgttgcacaccgcgttcaacacactgcaaaggcgaaattttctacatcaagaccttacatttgaaatacctttttacatttaaaaaaacagagccaatgacactttcacgtagagatttccttgcacagggcagtgccttgggcgcacttactacactttcttctttcacccaagcggcagagcaagagagagttagcactgtggatagtatagaacgcgctacccaaaaaatagcccacctttcccccgaagaagccgccaaggacgaagatttttggtttacggtgcagaaggcttttgtccaatcgcccaactttatcaatttggaaaatggctactgttctccgcagcctgtcgaaacgatgaacgcgcttttcaaaaatataaatatgatgaacgaattgccctcgttttatatgaggcgcaggcaatttgatgacagagaggaagttaaaaaacagttggcaaagatggcgggcgtttctacggaagaaattatgattacgcgaaacactactgaggcactggaaactgttattttgggcttacaaaccctccaagaaggtgatgaggcgataatgaccaaccaagattacggcagtatgttagaggctttttacttgcgcgcaaggcggtatggctctaaaaataaggtaatttctattccgcttcaccccaaaagcaatcaggaaatcgtggattgttatgaaaaagcaatgactcccaaaaccaaagtcattttggtaacgcatttggtgaatattacgggacagattttgccaatacgagaaattgcggaaatggcgcacgccaaaggagtagaaattatctcagattctgcccacgcgtttgctcatatcgacttcaaaatccctgatttgcaatgtgattactttgggacaagcctccacaaatggctttgcacgccgcttggtgcaggcttactttacatcaaaaaagaaaatatcaaaaaagtttgggggctttacggcgaaacgggttttgcagatgacgacattcgcaagtttgagcgcataggcacgcacccctgctggacaaacctgaccatttctaatgcgattcgttttcaccatgctattggcatcaaacgcaaagaggcgcgcctgcgctacctgaaaaactactgggcagaaaaactcaaaaatgtccccaagattatcctcaatatgccactggaagcctcgcgctcgtgtgggctgggcaatgtgggcatcgaaggcaagactcctacgcaaatcgctgataatctgtatgaaaagtataaaatcttcaccgtagcgattgatatggaagcagtgaagggcatacgcgtaacgccacatctctacacaaccttagaagaattagacgcttttgtaaaagcaatggaggagatagcgaggagttgaggggtttttgtagggaaaactgcttatttggacaacacaaaaaaagcccctgctcgaagcaagggcaaggctgaaaacagcctacagaataatcttttattatgataagctaacaaataaggaaaatagcaatactaatttctttactttcaaataaggataaacaaagttaagtatttattttgaaataacaaatttttgagagtatatttactcatagtaattttataaatttttttatccattttaaccacctgaaaatgaaagttttaggattagacatagggacgaactctattggctgggggctgatagaggacgaaaaacaagaaattattgccatgggcgtaaggatttttcctgtgggggtgaatattagcaccaagttcaaagaagaatccaaaggcaaaaaccgccgcatagggcgcacttctcggcgatgcgctttcaggcgaaaaaagcgtattaatgagttaaaaactattctttttgagatgggtatttggtctggacatccatcttacaagagtagtattttagcttatcagcttcgttcaaaaggcttagatagtttgcttactttagaagaattagcaatcgttcttcttcatattgccagaaggcgcggctttcaaagtggtaaaaaagatgatattgatttaaaatccctcatcagagaagaagaaaaactactgcacatcaaggatgtggaaatagaaaatcaggtagaggaagaggatgatgatgataaggaagagaaaaaagtaaaagctggcatcaacgagctaaataaaaaaatagcggaaacaaaagcgcgaacgctgggggaatatttttatcaattattcttgaaagaacaagcaaaagaaaagtgcttcaaccctgagcagccaagtgagcgtataagggcgcgatatacttcacgcgaaatgtataaatacgagtttgaagaaatcttaaaaaagcagcaatcatattaccatgatgtactaagcgatgatactgtaaagaaaatttggaattgtattttcttccaacgtaaactcaaatctcaaaagcatcttattaatcaatgcaggtacgaatctcaaaaacgatgttcccctatctccaaacctatttaccaagagtttcgcacttgggatagtatatgtaatataagagttgtttttgctgaagatgagcctacaagaccactctccttatctgaaaaagagatactttataatgctgcccaaaatagtgcaaacttatcacttactgatgtgcgggaattagtttttggaggtaaaagagtggaaattaattttgatgaggatggaaaagtgataggtaatattacaaggataaaaattattaatgccttacttgggagcgcaagagtagaagaaataaagaaaagggcagaaaatcacccttctaaaaatccgctactatttgacgaacttttgttcgaagaaatagataaaaacgggcttaacgaatacttgcagggagaggtatatgaaagaatttggcattggctacatatctttgatagtagaagttggctaaaagaaaaattggagaaggaatttacctcaatcattcagaagccaactttggttaagcaagaactttccaaattacaaatactacgcttggcatctatgaccatagaaaaaaaatttggttctatttcggagtacgccatcaaaaaactcctgccacacatgaaaaaagaaggtggaaatcttaccacagcctgccaagcccaacaatatactatcactacggaggaatataaatacgacaaagaccgtattcttaaaaaagaacttgcctttctcaaaataaatgaactgcgtaaccccatcgtacagcgtgcgctttctgaaatgattaagttagtaaatgagattatcaaaaaatacggacagtttgataaagatggcaatcttgacattaaaactgtacgcatagaaactatgcgagaactccgaaaacctaaaaaagcaagggaaaaaatttacaaagaaaataacgataagcaaactattagaagggcttacgcaaaatttttgacaaattcagggcttggtaaagaaaaaggagagattttaccctctgaccctttagtaaaaaaatatgaactttggctcgaactttatccaataccctcagaagaatttgagaaaaagaaagacaaagaggattttgaggagttggatagcaaaatgaaaaaaggtgaaattaaggatatgggaacatttgcaaagggttttctaaaatttgctgataatatcgaaaaacctgaaaacacaaagtttaaactctggttggaaagcaatagaatatctgtttattcaggaaagcctatttcattggctcgcttgctacaaaaaaattctgatatacaaatagaccacattgttcctctaaaaagaagcatgaataatgactttgccaataaaattctttgtgagggtgatattaacaacgaaaaaaaagatagaacaccttatgagtattttatgcaggagcatggaaaaggggagtggaaagccttttgtgccagaataaaaaaattgcctgactataaacaagaaatgctcaagttagagcaatttcccgatgaggaatggtcaaagcaacagttccaaaacaatgcttatacagcccgaaaagcaaagcaaatactttccagcgttttcaaagatgtcgaaacagtaaaaggacaggcaacagctatgctcagacgacactggaaactgaactacctgctcaataaagaggggaaagatataaaagaacgcaaagataacagacaccacgctgtagatgccgtagtaatagccctcactactcctgaattactcaataatcatttaaccaaagtaattaaatacaataatgagcgtgaaaaatttgtcaatatcaattatagtagggacaaagacagaatcgatataaaacaagaatcagtagatattctccaagagccttggcgtaataatcaattaaaagagcaggtaaatttgcacttagaaaaactattggtttcacacaagtctgaagaaaggctttatagcaaacgtagggcaaaaactttaattggtaaaaaagtaaaaacgtggataagcaaaaatggaaagttaagaaaaaaagttaagcccatatttaagctatccgagaaaagtatcatagccccaagaggtaatctacatacacaaccttacaggcaaatcactatgcctttcgataaccacccaagcggatacgaacgtggcgagaaaatagtggtaaaaaagatacttgttgctgagataaagcaagtagatattgcaaacgtacttgacttgataacccaaaagcaactacgaaagtattgggcggaaaaagcacaagccaaaaataaagaccatgaagtacacgccaaagcgtatagcaagcccgaaaatgattttgatgtacctatgcacaaagtaaccgttattatgaagaaacaaccttcacttatcgagattcgaccacacacgccgcaccgtatttttgtggaatcagatagtaactatatcattggtatttatcaggctgaaaaaacagataaaaagggcaaggttactataagttccaaagcagttgcagtaaactttatagatgcaattcgtgccaaaagagctaaaaaacctctcttagctgatgagtttgaaagtatcaaagacaaattgatatatggattaaagcggactatcaaaaagggagatatgtttatcaggtacgacaaaagccctgacgagattgccaactattttgatgatgacaaagaaattttcaatagactttacaaacttacggctatgtctgtaacccagactgatggcatagaccttaacttatcaaagcactatgtaaataatatgacaaaaatcaaaaaaaaggaagatgatggtaatgacgaaccaacagaaaataacacagaaaaacaagaaaaagtcgataaaattgagaaatatactcaaaataatgcttttttgcgaattcgaagtattgccaatttcaaatttgtcaaagtccgcatcgacatcttgggcagaatctctatagcatagcttaccagaaagagagagaaaagattctctgacaaaatttgtgggaaatttcccccagagttcccctcgctaaagcgaggggttaatttaaccccccgctttagcgaggggaactaagcaaggaactactaaaacctttttgcattaatttcgttaattttgctattacccctacactaacaccccatttgtatccatttagcttttaaacttcttacgccatgataaagcgta

SEQ ID NO: 3569 - DNA, 15933 bp, synthetic construct
  source 1..15933: mol_type = other DNA
  misc_feature 1..15933: note = Synthetic
aaaatcgcaatgcttctccgctaataacccaggcgacgatggcaatcgcaactgctaaaggcgtgtaaaccgcacctagctgatcccccagccgtcgcaaagccggtcgtcgctgttccgattcgcgcatcacttgcatgattttggcgtaacgcgagtctaccgccgtcttctcagcgcgaatcgtcagtgcaccatgcccattaattgcacccgacattacggctgagccaaccgctttagacagcacatagggttctcctgtgaggtaggactcatccatggcgctccgcccttcgatgacgattccatcgactgggcagatctcgtgtgggaagacgaccaacacatcgccgaccgcaacttccgccaagggtacatcaatgacttgaccgttggttttgcgatgggcttgcgagggcatgcggcgtgcaagcgcatgcaacgcggatgaagctcgccgcactgcgtaagcctccaacgcctgtccaccagagagcatcagcacaaccagggttccagccaagtactcttgcaaaatgacggccgtgacaatcgaaatgccagccaaaagatcggaactgaaatcaaagctcactaggcgtaccacaagacctgcaaccagcggtacgcccccaacaaccaacgcgatccacaatggcacgagcggccacgagacaccccagctacccggctcgaatcccacagcgatccacaacacgagatgcaccgcgatcgcaatcagcgtgaaagcggcgatcaaccaatcacgcgaatagcgtgccgagggctctgttactgatgattccatgaaggttttctttgcgtggagactccagcttcggttgactcgttgggtatgctatcttcagtctaagtgttagatgatctgccgtggagggggattgttgtcgacccaccatcgatctggcaagctgcgtgccgcgtctggttattcttggccattatttttatactgttatgttttcctgcaataggtgatctgcaacaggcaattgtcaggtcacaggaaaaaccaaaacgattggcacgtttatcacaggaaggcatataccttgacacctgagtcgaaacagttcttgcagcaactcttggcgacgccgggcgtttccggatacgaggcgcccgtgcaacgcgtggtttccgagtacgccaagccgtttgcggactcgcagcagacggacctacatggcaatttgatattggcgcgcaaccccggcaaggagttgcgtgtgatgttggctggtcatgccgaccaaatcggcatgcttgtcgcctacatcgatgacggagggatgatttacgtcaaaacggtgggtggttgggatccgcaacaactcatcgggcaacgagtaatcatctggacacactcgggaccggtttcaggcgttatttctcgtaaagccatccatttgcaaagtgaagaggaacgtaaacaactctccaaaatcgaagatctatgggttgacattggtgcgaaagacaaagccgaagctacaaaaatagttgctattggtgactcggtaacgctgcaacttggcttcttagaattaatgaatggattggcaactgcgccggccatggacaatcgcacgggactctgggtcgtggtcgaagcgttgcggcgggcaactgcattacaaccccattgttcgctctatgcagtttcaacggtgcaggaagaaattggactccgtggcgcgaaaacggcggctttctcagtcgatccgcaaatcggcgtggccgtcgatgtgactcacgccaccgacacaccgaatattgacaagcggatcagtggagaaataaaaatgggaagcggccccgtaatctttcgcgggcccaacatcaacccgaaaatctcgcagcggttcgttgaaatttgcgaacaaacaaaactcccgtaccaaatggctgcgctcgggatcgctgctccgaacgattcgaattcgcttcaggtcaaccgcgccggcgtcgcgacgggacttttgtcaattcccaatcgttatatgcacagtgcagttgaggtcgtgagtctcgtcgatttggagaataccgccgaattattggcccgtttttgcgttacgatctcagacgcagacgagtttcttccttgaccgtatggtagttcactaatcgcgaagccctaaacctggtaatgcgaaaaaacttactggtaccctgggtttgggtacttttatgcgttgtctcaccaagtatagtgagagccagcctcaggttactttgccagcggttcatcgtgtacgggctcggcaggactgagacagtattttcttttttctgcttccgaagatgttttctcgtcctctaggagacacaattatgatgttgagaacggtcttggctttctttgtggcaacggcgtttgcgtcccaatttgcaacgcattcctctgccgatattttgtcattgtattactacaaaacagatataggaggtggaatctttcagtacgatttcacgctgtcactaaccaacgatgacaactcgtatgctccgggtcagggatttaactggatcatatttggcgacgttccttcttccacaagtactctgcccgattttgcattgttgtacgagacatttcccaaccctgatatcatctacacgttttcgggtggcggtcacaacggaccaacgttcttggatattaccaattttgggacgaatggttggattccaattggcgttggcgactcagtaacttggggaggtacgtcagcgtttgacgttccggatggacaattattgttttccacattagtctcaattaacggcgcaacccttaccgacttcaaggtcgccgtacgtgtgcccgaaccagcatcaggattgcttgccgtcggctgcttggtggctgcggcttgccaacgacgtcgccgacgctagatttgtcggcttttggtgaaatatcgaagttctaaaagcgcgttttgcctattgaaaaacgcgctttatttttgcctcgagttagaagttaagaagtatcgagattacttttgatacttccagtttcttgatttgccttcggcgatccattcaactgcggtagcgatgcgatttagccgtgtctcttggcgttttgcttcgataatccattcgatgtattcgcgtttgtgcgagggagcaagccgatcaaagttagccttggctggtttcacagctttgagggccatttcgaagtccttcggcatcggcaaagcttctcgcgatttaaggtttggcggtaatttaataccctcctgatttagcttgactgccttcttcaacaatgcaagaaatttcgcatccgtgggcaagtctttgatgttggtgatatgggcgcagtctgatcctttctccgtcgtaccccatttcaagcgcagttcgttttcgctgtatttcttgttttcgtcgaagatcagcgcacttttccaaaagctgaatccgcagtgttttttgaaggctgccatactgcacaatgggcctttgaagtcgaagctaggcattccccacttaattgtttcttgaacctctgggcagcctttatgcacaaggatgcgcaatttgtttagaatcggcttggcataatccggggcctgttcgatgtatttatccacacgcgggtctttgcttcccatacgtcctccaaaccaacaaccaacaaccaacaactaagaactaagaacaaaacctcacgaaatcagttcgggaattacgtgcgcgggttcaactccagtcagcttttgatcgaggccttgatatttgtacgaaaggcgctcgtgatcgaagccgagcaagtgcaagacggtggcgtggaaatcgcgaatatgtatcggatccttgatgatattgtacgagaagtcatctgtttcgccataaatggttccacccttggcacctccgccagccatccacatggtaaagcaccgcggatgatgatcgcgaccatagttttcttgactcaaaccaccttgtgagtaaatcgtgcggccaaattctcctccccaaatcaccaacgtatcatccaacatgccccgttgttgcaagtcttccaacaaagcgtagcacggttgatccacgtctttgcattggtccggcatgcgaccatttacgttggcatggtgatcccaattgttatgatagatctgcacaaacctcacgcctcgctcgcagagacgccgggccatcaaaactgagttggcaaatgtacccggcttgcgtgcggcctcgccatacaactcaaacaccgacgctggttcggtgcttagatcggtcagttcaggcacactggcctgcatgcggaacgccatttcatattgcatgatccgggtttcggtttgaggatcacccaaatttgcatgatttaattcgttcaaacgattgatgccgcgaatcgaccgctctcgaatctcgcggggcactccgggcggattgttgataaacaaaatcggatcgccttgactgcgcaacgatacaccggcatgttcacccggcaaaaacccactgctccacagccgtgaagagatggcctgctcttgttcccgattcgagggaattgcgaccaggacaacaaacgctggtaaatcgcgattcaatgatcccaagccatacgaggcccacgatcccaaacaggcgcggccggtcacttggttgccggtttgcatggccgcaattgccggttcgtggttgatggcttccgtatgcaagctccgcatccagcaaatctggtcgacctttttcgcgagccacggcaacatctggctattgatccacatgccgcattcaccttcttgcgtgaatttgaatttcgagggagcgatgggaaaacgcgcctgcccgctggtcatggtcgtcaatcgttggccttgccgaatcgagtcaggcaaatccttatcgtaccaatcgttcatggcgggtttgtaatcaaacaaatccatttgagcgggaccgccaaccatgtgcaaatagattacacgcttggcacgcggggtgaaatggatcagcgattgtggctcttgtaattctgctttgccaaatgcttcctgcaagatcaggctcgagagagcagcgccccccaataaatgggagccagacgtgaaaaagcgtcgtcgactaatgatggaatccatgttatttcgtaattgcctcatccaggttcagaaactgttgacacaacatcgtccaggcagctaactcgccaggattcaaatcggatgcgctgggcgattcgccaattgaaatcagtgcctgcgcatcttcaacgttcgcgcggtagtagcccaggtaatcgttgagatcaccaatcaataactcgatctcacaatcagccagatcccgaccaagcacgagcagcgcgatcgaattgagcgattgcggcacattctcctgactgttgcgcaacacatgttgcgccaaattccgcgccgcttcgacaaacagtggatcgtttagggtgaccagagcctgcaacggcgtgttcgttttctctcgcttgaccgtacatacttcccggctcggtgcattaaagatctctaagttgggcggcggtgccatccgtttccaaaaggtgtacagactgcggcggtacagatcttcgccatggctttgccgataatctcgtgtgtctcccccgggcaacccaacaacgtcccatatattttccggttgatatggccgtacgctcggcccatacatcttggggctcaacaggccactcgttttcaaagccaaatcgcgaatcatctcagcatccatgcgaaaacggggcccacgcgacagccactgattgtgcggatcacgctccagcttctccggcgtaaacgcggcggactggcggtaggtcgcgctgaggaaaatttgcttgaagaaacgccgcacgtcccaaccatgttcctggaaatcagtcgcaagccaatccaagagttccgggtgcgagggcaacgcacccatgatgccaaaatcctccgcagtgctgaccagtccttccccaaaaacctcataccagaaccgattcacggtgacccgtgcggtcaacgggttcgcagggtccaaaacccattgcgctaaaccaagtcgattcttaggttgatcgttccgcatcggatgcagagccaccggtgtacccgcatgcaccacctccccctttttatcgtattcgccacgcatcaagatatgtgccatcggctccactccttgacgttcctcttggatgtgcgtcaacggacttcgatttcgaatcgcggcccgctcggcctggagttccgccactttgttagttgcatgcacataatcgacgtcgaataggccaacatacttttcaaatagcgattggcgttgttcatcggtcagctgttcttccggtttcccagcatacaattgcagttcactgttccacacgatcgtggcaatttcatcggaagtcaccacacgctggtacatgcggacctcttggacttgtccgttccaaatcgaagcttgccgccgccgcccgattttggttggtgtggtcgtccgcatcgtcgctccggcctgcaacgtttttacgtcagcggttgtcggttgcaatcgaccatcgatatagatcttgattccctcgggggtccgcgatccatcgtaggtggcaaacacgtggtgccattgatcggatttgagcacaccatctggcgtgcgaactttgagcgaattgcctggccagttatcgatcaaatgtaccgtaatatgcgagccagattggaacaaatcccagccgcggtagccatttggatcgtccatgcgggcaataatcgcaccaaccacgttggtattggctggcttgatccatccgccatagctgaacgcgtcatcgaattcccaatcgcctgccgcgccgaccaagattgcgctttcacccgatagagccggtgctgacccgaatttgccttccacccaattcggtttaccgatgaacatcaaagccgtcgtttgttggccaaacgtcgggatttcgtcaccagccccctcgttcatccgagcatgaatcagcaaaccgtcgcgtgaagcctcgacggaattgccatttgccagtcccgttagcaactcgggcaatttatgctggaacgcttcttttgatcgctgcgtgtaatcactaagggcttgcttcgcctgttctatttcggttggaatcgcgtgccatcgctccaagtcatcggcttgaggcagaaccagactcggcccacgtccatccttcacatttccatccaatgcgggttgggtcgtgttgcgaaagaaggctgcaagcgaataataatcattcatcgaaaccgggtcgaatttgtggtcgtggcactgggcacaattcgtcgtcaaccccagaaacacccaaccaaaagtttgcacgcggtcagcggcatagatggcaaggttttcctcttcaatggtcccaccttcgttcgtcgtgatattgcaacgctgaaaacctgtggcgaccagttgatcgatagtcgggttgggcaacaaatctccggccaattgttccaatacaaattgatcaaaaggttgattagaattgaaagccctgatcacccaatcgcgatacggccacatttcgcgatagttgtcaaaatgcaaaccgtgggtgtcaccataacgcgccgcatctaaccaataacgaccgcgatgttctccccaggcgggctgattcatgagcccatcgatccaagtttccaacgttccgtccgcgtcttgggaataacttgaaacaaacgcggcgatatcgtcagggtgcggaggcaacccagtgatatcaaaatgaagccgacgaaataacacacgcgggtcagctggcggattgggagtcaatccctgctccaacatcttcgccaacacgaagccatcgatttcgtttttcggccagtcggaatttgtcaattccggcgccagcggtttacgcggtggtgaaaacgaccaatgctcgtcataaacggctccctgttcgatccacgcttttaataaggagcgttgctcgtccgtcaattcctttttcatttcggggggaggcatgatctgccgaggacttttcgaaaaaatccgctcgactaacgcgctggattttggatcgccgggctcgattgctcccatctcaatcgcctcttcacgcacgtcgagacgaagatcagcttcgcgggccgccgcgtcaaagccatggcaggcgaaacaatactccgccaaaattgggcggatatcgcgagtgtagctgatcgcatgttcgttcgcctgcgtttcgatcaggtcatgcgactcctgagcctgcacagtcaatgccattagcaaagtcaaacaaagcaaaacgctgctagcgtatacgaattttctcaagccaaacatgcaattaaccagggcaatcatttgagtgccaacgacaagatttcgacgactacttcgcatttccatcctttgcatccgacaaattcaagtccattataaatggtggttattgaattcataagtcgattgacgtccgcttgcctaacaattttgtcgctcaagcttgttgcttgtgaggctacccactctgccaacaaggaataaaccaattattttcacagttttgttggggaaattcccattttccatccaccaccacgccgtcccatatcacatttcttgcctaatttagccgattcaaaaacaacttgacgtcgcgtagaggcataggtacacaagtgttttcgtttttccagaatcggattcccgtcggttcaatgacaatcgccaaactgagtaaattcaaacttcttcccttcagtctgctaactcctgtttcactgatcttggtcgcgatcgttgccgccacgggttgtcaaatggttcacttgatctgtggcagccatcgttgtggaacggttgacgtcgcataccaagcccagccgaatcactctcttttgtcgctggctcgaagccaaagtcccgaaacgtcgagccagttcggttggatttggccaaacagcggcgacgaaccggtcccatacattccgagtgaaggggatattgtcttgatgtcctcatttagcccagtatattcgttgctgttttcgctaggtggcactggacatcctttgcacgcagctatggttgtaaaaaattcgcgtggtgaattggatttgttcgaagtcggtgtgctggacaggcgacgcgtcacgctgtctccgcttgctcagcgatttcatgactactatcgcgagcggacgagcgcgacgatctggatccgttcgttgcgcgtgcctttatgcgaagaaagatcgagggctttgactgcttttgctgagtcccagcacggtaagagtttctcgtacatccgctcggcatcagcagcgattacaggaaatatcggtattccgagcacaccgcagcagggccagtggttctgcagcgagttggtagttcaggcgttaaaggaagccaacttaattgacgagcaagcacggcctgaaggcatggtccccagtgacttctactacaacatgaagattgacttgaatcccttgtggttacctgccgcatcttggaccatcgacccaacccccgacaacgaccgcccctatttagcaccgcgcgtcgcccgttgagtttcgcaactggatctattaactcatagcacccggttgtaccttctcagaacgaatgagctatcgaaaccgttcatgcgttgaagtccttcaaaattggagtcaatcgaaacatgttcgttaagccgttagcgggaggcgttccatggttcgtcataatcgagcgtacgcctacggctaacggttaaacggctaaaaaacggagaaccgtagtgaatgatctaagtgtttgatatgaactcaaaatagctaaggctcataccataatctggatcattttcgctccaattgcctccgccactgaagtcccttcattcgaatgcccaggacttgttgaacgcgcataaaaaaacgcccaactgggggcgtttcagtagatgcgttgttcttgcgaacaggcagagccctgcgcggaaatgtttccacttactgtgataggcgagaaacatcgctctgatacatggcttgattgtagcacggtcgccaattacagtaaaggatccaaatcgcatttctcaccaaaaggcctgccaatgaacgacaatcaaccgtttgaatacacgcttggcttggatatcggagtgtcctcgattggatgggcactcgttgcggaggcaaatggccaacaaaaacctgctcgcttattgagggcaggtgttcatttgtttgaagctggcattgattcgggaaaaaacacgccagctggcgccttagaatcaggtaacgaacaatcactcgctaaagtgaggcgcgatgctcgctctgcaagacggcggggctggcgaaagacggcgcgaaaaagaaaacttctgcgtaccttgattcgacttgggttccttccaaatcccaagggaagactggagacgccaattgaaattgactgctatttaaaagaaattgattcgcaactcaagtctaaatgggaagcgggtgaacgcatatcccactccgagcgccagttactcccttatcgactccgagcggcatgccttgacggacgtctcgaaccaattgaaataggtagggcactataccacttagcccagcgacggggattttacgccaaccgcaagatcgacttatccgaagcggacgctcaagatggcaatggagatggttctgacgaaggatcagaacaacgtcaagacgatctcggaaaagtgaaagccggaatactctctcttgcccaagaaatggacaaagttggcgccagaacgctaggtgagttttttgcttcacttgatccaaccgacccgcagtcgcagcgaatccgaaaccggtacactgaccgaaagatgtaccaagatgaattcaataaaatctgggatgcacagtatccgcacaaccctaacctgttgactaatgaagccaagtcgctgatttatccagccatcttttttcaacgcccattgaagtcgcaaaagcacttgatcggaaaatgttctcttttgcctcacttgcgccgcgccaagatatctaaccgacgttttcagagatttcgaattctgcaacagcttaatgatttgcaaatcattccgactaaaaaggtcgaaatttctggatacgatgccaaaactcggggagtgaaacagaaaaagactgaaattccggacaccaatcaatctcgtcgcagtcttacagatgatgagcgttcgaaagcactaaggttgttggaagatggcgatgccagtttccgcgaaatgcgtaacgcgggcatcggtcccaagctttcgcgtttcaattttgaggaggatgaaagaacagaaaagaaacttattggaaatcgtactgatgccaaattaaaagcaatttttggtccgcagtgggatgagtttactgaggttgaaaaagacgcggtttatgccgattgcgtttcgattcaaaggatagacacgcttgagaagcgtgcaacttcccattggaatttgtcgcctgaaaatgcccgtcgtttggcaacggtcaaatttgaggatgattacggttcgctgtcggtaacggcaatcaatcgtttgcttccccgtttagaaaatggagagcatttggaaacgataaggaatgaactttttccggaccgagtaaagaaaaccgttccagcgtttgatctcctgcctccactggaaaagactgaaatcgatttgccggcaccggcgatacgtcgcgcccttacggaagtgcgcaaagtagtcaatgcaataattcgcaagttcggcaaaccagttcacattcgaattgagttacttcgagaactaaaaaaagggaaacaacaacgcaaagagatttccaagcgaatcggccagaatgaaaaagaacgaaagcttgcaagtgacgaatttaagaagcaatatccccagttcatagagcatggggaagtaagtcgagatgacgtcgaaaagattcggttggcaaatgaatgtggatggatttgtccatacacgggaaggcaattctgttgggacgatttgtttgtcagccacacggttgaagtggaacacatttggcctcgaagccgttcgttggacaattcgtttgccaacaaaacgttgtgtttcgctgaggaaaatcgttccgtcaaaaagaacaaaatgcccagcgaggtttatgatgatcgtcgactgagcgagatccttgaacgagtggccagatttagtggtcggtatcgccaagtgaagatggaaaggttcgaggcaaaagaagttccaagcgattttacgaatcggcactttaacgagtcgagttatattgcaagagcagcaggtcaatatgttgcctatctttacggtggacaaattgacgatgaacgaagacgacgagtccacgtcacatcaggaggggtaacagcttggttacggcgtctttggggatttaaccaattactaggagactccgatgaaaagaaccgtcatgaccatcgccatcatgctatcgatgcaattgtcattgcaatgaccacgccagacacaatacgtagtttgcagaccgccgcagcgcgagccgagcaatttcacaaaatgcgattgttcgattcaatcgaatgccctttcgaactggagcaagtccgcaatatcgtatccggaatcgttgtcagtcatcgacagagccgtcgagtgcgtggaaaactccacaaagactcgatctatagtcggaatatgggaacggaacaatctccacgacatcatattcggaaggccatcgaattgttaacagaaaacgagattgataaaattgtcgacccacgtatcaaggaaattgtcaaggtagcgtgggcggaacgaaaagcgcaaggggcacgaacgatcggccaggcttttggcgagccgacaaaccgccctcaagtacctcatggaaaaggctgggtttatttgaggcgcgtgaggatttccaccggggacaaacctgtcatgattggaggtaaagcgggtgaccagcaattgaatacaaccaacggaagatttgtaaacctgggtgcaaatcaccatatcgccgtttatgaaaccattgatggcaagggcagacgaaagcttcaagaccgcattgtttctctgctcgaagcaatggaacgagttcgcaatggattgccggttgtcgacaagacaaacggaaatgggcagtcgcgatttatattttcattgtgcaaaaacgactttgtcgaaatggacaataacgatttagacgaacgtattatcatgagagtgtcaaatatatcgcatcgctttgatgttgaatgcatcgttcatagtgacggcactcccgcaactcttcgaaaacaattcggcgggagaattaggctctcactctcaaaatggattgccagaaacgccaggaaggtacgcgtaacctatcttggcgaggtggaaaatgccggcggctgagcgcatcgtagaaatttcggaagctatcacacacctctcaactcgtcatgagcaacttgttgtcaaacgtgatagcgaagctgagatttctgttccactcaacgaattggccacgctaattttgagtggtaaaaggtccacgatatctcaaccattactctcgggaataatgcgccacggtggatcggtggttgtttgcgacaatgcatatcagccaattggtttgatgttgcctttaaacgtgcatactctacagacggagcgaattcgagcccaatgcagaagttcacttcctcgctgcaaaagactctggcagcagatagttaagttgaaggtacttgctcaagctggagttttgcaccggagcaccggaaatgatgctggattaaagcatttagcgaccaaagtgttatctggcgatcgaacaaatattgaaggacatgcagcgcagcgctactggcccagagtgttttccgatcccaattttcgccgaaggcgtgaaggtggcggtgccaaccgactgctaaattatggttacgcggtactaagggcggcggttggcagggcaatctgtgcaaccggacttcatccgtcaattggactacaccatcgccatcgaaataacccttggtgccttgcggatgacctcatggagccctaccgaacagtggttgacgaagccgtcgttcaatgggtcgaaaaccgtggccatgattgtccgatgaacggcgagaccaaaacagtattggtttcagctttaacgcaaagagttcagtccggaggtgagacacgaacattattcgcttggattgaacgcactgcttcgacgcttgcgcaagcctatcttgaagagacggaccgcattttttatccggaaggactattcagtggtcacaagaagtaattactcgaaatacagatccatgtggttgttggcgatgttcgatttaccggtgaagaccaaaaccaatcggaaacgctatgcgcgatttcgtaaactgttgttggtcgagggcttcaccatgctccaattttcggtgtatgcacggcactttagcagtgaagaatctgcggacgcgatccgcaggaatattgaaaaccagattccagaaaatggacaagtccggatactccccgtcacggaccgacagttcgcaaaaatggatgtcttttatggcaaaaaacggtgtaaatcagagagacctgctgagcaatatctccttttttagtttgtcaaaaaacgagtttggctttgtgtttttccggtgaatcgcaaaaggtaatgtatcagagcgacgcttcccggcaaaccacagctatcgacggcgacaacaatgtcaccaatagaatgtatcagagcgacgcttcccggcaaaccacagcaaacttcgggcgctggtggaagcggcgaagaatgtatcagagcgacgcttcccggcaaaccacagcatcctttacggctacctcgattttgtcgtcaatgtatcagagcgacgcttcccggcaaaccacagctcccacagcgggtttccctcggtcgaggtaatgtatcagagcgacgcttcccggcaaaccacagcgagctgccgaatagttccacggccaatcagaatgtatcagagcgacgcttcccggcaaaccacagcaaactacacgacgctatcgacgacgctgataatgtatcagagcgacgcttcccggcaaaccacagctcgaatcgcatgaacactcgtgatgactggaatgtatcagagcgacgcttcccggcaaaccacagcgtattgcacgtgcctttgcaccgtgcgagtaatgtatcagagcgacgcttcccggcaaaccacagcggctgcggtcacggggatcgggggtcgttgaatgtatcagagcgacgcttcccggcaaaccacagctgatcctgattggtgtcactgatttgatcgaatgtatcagagcgacgcttcccggcaaaccacagcttggttgccacaatcttcaaacgaagatcaaatgtatcagagcgacgcttcccggcaaaccacagctatcgatcagtaatggacgtgggggccagtaatgtatcagagcgacgcttcccggcaaaccacagcgtgggattgcaccacgaagcccgcaagagaaatgtatcagagcgacgcttcccggcaaaccacagcgtagtcttcgtcttcgatgtcttgcgcgtcaatgtatcagagcgacgcttcccggcaaaccacagcatacgccagaaggatcggcagtgttctttaatgtatcagagcgacgcttcccggcaaaccacagcagccagaattcgacttgacgttgcctagtaatgtatcagagcgacgcttcccggcaaaccacagcggtgcgggagtgcagagttcggaagatgccaacgattttgagacaacgtttgacagataattagtgtagct

SEQ ID NO: 3570 - DNA, 24359 bp, synthetic construct
  misc_feature 1..24359: note = Synthetic
  source 1..24359: mol_type = other DNA
cgttacaaatgttacagcaagcctaataaacgccttttcctgtttactattcttaggcagcaccatatcgtagagttcttcctccgttttcaattccgttggaatacctaaatcatttagcatcttcctcaatttatcgcgtatgtcaaaatagtggaaatcagcacttgacgtgcttatcagcgtggttccaaacttggcatgagtctcgcgcttccatgtgatgccatcgccatattgttggtttgcctcctcgtatgtgattcccttttcctttgcaaaccaaactggcaccaatccatgttcatctactgcgaaatgctccagataaattctttttatctgacctcccttttcgtagtagatagagaagtctggcttatattgagagtgcatctcatctgaaacttgatgctcatagagttcttcatatctatattttacacccagcgaagacagggcaaagcaaattctctgttcctgctcactttttacataaactatgtttccatccatgtcaggtagcagggctttcagttttacacttttctgttccgacaagtcttgccgcctctcatccttgcggcgttcccaatcggcatcttgaatttgataatcaacaaagtactctaccacagcctgctgaaatttcttatcggctattaattcatggtatgtcctaacaaataattcatcagtattatcgcatatcgaaggtttcttgcctgtcacttggcctatcaagtctaaagccaacttgtggaaagtgtaccccctcagcccttcaacacctactctctcggtcagttctgcggctgctttgttggtgtaactgattagcaagattcgcttcgggtcaatacccttacgctctatcaaatacttcaccttgccaacaatcgatgaagtcttgccacttcccgcactactaaccaccagacaattatcctcttccgacacaatagaacgtctctgctgatagtctaaaggataggtcaggcaatggtcaaagaagtctttatttctttccagcctgttctgaatcactttttcattatgctgcttcgtcagagtatgaatttttgcaaagtcatctattagtttcagcatccgttccgtaggaatcaatcggaaagcatccagttttcttcttaatgaatatgcttcattgaatatattacggaaatgattagtgaaattctcttcttctgttcctgtgatgatatgatctctgaagctatgctccaatatttcttctaaatcatcaaaagccctatttcgctctaattccaatctttgctttgacacatcataactgctcatgtcatgatatggctgcatattcgcgatttcgctatttaaattttctgattgtttttcataaatattcctcatagccatcacaaacactatgatagctataactgatataaggctgaatataaatataagcatcaatgctgtgaaacgctttttactttaccttttctaaattctatgcgtagcgaattaaggtcatagtttccataccgatacgtaatttcatcaataaaatctgatgacataaattccgtaggttctcccaaaagcaaaatcacagaatccttaggcattccagtgtgtattgtagcctttcccttattgcttctaactttaaaatactgtatctctccctttgaatcaccataaagagatggcatttcatcttctcgctgaatatcttcaactttaggagccgaagcaaaatagaaaaagcccgaaaacatgatggtgcatataatacccaagataaaaccacaaccaactttcaagacatcagccaaatagccacttttctttttctcgacaaaaataggacgctcattgttataatccctattcgggtcgttacccatattgttatattccatagttatttctttttcttctttgcaacatcccaatcaaaggaatacatctggccttcgatggatatattaacggtcatacgcactcccttgcggtgctttatattcatatagccaatgatgccttcatctgggtgtatagtggtcaatttcagatagccctgcgaaatcgttttcttgtcatcagacatcattttgctaagtgtcatcatctgagtggttgcagccatattggcagccgaagccgcagcatagttgtaggtcgtatgaacttgtgtatatggcaaacgccctgctccgtaagttgtggtgtatgttgtctgatagccagccgtacccgcattcatgccagccgcaaatcccgtcaaagccattgcccaagcctgctgggtcttgaccttcttcatgtatcgctcgtaggtatagaccttcatttcttctgtttcgccatacttattctccagcgatgacgttaccaaagaggggtcgaatagggctgatgtttcaccgagatttttaatgaatatcagaatctggtaattcttgccgtagtcatccttttcaacatagttagtcattcccacaacgaaatcgcctatctgcctataagcccatagccgaccgtcgttgtactctgtcagaacggttgtatcattctccgctgcaagaaattcctgtgcctgaacagaacaggacaaagcaaataatgcgattatcagaaactttctcattatcttatactataagtcttcgccgtcggaatgattatattcattatcatagtacatcagaatgcggtatctcccgtattgctcgtcaatcataaaccagacagaacgcttggaatagaggtcaagcatatacatcgttgcctcatatttgatgtcggcctgctgttcctctgtcggggtttcaagttgttcctcagaatatttttcaagtagttttgctcttaaagcagtctgcatttccaatgtgtctatttgcgtcggcagttgatagaatgctgcctcatagcgtttcttgttgacaagcatttcgtatgaaatatcttcgctgtcggaaagcgtcgggtctgaaagagtggctggcatgtatttcttgttgttcaagaattgctgcacgagtttgttaaacctgatcttaattccggcctcgtcctgtgcaatcgcatcctgtaagacaatacgccaaaccttattgttgtttgtcacgacgctcaatctgacatcatggccgttaaactctcctgtcagacaatcaagtcgctggttatattggaagcccttggctttaagtttctgcatcatggcaggcttcagaccgtcgatgggaataccaagaaacttggtcacgtctttttgagcatttactgccattgaggcaaaaaacagcattacaataatgattttcttcataatctttaatttttaattgttctgaacacaagaggcgcagacattcgccatacatctctcggctcaccacaagccaccttcaaatatggggatgctgcgcccgtttgggttgcagtcccaatattgaaggtttgctctttctcgtgtggtgattgagagattattgagcaatatgtcttgtactccgaagaatacggtgcaaaattacaatttttctgcgaaaatagagtcggatttacaaaaaatcgtatatcgattatggcatttttgctgttttgacccaaaaagggataggcttatagcctaattcccttcctttgtgcctctctttgccctattccgaactgctccttaaaccattgggcaatgggtgtctcgttgatatggagggacaggtttcgtttctcgtcccttgtcacttgtgccgtgacattatcggctaatgcattacgcctatactcgtttgagtgaagccatccactataattgatagtctgcccatgcagcagtttgtcggtctgttctatgttgaagccacactccaggcactcacgctccatgttgaggaaacgcttgaaacttgggaaccatctataagccttatctaatatgcatttcaggttgctcacctcctgttggtgctgctcattgacacggttgagttcccttgtgtggctgtccttcaacttctgcatatcaatgtaaagcctatcaatgcgctcgttcaagtcatccacctctctgtgcagttgggcattttccttctccagtcggttcaccttgttaccaccaagaagagaattaagaccgttgagtgcagtggtggcggtcttggctgcagagttctttagttcctccgtctttgcctctgccttgatacgggcaagggctttctttgcctgttccgcctcggcaatcacctctcttgcctctgcttccttttccagcagttgagtgatatttgcctgcaagtcttcgccttgcgcaatgaggctgcggtaatactcatgcgtggagatgtgctgcgcttccgagcctttgatgccacgctgcagcccgtatgccgccatctgctcggcgtatgtgtcttgatagcgtatcaagttggcacggttcattacctcgtcggcacacagacggggtgcaggtgctttcgtcctatatctcttcttggcggtctgctccttcttctgtttcttccgctccgtctgcacgatggggacgatggtggcatggatatgcggtgtttcctcatccatgtgcagcactgccgacacaacattgtctgtcccataggtcttgcggagccagtcaaggttgtcttggcaccattcatcgagcctgcccgtctgctctatctgttccatatcggcatgggtgccagtcagcactatacggatggcctgtacctggttcttgcctatcttgcgttttagtcctgccgtgttcaggcggtgttggatggctgctgtgcggttacgtaccccatcggggaactggatgagttcacggttaaggtgtgtccttgtcggggcggcattcttcggttgtatggttctctcgatgtgggcagacatgccgctgtccgctccctttgctttctctaagtgtaatactgcgtatcccattctcttgttaagatttattcgtttgacattccgtttcgttggtctcttgtttctgtcggtgttcggctcttgccgacggtcttggcagggtgtccagaggggtgcaacacctcggcctattggggatttttagcacagactctgttgtgcggctcgaaaaatcccctaataggcaacggtatttcccgcctgtgggaaatacccgtgcctgcgccagcatcaagcccgtcgtacattgccgtgccgtgtgcatcgtccgtcctgcggatgacgtgtcctgtgccccgtaaggattgatgaagtctgatagactgatgatttgatgatagacgtatgcaagcgtctggcagtcagtcggatagttcttcatcaaacgctcatcaaatgtctcaccaacaagaaaagaagaaatcgcgtccattctgtctttcttttcatcggcaaggcatctatgatgagggaatgatgaaagtgcaaatcccttgttatcagtatcttctatcttcattcatcaattcatcaaaaactgagggttatacttccaatagtctttctctcttgatggtgtagtaccttcccaccctcgtcactggccgatagtggcaactctggttgaagttctgctcgtaggtcgtataggtcagtgagttggagactggggtgagtttccatatatcctgcaccacctttcggacttgccccttctccaccttcatcatggaacctgcaagcaggggcagcacatcattgaggcagaacgaaacactatccacctccatattgtccattatctcaagaaacaactcacacatctctatctccagtcggttacggttgctgcggatgatggtgcgcagggcatccgtctgtatcagttggggattgaaccacatacggctctccctctcggtggagagttggcgggtagtcagaaaatggaggaaggcgggtatctctgccgtgagtttccgcaggaaatcggtatcgtcgctttccagatgtgaaatcttccgtacccagtagcgtgtctcccctgcatcaatgatgacgggcaggtgctcgttgttggagcatagcacgaactttgagaagaaaggtatctcgtcacgatccttgccctttgcctccaccttatagttgaatgtggtgctgagattcttcaaccgctcagagtcctcacggcgattaagcagaacctcgtccaccatgatgagcagtttgccagcccagtcggaattgaactggctgcggaaatcctcgttggtgttgaacgtgacattgttctggaacacggctttgaggaagttcaaaaagatgctcttgcctgtgttgcgttcctctgacacaagcaagagaatgggcagtttctggacgggctgcaggtagagcagttgcagatagtccatccccaactcgtattgctccccgaaaatgtggtgcacaagtgactcgatgcagggaaaggtaccttgcatcggcttgtggttgattggttcatagaggttaaggaacttgccgactacgggctgatagtccagatgctgcggtacggtgcagaaaccgtcatatttgggaacacacgccatatagtccttgccgtagtcctgtcgcaaggtctcaatgttccaaggaatgcgtttcttgatgtaccctccgcttaggctgggctggttgacgattttgtagagcgtggtgcctacacggatgaattgttctctttcttcttgctggtcttttgtcataagcaattgtttttgtcagtgaatatttgttgttatctctttgggggtgtaagtacgtaagaacggcaaggtggatggatagccgatggtgtgcaggactgcctgccgtcccgcacaccaaactatccctccaactttccgtttccttgtcttgcccctttctctttctctgtcagtttcctgtgccgctcattgcggtcaggataacttcaaacggcttgtggttacgttctatacgctccatcagttccttgcggacttcccttgtctggtaggtgttaagatggaaggaaagcagcatgaccacctccatattatatacggtaaggtactgattttgcttcactttgattgttcgctctgcctcgtagggtttcacaagttcctctttgtagagggctttgatggcgtttctcaacttggggatgaatactccgaacaagtccaccagttcggtctcgctcatccatatctctccactcggtatagtcagttcagtgtactcactatactcactccacttgatgatgtttctctcttccatgtctatgctattttgatgttattgaatgatgcgtttaacttgttacccaacatggttaggtcattatccagtttctgcgtggtaatcttcgcatatatctgagtggtgacgatgttcgtgtgtcccaatacccggctcacactctcaatgggcatgccattcgttaaggccatggtggcaaatccatgccttgcgcagtgtgcagaaatgggcttgtcgatgccgcactccttcatcactggcttcaacttcttgcagacactccaataatttacctcaccaaacaccgatttgggattttccttcggatagtctcggtaacgctctatgatttgcaggggaacctccagcagtttcacttgataaggtactcccgtcttgtgacgtttgccgacaatccatttctcaccgttcacctccacgatgttgtccgttgtcagttccttcaagtccacaaacgacagagcagtgaagttcatgaatacgaagaggtcacggacaaaggcaaggttggcatcctcaaactcatgcgtcatcacggctttaagttcttcttctgtcagaaacgtacgctccttgcacttgggactgatgtggaactgtgcaaagacattgcgctgtatcttgccgttgtcatgggcacggccaacgacacctttcagatgcatacacgtcagccagatggtggacttggctaagtggcggtcgttggcaaggtacacggcaaactccttgatgaagtcgggcgtgagttcctgcattgatatatcagtgcgacggaaattcatttgaagaaaatctgccacatagttcctcgacctcacttgcagtttgtatgttcccaatgccctatccttgccgacacgccgtttcagactctcacaatccttgtcaaaggcacgtagcagggtctcgtactcgctgccgaagccttgataggaattgcgtaccatctctgccgtgacgaatgcctcacggtctgacaagtgctggtagtgcttgataatctgtgcctttatgttgtcaaggtcgcggttcaagtccagtgcctccctcgtcctacctttggcacagttgcccttgacatcccataatgacaacgggatgctacgcttacagctgaactggctctgtgtcccgttgatggtgattctgcccatcactggcacgataccgtcctttaccttactcttgttcgcgtagaacaaaacagaaaacgttgctcttctcatttttaactcagttttaaaattcgggctgcaaaagtaatacctttctgggaataaattgctacgcaaatcacgtcaaatttcggaagttggaacgggaagtgttaaagcggtttgaactgccgcgatatgtcacgaattgcgcaggtcgttaagaaagtttaactttcggagatggccctgtctgggttacgaataagaaacctaactcgttccgcaattcgccgcgatttgcttattgccactttgcgaaatttcctcgttttgcgctcaaatgcctttatttatggggcgaactgcgttaatcatccaaaaatgcttttctaattcagcattatttgatatttttttacaaaatgcatttttatgaaaaatattttaagatgctgttgcaaaatattttaacgtaacatattgaaaaataagggatgtaataaaatacttgtatttaaaatgcaacaatgagtaatgttaattattctctttttatatcaagttaacatattttttttgccattctttcctaaaatagacacttttttttactgttcgtaggtgtattttggtgataattcaaatgacttttcttttttgttatgatatttcattttcgtgctgataactgtcttttgccattcgtataaggatgacatggtaatgtatagcaatgattgttatgttttttgtcatgctcaccatgtcatttgtaagagtgtatttaattatttttttatagtgattttaatgttccttcccaaatgaatgaaatttatttacattacatacttatttcttgtaagtttttttgtaataaatcacaatgtctcgttttcagtaataatattttttcagcaatgttgtttgaggtagttttttatatgcagtagttttatcgtgtcagtgtttaactgatttttttcatgattattatatatgtatgtaaaatcgtattaatatatttttttgttatgtttacaattagtatttttgtatgaggtttctggtgagaaatccttagcctgttacgataggtacgcacttgacagaatgatttacgaatccaatgttgaatgagttggttcaaaatcaaaagattgttaatgtctgtattcttaccgaatataacagatattgcaaatttttaacaatgttgtattttgtttgtgattaagattgtctaatccggctaacttcaaattttcatcttcgtagacaaatctgtaaatctgagtgtgtatttcattttagccactgaaagtgacattaaaaaattatagtatgtttgttcgagtgtaatatcaaggtaaaccgaattacaaattgaaatactatcactttatattttaagaataatataaagttactattttgcatttcgtttacaaatcattattttgaataaaaaaaaccgcggttgtccgcggttttaagaaatcttcggcttatagccttgttgagaaaagtctttctcatcgatattactagtgcaaagttaattatattattttatttatcaaaataaattattaaaaatgagcagcaagattcttggtatcgatttaggaacaaattccatcggtatagcaataagaaatgattatcgcaacgaaaaccttcaagatcagttggagtatttctcctctgacattttcaaagccggtaagggaggtcctaatcagcaggaatcgtatgcaagtgaaaggacgtgtcataggcagagtagacgtttgaaggatacccatcgcagaaagttatgggctacactttcgctgcttatagagtatggtatgtgtcccatgaaagaggatagtctaaagaaatggagcacatataacaaagcccttggactgaagcgtgagtatcctgttgatgacaaggatttcaacagctggatagctttggacttcaatcgagacggtcaaccagactattctagtccgttccaaataagaagcgaattaaccaaacgacagcttgacttgaatctacgtgaggaacgtgagttgcttgggcgtgctctttatcatatagctcaacatcgtggattcaaaagcagtaaaggtgaatcccttgcggatgtagaagtcgttaccgtaaataatgaaattgaagccgtgtatgaagagaaatctgttgacgtgatggcagagatgcaagagtcggagacaaataagtcgaaaggacttgctgcctatatgaatgaacacgggctgaatacagtaggacaagcatacgctttgatggagagagaaggaagacgtattcgcaatctggatggttttcaggctgtaagaagacaactcatggatgaaatcaaatacatctttgaataccagtccggacttcatggtgctaaatatgataattttaaaacacgtgtgctgagtgagaaaaaagacgagggtactattttttataaaaagcctctacgttctcaaaaaggcttggttggaaaatgcacattggaaccgtccaggacgcgttgtctcgtaagccacccggattttgaggagtttcgtgctcgccaagttattaacaacataaagtacaggccttcggatgattcacagtggctcacgcttcccctatctataaaagatgaattatacaataaacttttcgcaggtaaatcaagtagagcacttttctattttaaggaagtcagggaatttattgaggatagactttcgctgcgattgtataatgacgagtctggacgaaacataaattacaaggatgggcaatctatccctgcttgtcctgtaacctaccgattaaggatgatgcttggcgacgattggcagacagtgtcaatatcaggaaccaaagtgcgtctttctaataaaggaaagatgtcacatcaggtgtgctataatgctatcgacatttggaatgtttgtgccaatagccaaatgaatgataatgtcatacttgaaaaaatggctaaaacaatgttcggattcaccgatcagcaagcaaagcaattcaggcttatgtacgctgatatccgacaaggttatgcgatgctgagccataaggcaatcaccaatatcaacaggatgctccgaagaggctacgtctattctgatgctgttatgatggcaaaagtgcctgacttgataaatacgtcagatatagagattgacgaattgataactctatttgacaacgtggtgaagccgagaatagaaaaacagaaaatggttcgaagtgttactaacaggctcattgctgactacaagtcgcatagttacagtaataacggaagatttgcggatcatgactacgattatcagcttgacgagagtgatatacgtgatgtggaaaggatgacggttgaacaaataggcgcaaaggaatggaatttattggcaaccgaagagcaaaaaacgttgttggatgaagttaaaaatctttatcaacaattcttcagccacagggaacgcgactatttcagagtccctaatttgtctgacggtcttgttgaaatgttgtctgagaaatatccttcggtagaaaaaagtgtatgggtaaaaaagctttatcatccttcacagattgacatatataagtttgcaaagaaagagatgtccaaggacggattacctctgctcggtactcctaatgtggggtctatccgcaatcccacagtgatgcgcacactcaatattatgcgtcgaaagctcaactacatgatagaggaacgtatcatagacccaaatgatacgagggttgtcgtagagatgacccgcatcaataacgacacaaatctgcggtgggctatcaacagatataatgaagaacggagaaaacaaaatgaagccattagcagtttgctcaaagaattcataccgcagtttgagaataaagcaccggaagaggcagacatagacaaggcgcgtgattatttcgaccaaataggatgcgagttttattcgttgaaccatgagggtctgaatgaaaagcaactggctgaacaacatgagtactatgacatgattgtcaccaagaacaagatttccaagtccggttttgaaaagtgtgtggataagtataagaagtggaaagaacaggggtgtatctctatttacacgggaaagccaatccgcttcacagacctcttcgacgataatctgtatcaagtagaacacaccattccgaggagtatttcgtttgacgattcggatgttaataaaactatttgtgagcgtcattacaatgctgccataaaagggaacagaataccgacagagttacccaactatgacaaggatgccattatagatggcgtcaagtacacagccataaaaccgcgtttggcatattgggagaagaaggtgcgggattatgaacgacaggttgaattgtggcgctataaagctaagcagtcacaaaccaaagaccgtaaggatttctgcatacaaagaatgcatctgtggcgcatggaactggactattggcgcaacaaactggacaggttcaatattactgaggtgaagcctggttttcgtaatagtcaactcgtcgacacgggcattatcacccgttatgctacgctctatcttaagagtgttttcaagaatgtggatgtgcagaaggggtctgctacagccaaatatcgtaaaatattaggactgcagagcattgaagaaaaaaaagatcgtagcaaccactgtcaccatgctgtggatgcagccgttctcacaactattcctgaagcatctaaacgtgagcgtatgttgaaattgttttatgaaatagaagaggcggaaatgtcacatcatgactgtactcaaaagaagcgtgaactgaatgacgaaatcgccgattgcgaaattgggtctgttacaggtctctatgactatatttcaagtaagattcttgtcaatcatatcactcatgaccgcacgttttccagtacgcatagaaaagagtatcgcaatggacgcccattgaagaaagatggcattgaattatatagcggaggtgatggagtgcgaggtactttgagtaaagagtcgttctatgctgccaacagatatggtgatgagacgtggatggtgatgcgccagagcataaactctttccagaaaatggttgacttagacagtattgtggaccagcatttgcgtgacaatatcaagaatacgatacagttacgaatgcaggagggtgatagttttgccaaagctattgcacagcctatatggctcaccgataagaatggaaatgaaataaaagttgaccgcaatggtcgtccgcttgctcccattagacatgtccgttgcagggcaaaagcaggtcgaggattcctttcttttgacaaagcttttccaattaaagattttagtcaacattccagcaggaaactggttcgactggataatcgtaatcataaacagcatgtctatgttcagaatagcacgaattatctctgcctgatgtatgaaggaataaaaaaaggaaaggttgatcgcgagctacgtctaataagcttatacgatgcggcgcaattggttaatacttatcgaactagaaacttagaagatatcttgtggaacgaaccatattatgcaagtatgaccgtgaaaggactgactgcttatcgtctctctgctgtcataaaagttggtacacgtctcctcttctggaaagagtcaccggatgagattaatcagtttacgtcgcaggaagaactatcaaaacgactgtatgtggttaataaattcaatgttactggttgcgtttatgtttatgtgaagcgtcattccgatgcctctgcagatgaacctatacatttcaatgcaaaccagttaaactgtcttattgaacatcgtgactttgaaataaatcctttgggcgaagttatactgaaagaacaaaatgattaaaaagactttgtattttggtaatccagcctatctgagtttgaaggatgatcagttggtggttaggcttcctgaggtggaaaaggtagatgatttgcctgaaatcatcaggaaaagtgctgtgcgaactatccctattgaggatattggtttcgttgttctcgatcatcgacaaataacaatcacacacgggctgatagagaaactgctggactactctgtcgctgtcatgtcatgtagctgcaatggcatgcctcagggcatgttgttgccgttggcggggaacaccatccagaatgaacggtttaggagtcagctggatgcgtcagtcccactaaaaaaacaactttggcagcagactgttcagcgaaagattgaaaaccaggccatcgctctggcccgctgttccggaattgagaacaggtgtatgcttacgtggagtgatgaggtgaagagtggcgacagtacaaatgtggaagcgagggctgcagtgtactactggaaaaatttctttcctatgtttccggattttataagaaaccgtgaaggagattgcccaaataatctgctcaactatggttatgccatactaagggcagttgtggcacgttcgctggtggtgagcggactgctacctacgttgggtattcatcaccacaatcgatataatgcctattgtctggctgatgacatcatggagccttacaggccttttgtagacgagttagtgtataatatcgtaaatgaattggatggaaatattgaactggacaggagtgtaaaggcaaagctgttggttatcccaacacttgacgttaagataaacgaaagaaaaagtccattaatgatcgctgttgggcagacaacagcctcattggtaaaatgctttcgcggtgaaatgagaaaaatcagttatccggaatttgtatgattcaacggcttagtcaatatcgtgttatgtgggtgatggtgtttttcgatcttccaactacatcaaagaaagagaaaaaggcttatatgtccttcaaaaaatctcttcaaaaagatggcttcactatgttccagttttccatatatgtgagaaactgtgccagtatggagaatgctaatgttcatatgaaaagagttaaaggctttcttcctgaggttggtaatgtgtgcattatgtgcatcactgacaagcagttcggagatattgaggtgtttatcggcaagagacctgcgcctcctaattcacccggctatcaactggagctattctaaaaggaaatcctgtcttttacagaaggattcccttttcagaatgcttttttttagttctaataatacatgtaaagctttagtttacaatgcaatgcatgtatcatgttgtacataatatcgattataaagcaattcccaactcctcttctatgaagatgagattggcttgtgttgtacataatatcgattataaagcaattcccaacttcaaattttcagacacatttcgctgattcgttgtacataatatcgattataaagcaattcccaacacttcagtaacatctgctctgcgtctgatagttgtacataatatcgattataaagcaattcccaactgagaggatttaagcacatatcaatcaacagttgtacataatatcgattataaagcaattcccaacactgttctctctcagtatcttgttgatgctgttgtacataatatcgattataaagcaattcccaacacaatactgtctttttattttttagctcttgttgtacataatatcgattataaagcaattcccaactaatggcgagtttttcgattttgaagaattgttgtacataatatcgattataaagcaattcccaaccatcaagccaaagagcaactataatagtgcaaatttacaattaattatagaatctgacaagttatttgacttttttatattgatactattacttataaatctcgtgtcccgtgtgcttgtcttgtggtctctgtggacgagtgttattgtccagacataaaaaatgagtcctgcgaatcatcgattcgcaggactctgacttgcgcttcaggatgggcttgaaccaacgaccccatgattaacagtcatgtgctctaaccaactgagctactgaagcggttgctttggttttgaaaagcgatgcaaaggtaaggtcttttcttattatctccaaatttatttgagtaaattatcctttttcggacaactttttttgctgctatatggagattagggattatttgcataattttgtgtcattcttatatcaaatttctctttcatgtcctatagaacagcgataatcgggggtggggcggctggcttcttttctgctattgagttgaagtcggtgatgcctgacatgtatgttaagatttttgagcgtggcaggaaggtgctgtctaaggttgagatttccggcggcggacgttgtaactgtaccaattcctttgctgaagtcaagagtctgagtcaggtctatcctcgaggtgataagctgttgaaaagactgtttaagattttcggtccccgtgacgttttcgagtggtttgagtcgcatggtgtgccgctcgtcactcaggatgacaattgtgtctttccgcaagcgcaggacagtcacgtcatcatcgattgttttatgcgtgaggctgagacacgtggagtgaggattgaggtcagtcacaaggtcaggggtatagagagagtcactaaggtgggtgacttccatggcggttctgacgcttttctgatagacggtgaggagtttgacttcgtgattatgacgactggaggcatgtctgacggtgcttcctctttcttccgtgacatgctgggtgagtctatcatcgatcctataccgagtctgttcactttctcaataaacgacgctcgtctccatcacttgatgggactcgtggtggagaatgtgctgacgagtgtgccaggcactaagttcaagtctgagggacctcttctcatcactcattggggtgtgagtggaccggcaatactacgtctgtcatcgtacgccgcccgttatctgagtgagagagactaccgcgcgggactgtcggtcaactggaccggagagcgtaacacggagaatgtgcgtgactatctgtcttctgtcatcagtgagaatcgtagcaagatgctcagctcttacagaccttataatattcagcagagactgtgggattacctgctcttgaagctgggtaagagatgcaggtgggacgagctgggtaataaggatgtcaaccgcctgactgagttgctcactaacgatatatatcagattgacggcaagggcacgttcaaggaggagttcgtcacttgcggtggggtggctcttgacgctgtcaatcccaacacgatggagtgtaagagtgtcagtggactgttcttcgctggtgaggtgctcgacatagacggtgtcactggaggttttaactttcaggctgcttggaccacggcttatgtatgcgcgcatggtgttttaggtaaagtaaataaaggtcaataataattatacgttatgaatctgttgattgagttgctgcaagtggctttaggaagtagggacaggctgtctcgtcagccttctgacagtgactgggagtatgtctttgtcaaagccaaggaacagaccatcgccggtgtcttgtttgacggtatcgagaaactggatgtgtctcagcgtccgtcgaagcatctgctcatgagctggtatgcctacgtggagcgactggagaggagaaacgacaagatgaattatttctcgaggaatgtcatgatgcgtttcatgcaagacggattccgcgtgctggttctcaagggacagggcaacgctatgatgtatgacaatccgagaagacgtcatcctggcgacattgacctttggttgacggttccaggtaagacgccgcgagagggacgtgatgacgtggtgaggtatgtgctgaagtattgtcctacctctcaggtgttataccatcatacggtcttcgatgtgctgacgaagagtgaaggcatcgagatagagcctcattacctgcccacttggctttgtaaccctttcagaaacgctgttctgcagaaatggttcgagaaggaggtggaccgtcagttcgagaacagaaagattgagctgccgggtgacgtcggtttcatctatgtgccgacgaatgacttcaacataacgtttcagctcattcatatctaccgccatctcttcagtgacggcataggactgagacagattatagactattattatctgctcaagcagaatgagcataatgatatgcctgacttgttaagacgtatcgggctgtctgactttaccgccgccctgatgtatgtcttgagtgttgtctgtgatctcgacagaaagtgtatgttgtgtgagccgaacgagaaagatggtgtttttcttttggaagagataatgcgtgccggtaatttcggcctgtatgactcaaggtctgtgttcggcgatgacgagggacgtatcgaccgtttcgtgagacggcagaagcgtctgatgaagttcttgactttttgcccgagtgaggtgttctggagcctttatttcactatctggcagaggtgttggcgtatcaagaaaggttataccacctggtcgggcaggtgacctgtgtctgtgtacggcatgcctttgttctgtcctgctatggatagtgtcagtacggatatgcgtatctgtacgtctgctgccgctatagtctccgcgagtgatgacaccgtagcgcctgtggtaagtacgtcgtctatgattagcaagtgttttcctcgtattatttgtgtgtctttcacgtggaagatgttcttcacattgtcttgtctctcagcttgagtcaggtgtgtttgtgtgacgttgttcgtggttcgtgtcaccgcgttcctcgctatgggtatgccagtctccttacttattcccttcgctatgtattcgcattggttatatcctcttttcagtttcctcttccatgagagcggtaccggaacgataaggtcgatgccgtcgaaaaagcctgattcaagaatctctctcgcgtatactctgccgagatattctcccatgtacggcgccgcattgtatttgagcgcccatatcagtctcctcacgttatctgagtcatagaagaagaaactgacagctttctcgatgggaaatctaccccagaatatctgttccatagggctgtgttcggcgtgatggtagtttgtcctcggtagggagcagaggcatgagaggcagatgtggttctcctgtgtcgacagtctgtcgccgcagcacaagcagtggcgcggaaggaagaagtctgctgtttccttccatgcttgtgttattatttcaaccagtgagcgtctcatagtgttattctctctgactctactttgtcgtgcaggaagatacttgctgactcagtgaatttgtctgtcgactctgtagtgtaatatttgcatgtgccccccttgctcagcctcatgtccatgtctgtatgccttgagagatagtcctcgaggctttccgctatatatttgccttgaggtaccaactggatattctcaggacaatagaggcgtatcttgtcgagtaataaaggatagtgtgtgcatcctaatattatggtgtcgacgagactgtcctgtgcgagcagcttgtctattccgtctttcacgaagtagtcagcccccggcttgtcatactcgttattctcgacgagtggcacccacatgggacatgcttgtcccactaccgtcataccaggatggagcttctctatctccatcttgtatgagtcggagcgtatggtgccttctgtggcgagaacccccacgtgtcgtgtcacggacagcttgcccacgacctcggcggttggtctgatgactcccagcaccctgttgtccggggcgtttgcgggcaggtagctctgttgtatcgttcgcagagccttagccgaagctgtgttgcatccaagtatcacgagtggacagcctatctcgaacagtttcttgacagcctgcagtgtgaactcatacacgacgtcgaacgagcgtgttccgtaaggagccctggcgttatcgcccagataaacataatcatactgcggcatacgttttcttatgccgtcgagtatggtcagtcctccgaatcctgagtcgaatatgcctattggtcccatgtcgtttatttgttcagagcgtttttgactatgtcactgatgtcctgtccctcacctattgacgtgttgatgtatgggtaagcgttacagtctgtgttcaggatgtatgagaatttatactcctcacctatgttgcgtatgacgttgttgagctgctcgtatagaggcttcatggcttctgtctccgcttccttgagggctttctttgcctcgttcttgaactcgatgctttggttcatcagctgctgaagctccttctgtctcttgaacatgatgttctcggggaaactgccctgtccgtcaatatactctgagtatttcttgttgaactcctgctcagcgcgctccatctctttgtcgtatgtctctctgagctcgttgatggtgtttctgactgttgtgtactcaggcattgacttcagtgcctcctcatagctgagaaatccgaaatgctgagtcttgtatatgattttcccaacggtttcagcactcgaagaggtagtggaagcgttatcttccactacctcttgcgctgataccatagttgtaagagctatcagtgtcgctgatactatggttcttttcatatttctggttttatgtgttccgttctaatattacttgatgccgagcttagccttaacctgtgtcgtcacgtctgtgctgagagtctcgctgatgaatggtatacctgatgtcacgtccatgacatagacatatccgccagctacaccgatttccttgatagcttctgtgaccttagttgttatggcctgcatctttgtctgctgtgccttctgaagctcctcttgagaagtctggtagtactgctgcatgcgctgctggagatcctgaagctcagactctctacgctgcttgacggcgtcagggagtgtggcctgattcttctcgtaatcatcgagttttgttttgaactcgtcctgcatacgcttaagctcgtcctcataagtctttgtgagattctgcatctctgtctgcgctgccgtatactccggcattgactggatgattgttgctgagttgacatgtgcgaatttctgtgcgaacacactcacaggaagagccatgagagccgcgatgataattttcttcatttctattcttattatttttagttaatatactttatgtagtgtctgttattggttctgattctttacctataatcaatatttgtatccgagtttcattagtacctcatcgctgatgtcaatctttggcgaggcgtaaatgatactgcctcctgacgcgcggtccaatatcagctggtagcctttttggtctgatatggcttttacggcgctgtagatctcatcgttgataggtgacatcaggctctgacgtttcttgaacagctcaccttcgctgccgaaatacttcttcttcagctcgctggcctgtttctcttttgccattatagcctcctcagctttcgtcttctgagcgtctgacaggaagacggactcggactggtatttcttatacattgtctcaacctcggtgagcagtgagttgacctctccctcccatttcttggatacttggttgagctgttcgtttgctctctcgtaggcaggtatgttcttgagtatatattccatgtccacgagcgcgaacttctgtgcgtcggcagtcattgctgccagcatcactataagtgtcaatacaatttttctcatagtctattatttttagtgcgatgcaaagatatcgttgtttgaactagtcgcatagggaaaagatatatttaacaaggtgaaatccctattcagattaggaatatcagaactcttgtccaaggatgaagtggaactgacttcctccgtatgtcgttgagccgtatatcttatcaaatccgtacgcccagtctatacccatcagaccgaccattggcaagaagattctcacacccactccggcggagcgtttcatgtcgaagatgttaaacttcttgatgtctgtccatgcgttacctccctccataaatgccaaggcatagatgttcgttgagttgttgagcatgagcggatatctgagctccagtgtcatacgtgagtaggcataaccctcataaccgtaaggagtgagtgctccgttgtcatatcctctaagaccgattgtctcttggtaatagctcgttgagtaacctgacataccgtctcctccaacgtagaatgtctcaaacggtgacttcttgttactgttgtagtggccgaggaatcccatgtcgaaacgtgtcatcagtacgaagcatttctgtcctcctgagagcggagtgtagaacttagagttgaatttccacttatggtattcaatccatctgtatttcttttgcatgtcactcatgtagctggcgtcagaagagctcgtggccagattagcgtagtccactccgtcgaagagagagtaaggtggtgtgagtgacacagacgcattgattgtcgatcctcttctcgggaacacctggttgtcgatgttgttacgtgacaactggagtgtcaggttgatgttgttacagttaccgtctgtgatgaggaagtagtcccagtctttgagcatgtaacgtgtgtatgccagtgaggccatgaaactgaagttgttgtctggccagttaagacgctttccccatccaatagacaatccgaacaattgtatgtacttatccgggtcgtagtatgacgagtagttattgtaatagctgttgttgtagtttccatatccgtagagcatggagtagtagctattgtagtaactgctgttgtagtatgagctactgatgtccgtctgtcttgagaagaaggcagacacagagagtgagttaggtcgtttccttccgaaccatgggtcgtagaatgacacgctgtatgactggtagtatgagccgtttgtcgagccgctgatactgaactcctgtccgtcgccttgtggcaggattccacgcctcaccttattctttccgaacaggttgcgcattgagaagtttgtgaacttcagaccgatttttcctattacaccggtctgtccccaaccgagtgagaactcgatctggtcgctggccttaggaacgagaccgaggttgaggtcgacggtaccgtttgtctggtcaggcaccggtctgaagtcgatctgctccgggtcgaagtgtcccatctggccgatctcctgatatgtcatcttgaaggcgtccatgctgaacaagtctccaggcttgagtttcagctcacgtctgatgacctcttcgtagacccttgtgttaccataaatctttatcttgttgatggaagcctgtggtccctcggtgattcttatctcgaggtcgatagagtcgccgtccacgtcaacctcagtaggagacactctgttgaacacatatccctcgttatagtagaggtttgacacggcgtcgtcatcggatttcagtctggcgtcgatatttttcatgttgtacacgtcgcctttcttcatcctcagcaccttgtcggcaagtacgtccgtgttgaagaccgtgttacccacccaggagatgttacgtacgtagtacttattaccctcgtcgatatgcagatagacatcgacgagattgtctccggcgtcgacgacgctgtcggcgtatatgttggcgtcacggaatccgagctcgttatatttttctatcacgcgttccttgtcctcctcatacttttcctgtatgaatttctttgacttgaagaagctcttgaatcccttctcgttggttttcttcag

SEQ ID NO: 3571 - DNA, 24304 bp, synthetic construct
  source 1..24304: mol_type = other DNA
  misc_feature 1..24304: note = Synthetic
gaactcgtcgatgctgttgtcgatgacctccttcagcagcacgtagatgccgtcctcggccagcgagccgtcgcccagcctgccgatgtacatgccggggcggaggcgtatgtgctccgtgccgctcagcgtgcgtatgttgtcgtcgttatagtctaccgcttccgggcctgtaggtagtatgggcccctgtgtttcttctgccatttctgccataggtttctaattgtcagcgcaaagttagcaatttttttgcgaaatagcgcaagaaatgtacttttttttagatttactaagaattaggtatagcatatttcacaaaaagtttgtaactttgcaccctcattaattcaaccacacatgaaaaaactactgtttttactcattgccctgtgcggcacactgttcgtacaggcgcagaatgaagtgatgaaagtgaatctgggcgacaccgtggtgacgctcaagattgctgacatccatgagattacgtttggagttgaggaggaggcaccggccgacaccaccctcttccattccttcaatggatacatcacggtcagtacggcctactttaccgactcctactacggtgatgctgccaagctggctgtctaccgcacgtcagcaggcgagttcatcgtcaccttcagcgaccccgtttggggcgaggccttcttcggccacgtgtccgtaggtcgcgagctgcaggccacgggcatcatcgccatggacaaccaccgcggcggcgtgacggagtatgatgccacgctcagcggcccgatgaccacgccggtcatcaccatccccacggtcatgggcggcacgtccatcaccttccatgtgggcgctgcacccgaggcactgaaggtggccggccagcacaagggcagcatgtcggtcatggtgggcggacagttcggcccctacaccaacgagagcgtcacccacaccatcaccgccaacgaggatggcaccatcgacgtcaccattcctgagtatggtcttacgggaaccgtcatgggcaacctgacgctgggcacctacaccgtgaagggccttgcctggaacgaggagcgccaggccttctaccgcgactacagcgccgacggcctgcagatgcatttcgtcgccgtgaaggacggtgctaccaccctcgatgccaactatgacttcagtgccctgggcaccttagaggtgaagaccggcgagcagggactcaccatcgtcaacaacttccagccgggccgcatgcccttccgcgtggaggccaccttcgtaaagtcgcaggggcggtaacggccagtgctataataaagaggaaaggagagacggacagcctgaatgaaacgactcacagccatcgcattactcacaacagctctgttgcacacggcgtgcacagggctgtttgatggtatctatgacgaggctcccgccccagaccctcaccagacgcacgtcgacagcaccgtggtcagcgggcagctatacatcgatgccaccagctggaccgactggtacttcgtcgacctcgacaccgtgctgcgcgccgcccgccgcggcgacagcagtctcagccccgtcgtcaccgctatggccatacccaccgaagccgtggccgacgatggctcgggcataggcatctatacctactggtacgacgtgtgggacaagggcatcagcgtgaacgagcagcgttccttctaccccacggcgcagcagcccgagcccccgacctggaccttcgccgtgcaccgcaacaacgtgcgcacaaacggcggcgctgcctgcgagacgcagttcaccgacctcagccagctcgacggcctgaccgatgacgaactggccgggctgaccttcacacccgacgcctggacgcagaacgtggtgtgggccatacaggcgcagatgctcaacagcctcatcggcagccagggcatcgccgtgaacccagtcctctcgtcgtggctgcgcctcgacatcccgcccatgccgcctgccttcacgcacaacaaccacgtgttcctgctacagctggccgacggcacatacgccgccctgcagctggccgactacattggccccaccggtgccaagtgctgcctgaccatcaactaccgctacccggtgtaagggggagaatcgttgctttttcccgtgaatatcttggtaaaatcagtttttatgagtatctttgcaaataatttgaaataacaaccactacagacatggctgaaagaacattaacccccactcagatgcatctgttgaagacgttctccttcgatggcagagacgaatatgcacgcgaagtacaggaagtacttactcgtcattttcaggcaaaactggacgcagaagtaaatcgcctttgggaggaaggaacactgagcgatgagaaactggacgaaatagccaaggaagatttgcacgctaaaaaataatggctagactggtacttgtgggagttgtaaagttgtcacatgccgtagcgatgtttacttaattattaagattcatgaatatactacggactctgatgtttgccgccatgctggcgacgggggtggccgccctggcccactcccgcagcaccgtgcatgccgatgccacagagcccgagaacaccgatgccacaccgcgcactgccctcaccgacagcaccttcagcctcgacgaagtagtgatcaccgccacacgcacgccgaagctgctgaaggacgtgcccgtgcagacacgcctcatcagccgacgcgacattgagcgcaccgacgccaccaacgtgcaggacctgctgcagcaggagatgcccggcgtggagttcacctacgccatgaaccagcaggtgcacatgaacctctgcggattcggcggacagggcatcctcttcctcgtcgacggcgagcggctggccggcgagaccatggacgacgttgacttcacccggctcgacatggccggtgtggagcgcatagaatttgtgaagggggcctccagcgccctctacggcagcaacgccggcggcggagtcatcaacatcattacccggcgcgacaccgcatcctggcggctgaacgccaacgcccgcctggcccgccacaacgcacagcgctacggcgccacgctgggccacagccacggcaagtgggccaacgacctgaacgtcgtctacaccaccaccgacaactacagcgtcacgagcgccgcaaacccgcagacgcgtgtcttcagtaccgtctatggcgaccagacgctgaacgtgaaggaccgtctcattttcacaccctgcaaagaactgcggctgacaggccgtgccggctatttctaccgcaccgtcagccgcacacccgagagccccgaccgctaccgcgacttctcagcaggcctgcgggcgcactggctgcccaccgaccaagaccaggtggacgtgagctacagctacgaccagtacgacaagtcgagctactacaagctcaccggcctggacctgcgcaactacagcaacgtgcagaacaccctgcgtgccgtctacagccacagcttccaggataccggcatcctcaccctgggggccgactacacccacgactacctctacaagaccggcatcagcggcagccaccgcgagcaggactgcctcgacgcctttgcacagatggactggaacatcagcgagcagtgggagctggtgggcgccctgcgctacgactacttcagtctgggcgatgagaaccgcctcacgccgaagttcacggctcgctaccgcccccgccatgacctcaccttccgcgtgggctacggcatgggcttccgtgcaccctcgctgaaggagcgctactacgacttcgacatggccggcatttggattgtaaagggcagccccgagctgaaggcggagaccagccacaacatcaacatctcgatggagtggacgaagaagaagtacaacctcaccgtgggcacctactacaaccacatcagcaacaagctcaccacgggcctgccctacgccctgcccggcgacccgcaccagctctacttagactacctgaacctgaagagccacaccgtgtgcggcgccgaggccaccctgcagacccgctggaacaaggagtggtcggcccgtgcctcctatgccgtcaccgccgagatgccgctgaaggacgagcagggcaacaccatcaacaaccagtacctgccggcacgcccacactcgctcaccgcccgcctggactatacccacaccttcagcacccactacaccctcgacgtggcactcagcgggcgcttcctctcggccaccgacagcaaggagtacatcgactactatgacatagcccgcggcacccataccgtcagctaccccgcctacaccctctggaaactcagcaccgtccaccgcataggcaaggccctgaagctcaccctcgccatcgacaacctgctcaactaccagccgcgcttctactacctcaatgcacccgtcaccgacggtgcatcgctgcagttgggcctcagcatcgacatcgaccgcctgtggtagccgttgctgaagagggtgtgtagtctgttttgtcgctgcccttgtgttaagtgtgtgttaaaaaataacttggtacaaatgaattattcactgaccccacccccgacccctcccctacaagggaggggagctgctgccgccttgcccgcagtatcttaatcataccaagttattttttaacggttactaaaaacacattgaaacaggtcgatagaattgtgggtgtgatgataattatgtaattttgcataatgtaattttgcataattatagtattctaatgaaaatgcagcggacgactttgccatccgctgcatttatcatttatcatttaggccgtcggccgccagccgacggccgccctatttcacctcccagatgtcgttggtctcgaggagctcggtgaagttgtgatacttcttctgtgccgacacctcctccagctgctggtaaacggcgtcgttgtaggtgggagcctccacgtcgcgtatcacgccgagggctatggggaagccgtcctcgggtgtcatcatggccagcttcagctgcagcgtgttgtcctcgcagtgggcgtcgtgcaccaggatgtcgtccagcgtgtagccgtcctcgccaatcttcaccaccttcagcccgaagccctgctgcaccagtccgtactcctggttctcgccgaagaccagcttctcgccgtggcggacgtagatggcgttcttgcggcgcccctcgttgttatagacgatgtcgtggcagtggtcgttgaagatgacgcagttctgcagcacctccgtcaccgaggctcccttgtgctcgtaggcagcctgcagcacctcgacggtgcccttggcgtcggtggccacacagcgtgcgaagaaatggccgcgggcgccgaagcacagctctgccgggcggaacgggtcctcgacggtgccgtaggggctcgacttgctgacgaagccgcgggggctggtggggctgtactggcccttcgtcagaccgtagatgcggttgttcagcaggatcatgttcaggtcgatgttacggcggttggcgtgtatgaagtggttgccgccgatggccagtccgtcgccgtcgccgctgacctgccataccgtcagcttcgggttggccaccttggcaccggtggcgatggcggcggcacggccgtggatggtgttcatgccgtaggtagccatgtagtggggcagacggctcgaacagccaatgccgctgatgactgcgatgttctcaggggccacaccgatttcggccattgccttatgcagggaggccaggaagaagtggtcgccacaacccgggcaccaccggggctgacccttcttatagtcttgtgctgtatatgtactcatgtcagtcttacattaatatttatttttttacatgaattaccatgaatgaaacacgaattatacatgaatatattattatctaccgctaattaatttatgaataattcgtgttcaattcgtgaaaattcatgttaaaagaatcattaaatgagtgttttgaagtattccgtcagttcctccactacgaagggctgtcccttcacctggttgaactgtgcgggcgtgaagttatcgaccttcatgcgcaggtaagcggccagctgacccatgttctgttcggccaccaccaccttcttatacttagagagcacctctgccgtgttcttgggcagcgggttcaggtacttgaactgtgccagcgccaccttgtggcctgccgagcgcagctcgtccatggcagcgtgcaggtgaccgtaggtgctgccgaagcctacgatgagcaggtcggcatcggcggcgtcgccctccacctccaggtcgggcaccacgatgttcgctatcttctgctggcgcaggcgcgtcatcaggtcgtggttctcggggttcgtcgagatggcacccgtctgcgagtccttctccagtccgcccaggatgtgtgtgaagccctcgcggcccggcacggcccagtagcgggcgccgttctccgtgcgcatgtagggtgtccactgtccgcgcagctcctccggcacgtagggcgggttgatggtgtcgagcttgctgatgttgggcagccggaaagctcccgagccgttggccacgaaggcatcggtgagcagcaccacgggcgtcatgtgctccagggccatcttgcaggcctggaaggcggcgtcgaagcagtcagtggggctcagggcggcaatgacgggcatggggctctcgccgttgcggccgaagagcacctgcagcaggtccgtctgctcgctcttcgtgggcaggcccgtggcgggaccgccgcgctgcacgtcgatgaccaccaggggcagctccatgatgacgcccaggttcatggcctcgctcttcaggcagatgcccgggccgctggtgctcgtcacgcccagggctccggcgaaggaggctcccagggctgaggcgcagccgctgatctcgtcctcgcactgcacggtgatgacgcccagcgacttgtgcttcgacagctcgtgcaggatgtcggtggccggcgtgatggggtacgagcctaagtacagcttcagcccggcacgctcggcggcggctatcagaccgtaggccgtggccttgttgcccgtgatgtccatatagcggccgggcaccttcaccttcgactccacgcggtacacgttcaccgtcgacgagtgggtgttgtggccgtagtcgtagccggcctgtatcacccggatgttcgcctcggctatggcaggcttcttggcgaacttctcgcgcaggaagttagccaccaggttcaggtcgcggtcgaagagccagcacaccaggcccagggcaaacatgttccggcacttcagtacggacttcatatccatacctgaagccccccctactgcccccgagggggcttctttagtcttgccattcttggatgagtctgtagtagccccctcgggggctgaagggggggccaagacctgcttcaccatcgtcgtcagcgggcactgtatgactcggtcggggtctatgcccatctcgcccaggtagtcctgcgtcttaaactgcgccttctccaggtccttcggcccaaaggagtcggtgtcgatgatgatggtggcgccgggcttggcatagcggtactgcgtcttcagcgcagcggcgttcatggccaccagcacgtcgcacttgtcgccgggcgtgtacacctgtccggcgccgatgtgcacctggaaaccgctcacgcccgtgagcgagccctgcggggcgcggatgtcagcaggatagtcggggaatgtcgagatgccgttaccaacggtggcactgaccgtagagaagatgttgccggccaactgcatgccgtcgccggagtcacctgaaaaacgcacgaccacctggtcgagctccttcacttccaattgttcagccatagcttgtttttattatgtaatgatgtgtcggcccctgccgccctgctcctcagcgcgtgaaggccgtggcgggggcattgtggtaatacagcgtgcaaaggtacaaaaagtttttgaaacgagctcataaaacgacgattaaaactgcgaaaacgtcattttcttcatctgtgtcgccggtgttgacccctgtcgccgccaaagggccttcaccacaacctgctgtccttcactttatagcaagaaaatgcaaaaaatcgtgctacaagtgctacagcaacatgcaaacagctgatttgtagtaaaatagctgtagctcgatgtggaaaaatcgtgctaccatcgtgctaccatcctgctacagctatgccacaaccctcctctgcaccagcgggccgcaccttttcggtacaggtgccgtccggacagggttgaaggccaaccgtgcagggactgaacgcccgccctgctaccttgcgcctacacgcaaaacaccttgcgggccagcgcaaaacaccttgcgccttggcgcaaaatagaagcacctaaatttcagtagtttgtggctgtagcaggatggtagcaggatggtagcatgattttctcgcattgtgctacagataacacgcagattatcaatacatttcggtcaactgtagcacttgtagcacgattttccgtgtttttccgttgaaaagcagggaatgcagagtacagcacgaattattccattctttttcgcatcttttttgtaataatgtggtgaaatacaaattttttttgtacttttgttttccgttaaacgaacctatcctgaaacaaagaagagcggatatgatacggataccacaggcggagggcatagaccgaatgctggaacaattgcatttacttgaaggggcagaatacgctcgccatgtagagcgtattgcccgtagggctgagttccatcttcttgaaggggaggccaatatatttgtggccggaggtgagggcgatgatgacttcacaaaccaactgaatgctgcacgaaaggctgtcgcgctgggatataaagtattcattcttcctaatccgaaaggcatacggactcctgattttatcttcgagcggaaaggaacgtatcgcatttacgatttgaagacaatcagtggtaaagcatcagttgacaaccgcctgaaagaatcggtcggacagaccaatcgggttatcttgaacatgactacggattacaaggcaggaaaactggctcgttccatcatgcgttatttcgagagatatagcgatggcattgaagtagtagtgttccgggggaacaagaagatttccattacccgacaaaccgtagccgataagaattttgtagttaccttctccaagaagtactataaatagaaaaagccactcgaaggtggcttttaaaatggagtagtgtcggtgctgtcttgctcctctcggacttcattgccctcatggcaacgaaaacttaccggatagtcaaagatttctccttgacgctgcaaagatacgaatttttccctaatcttccaaataattccattctttttcgcatcttttttgtaataatgtggtgaaataagaaatattttttgtacttttgcagttgcatagtgtctgcgtccgtgttgtattgaggaagggctacaccatctcactaggtcatgcactggttatccccaaaaatcatgccgtcaactactacaactacgagcacaagaccatgaacgccgtgctacaattcgtgaagcaaaagataccgagaaaaaatattaaatgaaataccattgcctaaaactacctgatcaagagaataataaagagctaacctccacgttctccactaaccagttattcagcggaagcaaaaaaaaccgcggttgtccgcggtttaaagaaatcttcggcttatagccttgttgagaaaagtctttctcatcgatacgggtgcaaagttagcaataatattttaattggcaaaaaaattaaagaaaaaaatgagcagcaagattctgggaatcgatttgggaactaattccatcgggattgcaataagagatatagaccgtggtgagaaccttcaagaccagctggaatatttttcctctgatattttccaagctgggaagggaggacctaaccagcaggaatcgtatgcaagcgaaaggacaagccatcgccaaagcagacgactgaaagacactcaccgcagaaagctgtgggccacattgtcgctgctgattgaatacggaatgtgccccatgaagaaagaaagcctcaagaaatggagtacatacaacaaatctcttgggcttaaacgagagtatcctgttgatgacaaggagttcaacagttggatagcgttggacttcaatcgtgacggccagccagactattccagcccctttcagattcggcgcgaaataaccaaacggcaacttgacttggatagtcgtgaagatcgcgagattctcggacgtgcactctaccatattgcccagcatcgcggcttcaggagcagtaaaggcgaaacattggcagaggcagaagctttgaccgacagaaatgagatggaggctgaacctgacgagaaaacagccgatgtaatggcgggaatgcaagagtcagaaacgaagaagatgaaagaccttatcgcctacatggaggcaaagggactggacaccgtgggacaggcatacgcttctatggaggatgagggtaaacgaattcgcaacaaggaaggctatcaggctgtgagaaggcagttcatggatgaaatcagatacatctttgagcaccaggctggtctccatgttgccaaatacagggactttatgacccggattctcagtgagaagaaaggagagggtaccatcttttacaagaagcctctacgctctcagaagggtctggtaggcaaatgcacattagagccatctaagacgcgttgccccatcagccaccccgactttgaagaatttcgtgcccgacagattatcaacaatataaagtacagaccttcggatgatgcacagtggctgacactgcccaagaacctgaaagaagaaatctatagtaatctcttcgctgggaaatccagcagatccctcttccatttcaaggaggttcgtgagtatctagagaagaaactccaactgaggttacacaatgatgagttaggccggactatcaattataaagatgggcagactatagcaggctgccctgtcacctaccggctaaaaatgatactgggcaatgattggcagacggcttcaattcctggaaccaaggtcagactttccaacaaaggaaaggtgtctcaccaagtatgctatcatgctgttgacatttggaatgtttgtgcaaatagcgaaatagcagaaaagggggaactggaagcaaaggctaagagcattttcggattcactgaccagcaggcaaaacaattcagactcatgtatgccgacatccgtcaaggatatgccatgctaagccataaggccatcgcaaacatcaacaggatgcttcgaaaaggatacatatattctgatgcggtgttaatggctaaagtacccgacctgatagatatgtcggatgccgagattaacgagctgatggcactctttgaaagtatagtgaagccgaaaatagagcaccagaaaagggtacgaagtattgctaacagattgattgctaaatataaatcatacagctacaccaacaacggaaggtttgccgaccatgactatacatatttgcttgacgaaagcgacatacgtgatgtggaaaagacgaccgttgagcaaattggcataaaggagtggagcctaatgtctgacgatgagcaaggggctctgttgaaagaggtgcaagaactctaccagcaattcttcagtagcagggaacgagactatttcaaagtccctcatttgtctgacggtcttatagatttgttatcagagaaatatccatcattagagaaaaaggtatggaaagaaaaactctaccacccctcacagattgatatctatcagtttgctcggaaagagcaaacaaaggatgggcggtcactacttggaactcctaatgtggggtcaattcgcaatcctaccgtgatgcgaactctcaacattctgaggcgcaagctcaactacatgattgaggagcatatcattgaaccggatgacacccggattgttgttgagatgacacgtatcaacaatgacaccaacctgagatgggccatcaacaggtacaacgaagaaaggagaaaccaaaacatggccattagcaacctgctttcggaattcattccacagttcaagcataaggcaccggaagaagccgacatagataaagctcgagactattttgaccaaataggatgcgagttctatgcagtaagccatgaagaactgaatgaaaagcaactgactaagcagcacgaatactatgacatgattgtcactaaagacaaggtttccaagtatgggtttcaaaaagacgtggaaagatataagctatggaaagaccaaggatgtatctcaatatacacaggaaagcccatacgcttttccgatctcttcgacgacaacctttaccaagtagagcacaccatacccaggagcaagtcatttgacgattccgacgcgaacaaaaccatctgcgaacgccattataatgctgcagtcaaagggaacaagatgccaacagaattgcccaactatgacaaagatgtcatcataggtggagtcgagtatactgccatcaaaccgcgtctggcctactgggagaagaaggtgaaagactatgagcatcaggtcgaattgtggcgttacaaggccaaacagtcacaaaccaaagaccgcaaggacttctgcatccaaaggatgcacctttggcgcatggaactggactattggcgcaacaagctcgacaggttcaacatgacagaggtgaagcctggcttccgcaacagccagcttgtagacactggcattatcactcgctatgccacactctatcttaagagcgttttcagaaacgtggacgttcagaaaggaactgccactgccaaatatcgcaagatattagggctgcagagcgttgaagagaaaaaagaccgcagcaaccattgccatcatgccgttgacgctgccatcctcacggtcatccctgtagcagccaagcgtgaacgtatgttgcagttgttctatgagatagaagaggcagagagtgcacatcacgattgctctcagaagaaatatgagttgagtgctgaagtcgccgattgtgaaataggatcagttgcaggtctctacaactatatttctgacaggattctcgtcaatcatataactcatgaccgcacgttctccgttacacgcagaaaagaatatcgtaacggcagacctgtgaggaaaaacggcaaggaactgtactctggaggtgacggagtgcggggagcactaagcacagagtcgttctatgcggctaacaaatatggcgatgagatatggatggtaaaacggcagagtatagatgcttttaagaagatagaggatcttgacaccatcgtagaccagcacctgcgagataatatcaaaaatacgatagagctacgaatgaaagctggcgacagtttttcaaaagccatcgcacagcctatatggctcactgacaaggatggaaaagaaatcaagcatgaccgcaatggccggccacttgcacccattaggcatattcggtgcagagctaaggcaggagtagggtttctctcttttgagaaagctcttccactcaaagatttcatccaacattccagcaagaagctggttcgactgcaaaaccgtgagcacaaacagcatgtatatacaatgaacgactcaatgtatctctgcctaatgtatgaaggaatcaagaaaggaaaagttgatcgcagacttcgtcttgtaagcctgtacgatgcagcgcaaatgattagtatcgctcattcaagaaacgtagaacaggttctttggaacgagccatattatgcaagcttgaccgacaaaggacttacctatcatctttctgcaatcataaaagttggtatgcgtctacttttctgggacaaatcaccagaggagataaaccagtttatgccacaagaagaattggcaaaacggctgttcgtggttagaaagttcaatgctccttctacaatttacgtttatgccaagcatcatgccgatgcctctgaaaacaagccggctcattacactgctaaccagctaaattgtcttatcgaacatcgggattttgaaataacacctctgggtacagtcatactaaaagagcaacatgattaaaaagaccctgtattttggaaatccagcctatcttagcctgaaagatggccagttggtggttaggcttcctgaggtggaaaaggcagacgatttgcctgaagtcattaaaaagagtgctgtgcgtaccatccccattgaggatattggcttcgttgtccttgaccatcggcagataaccattacgcatggactgatagaagaactgctggacaacactgttgcagtcgtatcgtgcgacagcaaaagcatgcctcaaggccttttgctgcctttggcagggaataccattcaaaacgaacgatttagaagtcaactggacgcatcgcttccactcaaaaaacaactctggcaacagaccatccaacaaaagatagaaaaccaggcaaccgctctggctcgttgtcctgaaagcgagaacaggtgtatgttggcgtggagcagagaggtgaagagcggcgacagtaacaatattgaagcaagggctgccgtctattactggaagaacttctttccaatgtttccttgtttcataaggagccgggaaggggattgcccaaacaatctgcttaactatggatatgccattctaagagctgtcgtggcacgctcgctggtggtgagcggactgctgcctacgctgggcatccatcaccataaccgatacaacgcctattgtctggccgatgacatcatggagccttacagaccttttgtcgacgagctggtattcaatattataaccgaacttggagaaagtcttgaacttaacagaagtgttaaggcaaggctgttggctatcccttcacttgatgtgaaagtcaacggaagaaggagtccgctaatgattgctgttggacagaccaccgcttcacttgcaaaatgctttagcggcgaaacaagaaaaatctgttatcccgaatttgtatgattcaacggcttagcgagtatcgagttatgtgggtaatggtatttttcgacctgccaactacaacaaagaaagagaaaaacgcttatatgctcttcaagaagtcgcttcaaaaagatggcttcaccatgttccagttctcaatatacgttaggaactgtgccagcatggaaaatgccaatgttcatatcaagcgagtgaaaggtttccttcctgaggcaggtaatgtatgtattatgtgcatcacggataagcaattcggagatattgagttattcattggtaaaagaccagctccaataaatgcacctggtcaacagttggagctattttaaaaaggagaatcccgctgtctacagcgggatgtgaccttttttaacaccgtttttctgtcctaaaaacacatgtaaaggtctgataaacattacaatacatacgttcaggtgttaatcattacacataatatcgattctgaaagcaattcccaacacaagccatcgcccgccacttcggcaacgaggtgttaatcattacacataatatcgattctgaaagcaattcccaaccgttcgatgagcacgtcatactgatgcctggtgttaatcattacacataatatcgattctgaaagcaattcccaaccatacttgttgagttctgaaatgtcgtcagggtgttaatcattacacataatatcgattctgaaagcaattcccaactggcctgcggctgtaatggtgagcaccacgggtgttaatcattacacataatatcgattctgaaagcaattcccaacacatgctataattggaagttttgatatctggtgttaatcattacacataatatcgattctgaaagcaattcccaactgaatcttaaccactcgaacatggtgcccggtgttaatcattacacataatatcgattctgaaagcaattcccaacccttactatccttattctccttactactaggtgttaatcattacacataatatcgattctgaaagcaattcccaaccccaagtagtataggtagtgacctcatctaggtgttaatcattacacataatatcgattctgaaagcaattcccaacctctgcgcaagccagcggtagacgttgttaggtgttaatcattacacataatatcgattctgaaagcaattcccaacgtactaccttgtgcaggcagcaacgtttgaggtgttaatcattacacataatatcgattctgaaagcaattcccaacactccactaaacagctccaatttaccggcaggtgttaatcattacacataatatcgattctgaaagcaattcccaacaggtcggtgccccaccgctgcatgaactgaggtgttaatcattacacataatatcgattctgaaagcaattcccaaccctcagtgccgcgacaatacacccgcccgtggtgttaatcattacacataatatcgattctgaaagcaattcccaacaattattgaagaacttaataaaagaccaaaggtgttaatcattacacataatatcgattctgaaagcaattcccaacgcatgattctttttctttgataattaaacggtgttaatcattacacataatatcgattctgaaagcaattcccaacacttcaaggtttaatgaagaaaacaaattggtgttaatcattacacataatatcgattctgaaagcaattcccaacacccataaaagcaacacttatgacaccaaaggtgttaatcattacacataatatcgattctgaaagcaattcccaaccgttcatggcaccgggtacggcctgtagtggtgttaatcattacacataatatcgattctgaaagcaattcccaactgcagagtgaagatggagaagttcacggctggtgttaatcattacacataatatcgattctgaaagcaattcccaacaagtcaaagatctcttttcaagtgcaaagatacaactattatctgaatctaccaaggttttccctttctaattattgtttaaacataaatactaacgtgaagaaacgcaggtgggactgccccctgtaattaggatgcactatctgctcaatgagcatgacggtctgataaagtactttagaaagctagtgctggtgaacaacacttacgaatatcaatatgtgatgcgcaccatcgggaagatggcagagaaagtggagaagaaaagcacggcaggatgatggtggtggtgactatctcttcttatacttcttgtcaaacaagtcggaatgggatccggtgtttagcagaaccagaactagttcttgattgcgaatctcccagattaggagccagttgggttggatgtggcactcccattgccccttgcggtcgccagtcagaatatgtgcttgatacttttcttcaagctgttcaccatcgagcaatttgccaacgacggtccacaactcatccatgggcagaccgcgacgcttgcaaagtttcatgtttttttgcattcgcctgtgatgcgcagtttatatttcgtgctcatccttctatctccttaatcaggtcgtcgagactgtcgtattcatatacacgcccttcgtcaaggtcgcgtaaagaacgttcgtaggaagaaaggcactggcgacgaggaagggtgatttttcccacgcccttgaccttgctgatagctttcttgatgtcctttaacatcggcatgtcgtcttatgttaaccaatttctgtcgtagttgaagatggggccggcactgctgccgccctcaaagctccatggttggcgacagcaggctgtggtagacgtcgagcgcctgctgcagttcgctcaggcagatgaactcatcggccgagtgcgagcgtgccgacagtccgggaccgagcttcagcgaggggaagggcatgagggcctggtcgctgagcgtgggcgagccgaagggctgcaggcccatgtcaatgcagcgccgcaccagtgggtggtcgctgtctatcgacgaggagtgcaggcggaagctgcgtgccgtgaggcggcatttcttcattcgctggcacaggaaactgaatacctcctcgttgcggtacagctcgttggtacgcacgtcgagcacgaagtgcaggctgtcgggtaccacgttgtgctgcgtgccgctctgcaccacggtcaccgtcattttcgtgggccccaggagtgggctctcgcgctggaagcggtagtcgcgcaggaaaagcaggtcgtcgagggcttcgtagatggcgttcaccccctcgttgcgggcggcgtgcccgctgacgccgtcggcatatccgtcaatcaccatgagacccttctcggctacggcgggctgcagtccggtgggctcgcccacgatggccacgctcactggcggcagcagcggcagggcgcgcacgatgccgtcctgtccgctcacctcttcttcgcacgatgctaagtatataatattgtacgcgcgcgatttttcggtcatccatcggtaggccatgagcagcgtcaccagtccgccgccgcagtcgttgctgcccagtccgtagagacggtcaccgtcgatgactgcctcgtggggctgtcgtgtccaggtggccacggcgcgcaccgtgtcgatgtgggcattgagcagcagcgtggggcgcccgccgtcgtagtcggggcatacggcccacacgttgttgccctcgcgctgggggtgcagcccccactggtccatgcgctgaaagagcaggctggcggccgccgtctcctggcggctcacgcgtggggtggctatcagctggcgcagcagcgccagtgcatcgtcgaagtagttggtcatggtctttggctttgtcgtttggtgtatgtgtctgctgtcgggggtggtatgtgcgcaaaaagaggactgccttgcggcaatcctcttttctgagagcctcttgtcggattcgaaccaacgaccccgagattacaaatcacgtgctctggccaactgagctaaagaggcggggtgggcaagcggtctgcatcgcgccgctacgaccaagtgcctttgctacgttcccgtcctggaggattcctcaggagctggccgtacaggacttgcccatgtaagtatgttttgctttttaagcgggtgcaaaggtaataaaaaaatggcagtctgcgcgcacctgatggcagttatttacttgcgattaactttttttatcactacaaagactaaaatctgcccatgccgctccgttaactgccaacttttttgtaattttgcaccctgttagaagtgttgagtgatgagtgaagagtgaatgggttactaccgcataaggtaatcataattactcattactaattactcattaagcattaagcattatgcattaagcattaagcattaaaaagatgactggagtagaatatatacagatgaaagccttcgcccgttacgacggtctgaagttgtttgtgctctggctggccagctttgcctgctatgtggcgggttttcgctcgccgggtctggggcttgtggccatggtgctggcgctgttgacgccctttatggcctaccgcatgttgcgccgctatcgcgaggatgtgctcggcggtgccatctccttccgcagggggtggttctatgtcgtgcttctcttcctcaacgccggcctgcttttcgccgttgcccagttcgtgtacttcaactacatggaccagggctacttcatgagcgccatgaccgagatgctcaacacccccgagtcggcggctgccatgaagcagatgggcatgggcgccacgctgaaccagacgctcgacatgatgcgccagatgaggcctatcgacctggtgctcaacatcctgatgtcgaacctgctcattggctgcctcgtggccttgctgctggcagctctcggcaagcgcgacgtgggggaagtgatgagcgggaagtgattactcattactaattaagcattaagaattaagaattaagcattagataaagtggatatttcagtagttatacctctctataatgaagaggagtccatcggcgagctgttcagctggatagaacgcgtgatgcaggagaacaagtttacgtatgaggtcatcttcatcagcgacggcagcaccgaccgctcgtgggacatcatccaggaactgcaccaacggtcgcagtgcgtgaagggcatcaagttccgccgcaactacggcaagagcccggccctctactgcggctttgccaaggcccagggcgacgtggtcatcaccatggatgccgaccttcaggactcgcccgacgagattcctgagctctaccgcatgatcaaggaagagaagtacgacctggtgtcgggctacaagcagaagcgctatgacccgctgtcgaagacgctgcctacgaagctcttcaacgccacggctcgcaaggtgagcggcatcaagaacctgcacgacttcaactgcgggctgaaggcctaccggcgcgaggtggtgaagaacatcgaggtgtacggcgagatgcaccgctacataccctatctggccaagaacgccggcttcgacaagatcggcgagaaggtggtgcaccaccaggcacgcaagtacggcacgtcgaagttcatgggttggaaccgcttcgtcaacggctatctcgacctgctcacgctgtggttcctcagcaccttcggcaagaagcccatgcacgtcttcggcttcctcggctcggtgatgttcttcatcggcttcatcgccttcatcatcctctgcatcagcaagttcatgggcaagatttttatcactgactcgccttacttctacatcgcgctcaccatgatggtgctgggcacgcagctcttcctggccggtttcgtggccgacctggtgagccgctcctcggccggccgcaacgactaccaggttgaggaagtgataggtgataagtgatgataagttagcagcagcatgtaagacaacattgccaagggaataatggttagaaaaagaatagtaatggtgaccgtgatatcacttatcacctatcacttatcactcatcacttcctgttcttccatcaactgtccggtggagaacacggtggccatgcactacgccatactcaacagcgacggcacggagggacagcccgtggacacgctctgggtgtggacgcagcgcagcgacggcaccgacacgctggtgctgaacagcctcaccggcacatcgacgttctcgctgcccgtcagctactcgcaccccgaggatgtgctcgtgttctacatggccgaccgcctgggcataaagacgctcgacacggtgtggataaagaaggacgacataccccacttcgagagcgtggactgcgctgcacacttcttccaccacatcaccgacgtgcgctgcacacacgagggcatcgacagcatcgtcatcaacaaccgcaccgtggactataactccaccgtgacgcacctcaacatctacttcacgccctcgggcatcaacgaaaactgacatgtggccatgactatactgaagaacctcatcaacggccgttgctgccggctgctcggcctggcggccgtcctcgcctgcctgtcggtggctcccgcccgcggccagggcttcctgcgctatgtgcaggactccatcccgctgatgcgcggctttgccgtcagcttcgatgtggccggcgccctgcagatgcagctcagcgactacgggcagtacgagggtgccctgcgcctgaacctgcacgaccagtacttccccaccgttgaggtgggctacggacgggccagccacgacgacgacctcatcaccggcatcagctaccacaccagcgcgccctacttccgactgggcgccgacgtgaacctgatgaaacagaagcacaccggcaaccgcatcttcgccggactgcgctatgccttcacctcgtacaaggtggacatcagccgacagccattccccgaccccacatggaagtgggacaccagctatggcgtgcgcgacgagcgctgctaccagcactgggccgaggtggtggtgggcatcgacgccaaggtgttcggacccctgcacctgggctggaccgtgcgctaccgccggcgcctggcccacgacgacgggcgcacaggcaagacctggtacgtgccgggctacggcatccaggagagcacgcgactagggtacaccttcaatgccatcattgacatctgagtaatgcttaatgcttaattgaccgacttatcattcatcacctttatgaagcgcaaatcactctattggcagctgccgttgctcctgctgctcattgtggggaccatctacatagcccttcagcagcggagggaggacgcggcacaggcatccgccacgttccagcacgacgaaggcctcatcttcggcaccgtctaccgactgacctacgccgccgacagcagcctgcaggcgcaggtggagcaggcgctgcagcaggtggaccgtgagttctcgatgttcaacgagcagagcaccgtggccgccatcaaccgcggcgagcagccgcagctcagtgccatgtaccaggaggtgtaccagctggcacagcaggtcagcgccgacaccgacggggccttcgacatcaccgtggcaccgctggtcaacgcctggggcttcggcttcaagacggagcagatgcccacgcccgagcaggtggacagcctgttgcagatacgctcgcagctcgactacagcgccattgccaagggctatggctgcgatgtggccgcccgtgtgctcagccagcacggcgtcagcgactacatggtggagattggcggcgaggtggttacctgtggccacaaccccaagggcgagccctggcgggtgggagtgagcaagcccaccgagaacgaggacgaagccgccgagctgcaggcggtgctcaccgtcagcaacgccgccatggccaccagcggcaactaccgtcgcttctactataagggcgggcgcaagtatgcccacaccatcgacccccgcactggctatcccgtgcagcacgagctgctctccgccaccgtcatcgcacccacctgcgccgtggccgacgcctacgccaccgccttcatggtgctcggcctgcagggggcacagcagctgctgcagcgtcaccccgagatgaaggcctacctcatctacaccgaccagcagggacagctcagcgtgtggcactccgagcagttggacatctcttaatgagtaatgagtaattagtaattgctaattattaaaatagtgtttcagctctacgaccatctccttcagttccagctgttccagggcctcagccgcaccgagttgctgcagctggcgggcagcacgaagttcggtttccacaccgagccgacgggccggacgctggtcagcgagggcgatgcctgccgccagctgttcttcctcatcaagggccgtctggagctgaccacacgcagtgccgacggcggctatcggctcaccgaacagctctcagccccgtggctgctgcagcccgaggcgctcttcggccccagccccgtctatagcagcaactgtcgcacgctcggcaactgccagctcatcaccctgtcgaaggacgaggtgctgcggctgctcgacgacttcctcatcatccgtctgaacctgctcaacctgctggccctgctgacccagcgccgccggcagctgcagtggcgcagtgccccgcagtcgctgcgcgagcgcttcgtccgcttcctcgccgcccgctcggcctatcccgcagggccgaagcagctgcacatactcatgacgcgcctggcacaggagctgggctgcaaccgcctgagcgtttcgcagatgctcaaccagctgcagggcgacgaactgctgcagctgcaccgaggccgcatcgacgtgccatcgctcgagcgactgctgcaagggtgatgacggcgtttacaggcgattgtcactttcttgaagaatctttctttcatatcactaacaacaaaaaaccatgaag

SEQ ID NO: 3572 - DNA, 23822 bp, synthetic construct
  source 1..23822: mol_type = other DNA
  misc_feature 1..23822: note = Synthetic
agtgccacgcttcccatcatgattgataccgaggatgtggacgaaagttccagtcctcttccggaggctgcagaagccggtgccgcggagaaagccgatcaaaccatggaaattgatgcggattcactggttaccggcgatgtcggcgatcaactggaggatgcctctgcagaaatcggctccacccccgaccaaaccatgaagattgatcccgctgcactcgtgaccggcgatgtcggggaggaactttccaaggccgatgccccggagcccaccagtgatcagaccatgaaaattgacccggattccctggtcaccggggatgtgggagagcaattgaatgccgctgacacgctcccgattgagggacaggcgattgagggcaaggatcagaccatgcagatcgatccggattccctggtcaccggggatgtcggtgaacagcttgccgaagctgaaaccgatcaaccggaaggaaaagatcagaccatgcccatcgatgccgatgcggctgcggtggctgatgtggatgttgaaaaacatggcgaggccctggcgaaagaaaccatgcaaatggatgtgggtgaaattgccgccgctgacacgaactccggaacacatgataaacgcatggccatggaaaccatgcagatggatccctccgagtttaatgcggaaacccagcaggaaattcctctgcccgaggaggacgaggacgaccggaacaagaccattaacctcgcccagcctgcggccacggctgcggaggaagacccggatctgacaaaggaacagatggaggaatccttcaacgctatgaccatggaaatggaccctgcggtgttggcagacgccatgaaggacctggaagcgaagaaagaagcggcgcaggaggaggaggatggtctggaccagaccatggatttgacggccgaccggccgaagaccatcatgatccgccgcccttccaaagaagccggatccatgaccccgaccgtcaaggctgttcgccccgatgcggccaccgttcgtaccgcccgacccgtcaccgccaatccgacggaggcaaaagaagggaccagcaggatcgatgtcccggaaggcgaggccaccaaagaaggaaaaaccatcaaattgcgccgcccttcaggcggaggatcaagtgcagcaccggtcagccgggtggcatccggagccggtctgaccatctcagcggatggccgctatgtcgcggggccgaaaaaacaggccgaactgggcggaggctggcttgcagttgcggttctgaccttcctcatctcccttggtgcaatttggtccgtggtctctatccagcagacagaactccccatgccgggccggatggtgggcccgaacaaccagatcctgccggctcctccggcaaactaatctgtttatttccgaaaaatctcgcgccccgggttgacccggggcgcaattgctttattctatgccttcatttttaaaccaaggagtcctccaatggcaggaaaaacgattgaagtaaatgcatccaactggcaacaggaagttgacagttcatctgtacccgttttggtggatttctgggctgaatggtgcggtccctgccgcgcaattattccaaccctggaacagctggctgatgattatgacggaaagctcaccgtggcaaaagtcaacgtggacgagaaccgtgaacttgcccagaaattcggcgtacgctccattccctttctgctgatcgtcaaagacggcgaagtggtggagaacatggtgggtgccctgggcaaaccggagttcgtggcaaaaattgagccacatctttgattcaatgtgagcattccaccatttggtgtttctatgcgcccatggcgagtgtgtaaacaggtcctgatcacctgcccgcttttgatttggagcgggtgtagcgatgtggaaacagatcccatacaggaagcgaaggatgcaacggttgaagcttcccattcggtgggcaacgcagtgagagaatcagtgaacgacacggcagaagccgtggaggacctggccaatgaggtatccgatgtggtggaagacaccatgaacgatgctgcaggcgtagtgaaagagatggcagaatctgtggaagatgctgtgacgcctgtcgaaacggactgagtatttttctcttcaggatcctctatgagacacccggtttcaccgggtgtttttcatttttgagggctggttccaaccagaccacacgttcctccttgatcgcagggttgtggcaccctgtccttttcggacagaaagtggactgtattcttgagacatccgtccgggacggtacagaaaccccatggtccaagattcagagctactaatcacagatggaaatggggctgtagccgatgtggcttaccgcctgaatgatgtctgcgcactgtatccgatcaccccttcctccccgataggtgaggctgcggacgcatggagtgctgccggacggaaaaatctctggggtggcataccagaggttgtggaaatgcaaagtgaagcaggggcggcgggagccctgcacggtgcattgcaaggaggggcactggccaccacgtttacatcctctcaaggccttctgctgatgctgccttcgatgtttaaaatcgccggagaactgactccctgtgtgatccatgtggccgcccgggcggttgcgacccatgccctctccattttcggcgatcattcggacctgatggcggttcgttccgctgggtggggtatgctcatggcctccacggttcaggaggcacacgatttcgcgcttctcgctcaggcggtcagcctggaaacccggatcccgtttcttcatggctttgacgggttccgcacctcgcatgaggtacgtccgatccacagactttcggatgaggatctcaatacaatcctttcaccggaacacctgcttgcacatcgtcaacgagccctttctcccgaccatccggtgatccggggaacctcgcagaatccggatgtcttctttcaagggcgagaagcctcaaaccgcatgtacctcccggttccagacacactgcaagccgtcatggaccggttcgcatccctgacacgcagacggtatcaggtaatgacgtataccggtcacgaacaggcagaccgggtcctggtcatcatgggttcaggtgcggaaacggccgaagagacggtccgacaccttgtcgataccggagaacgggtgggtgttctgaaggtaactctgttccgcccgtggccaaaagagctctttctcaatgcacttccctccagtgtcaccaagctcgcggttctggaccggaccaaagagccgggagggagcggagaacctctttttctggatgtatcctccacgctgcaacaggcaggtcgcccgattcaggtctcgggcggtcgttacggactgggctccaaagaattcaccccagcgatggtcaaagccgttttcgaccatctcaaggccccggctcctccatctgaattcaccgtgggcattcgggatgatgtgacccatctcagcctggatgtagatgatgaccttcctctggaggcgaaggatcagacccgggcattgttttatggactgggatccgacggtaccgtcagcgccaccaaaaacacgcttaagattctggggcagattccgggcatgcatgctcagggatactttgtgtacgactccaacaagtcaggtgcgcgaacggtttcccatctccgctttggtgaacgtgaaatcaaagccccctacctgatcaattccgcaaccttcattgcctgtcattctttcgcgtttacgaaacggtacgaacttctcgaccgggcccaggaaggtgccacccttttactgaacagcccccacggcccggacacggtgttgaaccatcttcctgctgaaatgctggacacgctcctccggaagaatctttcgttatgggtgttggacggagcaagaatcgcgagggaatgcggattaggggggcggatcaataccgtgatgcaaaccgggttcttcctgctatgcggactgctgccgaaggagcaggcgatagaggccatttcggatttgatccgacagacctacgggaaaaagggcacatcaatcctggaggcaaacctgaaagccgttcgcgaagcagaagccgcactcttcccggtggacgtctccatggctccacgtcacccgctgcccaggcaagaggtggttccaaagcaagcgccggactttgtacaggccgtgacggcccctctgcttgcggaacagggtgacaccctccccgtcagtgcgctgcccatggatggaacctggccggtggggaccagtcagtggaacgaacgggacctatcctccacggttccggaatggagggcggacctctgcattcaatgcggacaatgtgctgtcatctgtccgcatggggtcattcaggtcaaacaggcggcgagcgaagatctgaaagcctcacctgaaaccttccccaccccaacgctgcggggaagcgaccgtgatgaccgccactacctgctgcagcttgacctgccccagtgtaccggatgcgggctttgcattgagatctgccctgcaaaaagcaagacacaggcaaatctgaaggcgctgatgccggttcagaaagaggagattctcgacagggaaaccgtgcacctggactttttccggtcggtccccgcccagcaggaacagacccagaaccggaccctgcggggtgtccaattcctcccgcaacgatttgagtatcccggagcctgtgccggctgtggagaaactgccccgttgaaactattgagtcaattgttcggagaccgcatgctggtggccaatgcgaccggctgctcctccatttttggcggcaatctccctaccacaccctggactgttgacagcgaaggacggggaccggcatgggcgaattcgctctttgaggacaacgctgagttcggcttgggcttccggttggcaagtgatgtgaaagctcagcttgcggatgcagggttaaagcagctacttggagaagaagagaaaagcctctcagatgtactgggtacagaaccgaccgtacccagtgaattcaaggcaagacgggagaaactgaacaacattgcacgccgtctcgacacacaccccaaccgcgaacaggcagaggccacaaaaatccttctcgaagctctggtaccaaagtcggtgtggattgttggtggagacggatgggcgaccgacattggattcggaggtctcgatcatgtcctctgcagtggtcggaatgtgaacattctcgtcctagataccgaggtgtattccaacacgggtggacaggcgtcaaaatccaccccattgggggcagtagccaaatttgccgcagccggaaaagccaccggaaaaaccgacctcgccctgcaggcgattctcaaacggaatgtctatgtcggcaccatcgccctgggagccaaacttccccaggccctgcggaccctgcaggaggcggacgcctgggacggtccctctctgatcctgtcctacagcccgtgtattgcccatggctatcctctctcccaatccctgaaccagacacagaaggccgtactaagcggacactggcccctcttccgttacaatccggcgttaagaggaaccgggaaacccctgctcacgatggacagcccggaggaacccgatctctcgttacatgattacacccaaggcgaactccgctacaagctcctggaaatgacccaacctggaagagcgcaagaactttccgcggaagcatcaaacgacatccgtgagcgtctgaggctcttgaaggccatctcggaaatggacacgtggaatgaatcacaggactgcgggacgcagtccctccgccagttctgcaattccggagcgacctcgtctcgaggtcgagattcataggactgcgggacgcagtccctcctcaaggtctacacgtcctatctggactgaagcacctgagccaccaaccatccggtgtagccaaggaatacagagaggagaaatccgccttcccagcggttaatccggccggctccctttcttccccagcccacaatgaacagagaaagcgtcagcagggacatgaccctgaaatcccgttccagaataccgggttcgaggggaaaaggatgaatggtggccgcaacgcccaccacggcaagagtgttgaacatgttcgagcccacgacgttgcccatggccagttcatgctcccctttgcggacggctgccaatgtggaggccagttcagggagcgaggtgccgatggccaccaccgttagcccgataattaactcactcactcgggccagcactgctaattccacagctccccacaccagaattcgggagctgaccatcaggagaatcagtccgaggagaaggttcagtaccgcttttcctttggtaccgggttcttccggcagctcacttttcatctccttcagcagatcatcctccggacgcttcagggcaagccagaccgtgaatcccatggtcagcacaaacacggccagcatgatcagaccgtccatccggctcagctccagatcccaaagcaggaaaaaggagagcagcgtgaccccgcagagcagggggagttccctgcgcaggagtttggacgtgacccggatgggaatgatcaatgccgtggtacccagaataaacgcaacattggcaatattggacccgtaggcatttccaagtgccagagcgggtttaccatccaccgcggaaaatccggacaccaccaattcaggtgccgaagtaccgaacccgacgatcaccatcccgatgaccagtggggaaatcccgaagatgcgggccagacccgcagatccatccacaaaacggtccgagctccagatgaggacacacaatcctcccacgaccgccaggatgggcaggaaaaccgtcaggacgttctcctgtaatcagtcatcgtagtccaaatcctcttcatcctcctccgggatgaaatcaggatcctcccgatagggagagaccgattgaccaggttcaaattctttctgacgccagtattcgcccagcacaattcctgtcgcggtggccacattcagactctcgacattttcagaaccgggaattttcacgacaacgtccgccgcctcgatgaggaaggaactcagcccgctggattccggtcccatcatgaggagaattttgtcgggaagttcggttttgtacagattctctccctcatggctgctggtcgccaccaacgtgtatccggcttctttgaaggtgggtagggcatcactgagacgtccgccgtcaacaaactgcacaaactcccctcccccttctgccgacctgagggccgcaccactctgggcggtcagtgcatcattcaccagcagaccctccacgccaaaatgcgcgcaggttctgagaatagatcccacattgtgcggattgccaagtcgttccaacgccaccagacagtccgtgtccaggtccagcgaggcgtccaggtattcctgaatggtgaagggatcgattttcttcaccaggaaacatactccctgatggccacgggtctctgcaattttgtccaattcaaatttgtccacaatgcggtaggctttccgggcctgtgcacaggctttcatgatgtagccaaaccggtacgccacttcttcggcaaaataggcgcggatgatctgatccggtcgattttcaaaaaaggctctacaggcattcaccccgaaaattttcatttccattgggtcttgcgtgacgggacggcggggccgcgtatcccggcgtggagaagaggaataaggttgatctgggtccattttctattgggggtaactagtgtcgacgctccacttcgaaccgcaaaggtctgccgtccgaagtaaaaggattatgcaatggtgatggaagcggccaattcagcctccacttcctcggacagttgggccacaaactcgtcagagggtgactgattcaatttcaggatcgcaatcgatttcgcaccggttccgtcgtgcgggttgcggacatcgtcaatgttaatacccgcttccgccaccatgcgggcaatggtgccaagcactccgggacggtctgcaaagctgacgaccagagtatgccctttgggatcgaagtacagtttctcgaaatcattgatacgggaaaccatcacctggttttccgcaacagtccctcgaacggataccgtgatacgaccggctgatccgcagtcggctgtcaggtcgacggtgatcgaatttccgtatcccttccggttgtccacgtttcggtcacagtattcaatgccatgatcttcgagcacgcccaatgcagcacgatgatccagggagcggtcaaaatccgggctcaatgctgtcaccatgggcaccaccaaccagtccgagtacggtgcgagttgtccgtagacgctggtctcaagaagtttgagctgtgaattgcatcccaccagtccgcgggccagagcggtcaaggtgtaggcaagatccccatacgcctcatccaggccttccggtatgtcgcggttcacaatgtaagaggtgatgcctttctcatcaaaatcgaccagaattttcgcggccatgcgggctgcattctggttcgcttccacggtgctggcaccgaggtggggcaacataatgtcggcgatgtcggcgatgggtttgtctcccgcttcgtctttggggtacacatcgttcaggaagcggatatttttggttttcttcagttcccgaagatcgtcatccacgaggattccggaccgtgcgcagttgatcagtgaagcaccgtctttcatcttagaaagcagatcggtgttcagcaggccacgggtcgcgtcattttccggaatgtgcagggtgatgtagtccgcctgttcaaacagctcttccagagagaccagggtaacgccaagatcatctgcacggtctttgctgatcatcgggtcgaaccccagaatgttcatatcgaaaccagacacacgttccacggtcaggcgtccgatgtgccccagcccgaccacgccaagcgttttaccggtgatttcgcgtcccatgaaggagcttttctcccattttcctgcgcggcaggaggcatccgccggaatgagatgccgggcatcggccaacatcagcgccaccacttcttccgccacggcattggagttcgctccgggggtattcatgacgtcaattccccgcttgcgggcggcctgaatatcaatcgtattgtacccggctcccgcacggataatcactttgagtgcaggaaaggcctccaacaccgcttcggtcaccttttcactgcggacaatcagcgcgtaggtatcggcatgttccgccgccagttccagaagatcggctccgggtgactggagcacgtcatatcccccgtgttcagtgagtagagtacgggcaacagcatcaagtttcgtggggatcagtacttttttcatctatcaatattacaggcaggtttttggaaagaccctgcctatacggcctgacgtcaaaggattcaatcgcctaccgaaagtatttcagtccgtgcagtaccttaagtgccaaactaccgaatcaaggattgcaaaattcttcatccaaactctttgacgtcattcattttcaccagtcgtcacacatcacagctcaagagcatgctccctacatcccatccttgctagcctttctaagttttgcaggatccactagggaatgaatctccagaattcaaaaacttctattatcacccttaacccaatgggattattaggtatcgttgctccattctttcgcagattttgaagagagagaatgaaattatttacgtgaattgagtaattttggtctggtttagaagcttgatctgcatttcaataaacattgcaccgtcaatcataaccataggaaggagtacggaatgtcacgcacactaggattagatctagggaccaatagtataggctgggccgtaatcgacagtgcacatggaggtggtgtcgtagcaaagggagttcaggttttcccaaaaggggttggtgaggaaggtggaagagaagtttcagttgcttcagaacgaacaggctaccgttcagcaagaaggatcaaacaacgtagaaaactccggaagcaaaacactctgaaagaactgattcattttcagttttgcccagagatctctaaaaaggatattgacctttggaaagagaaaaaagtttatcctgcccatcctggctttgtgaattggctgagatgcgtagagaagcttccagatggcaaagaaggaaacccttatgcctatcgttggtgggttgccactcatcacttggatctttcggtgcctgaaaatcgctacatccttggtcgggcattttatcatctcgcccaacgtcgtggatataagagtaaccggatttcaggggaagaaaaagatgggaaggtgatgggagccatctccgcccttcatgagaagatgaatggacggacgttggggcagtattactatgaggattgcttcgggaaagcacctgtcaggggcgaaggacactacacatccagatccgactatgaatcagaattcagcgccatctgcaaaaagcaaaatctttcggaagagatgaccgatgccattcgaaatgcaattttttaccaacgtccgctgaggtcacaaaaagaaacggttggcccctgccttctagaacccaaaaaaaagcgggtccccgtatcacatccggcatacgagcgtttccggctattacagtttttaaataatgtccgtatccgccctcagggagacaatgtcccccggatgctcaacatggaggagcgagaaaaaggaattaagtggctttcctccttaaagcgtacagaaaaattcgagaaactggcaaaaaaactgactccgcgaaaagcctcttgttcctttggagaaaagcaaaatgagatggagatccaaacctggggattcaattttcgaaaagatgcaggcgttcctgaaagtacgaccacctcaactctgatcaagctgtttggcgaagagtatccagcagggatacggaagatatacagaaaatctggtgggaaaacggatgcagagatcgtcagcgatatctggcacgccatgtacagctttgatgatgacaacatactgaacgaatacgcccgggaaaaactcggactgctggatgacaaccaacggattgaattttgcaagccactcaagcaggggtacgggacactgagtctggcggcaatcaggaagatcaatccttggcttgagaaagggcttatatattctcatgctgtgtatctggcgaacctgcccacgatcttcagaaaagcaggaaaggaatggaacgtacatactgaagagatcgcgagtgatattggacagatcatcgctacccagcgtgaaaacacagccatccggagtgcggcgaatgatctccgaaggcatctgatacaagaggaagtcaaggatctcagcatgtacctttcagagggcagaaacatccgccaatgtcagtcggtattgggaaactgtattcagatggagctaggtagaaaccgttgggccaatacttcagaacaagatcaggagaacgttatcagtcaggcacttgaaatagtgaaatcgtgctgggactctgaacacggcacttcagcaacggtacctatcctgaatcagacagcacgtatccttcactacctgcaggaagaacatggaatacctgaatcatatcttgagatggtgtatcacccttccgtaatcgaaacctatccagatcagaatgaaaaactcgcctcgccccggattccctcgattcgtaaccccgtcttcatgcggaccatgttccgcttacgggcgatcataaatgagctgattgaaaccggcgtgattgattcgcaaacccgcatccgggtagaaatggcaagagacctgaatgatgccaatcaacgagccgccatcgaacgttttcagcgaatgcgggagaaaatgaggtccgaatattccaaggccattgaggaggccggattcaaccctactccaacccttatcctcaaatatcagctatggatcgagcaggaacgtcgatgtctttacaccgatcaacagatcggtcttaccgaattccttggggaaaatcccgcatacgatatcgagcacaccattcccagaagcaggcggttcgatgactcgcaaacgaacctcaccctgtgctcccgggagttcaatcgtgagataaaggggcgcaaacttccacaggagctgtcctccaaggaagaactgctggaccgtgtgaggaagctatggtggcccgaagtggaaaagtatgaatccttctgtgcgaagaaccaaatggccaaaaggtctgctgcggacaaagccgcaaaagacaaggccctgcaaaatctgcattacaacaggatgtggctcaggtactggaaagataagatccggaactttgaaaccactgaagtcccggaaggcttcaccaacaaccagttagtcgatacccggatcatctgcaaatacgcagtcctgtacctgaaaagttactttgacagagtttattccatgaaggcctccgctctgcatgcgttaaaagagatttggggcctgactgacaagtcgcgtgacaatcacatccaccactgcatcgatgcagtggtaaccgccagtattcgaccgtctttttatcaggaactggcagcttactatcaccagatggaccggttcgagcaagatggtcagtcccgtccccatccacccgaaccttggcccggattcgcgcagtacctgaaccatgatattttcgaagacgtgctggtcgtgcatcacagcaaaaacccattgctgaaaccgacctttaaaaaagagaaacttcatgggaaatgggtgatcaaacagggagacagtgcgaggggatccctgcataaagaaacctactacggcgtcatcaaaccacctgcgaaagacggcaagtactctcagaaagagttggcatgcgtcgtccggaaaaaactggattcgacctttaaggatttcgacaggatcgtggatccagtggtccgcgagaaggtgaaggaacagaaagacaaactgaagacaggggacactatctggtacgacgagtcacgtggaatccccatacgcaaagtccggatttacgatgcaactcaacccgggtcactgattaaactgaaatcccaccgggatatttccaagcatgagcataagcgacacctgggtgccgcgaatgaaagcaattatctcgtagccctttaccgaggaaaggtgaaagggaaaccgaaagcgagctggaaaaaggtttccaattttgaagccgttcaagcatcgaagcatgggatttgggatgaacttttacccgcgaccacaaatgagggacttgaagtgtaccaaatccttaaaattggcatgcaaatcatcctcaaaaagacaaacgatgaagatctaagaaacttggatcaaccggaactctccagaaggttgtatcatgtcacaatactcgaaggaccacgaacaatcattcgtcaccatcaggaagctagaccagccaaagacctgccaagatgcatcagttctttcccttggcacccatctgaaaaccctccaggtttattgaatcttgcctcaaatggtctctgggttgctgttgagggtgtggattttaaacttactcaaagcgggcaaatgatttggattgatgctgaaccatgatcaaacggacattggtatttaccaaggcctgctaccttgggatgaaacacggtcaaatccgttactgcccgaaagaagacggggaggaagaacggattgtcccactggaggatgtgggattcgttgttcttgagagcccggctatcaccatttccacccggttgctgaatcaactgaaccaaaataaaaccgccgtgttgctttgcgatgaaacccatatgccagcggcaatgcttcaaaatctggatgggcacagtactcatgcggaaacgttaggccatcagctgaacgcctcgcttccgttaaaaaagagattgtggcagcaattggtcaaagccaaaatttcgaatcaggcggatcttcttgaaactctgggcaggcagggaagcaagaaactgcgacacctagcgaatcaggtcaaaagtggagactccgacaatcgggagggcgtcgcggccagagtctattggtcagaactgtttcttaatcctgattttacgcgggacagggagggagaacctccaaaccatttgctgaactatgggtacgcaatcctgagggcggccacagcccgtgcactgatgtcttccggccttttgtgtgcacttgggctgcatcaccaaaaccggtataacgcatttgccctgacagatgacgtcatggaaccctatcggccctttgtagatcagattgtggtagaaaccgtaagtcatggtgtggaaacggaacctttagacccttcactcaagcaatctcttttgggagtcctgaccatggacacccggatcaggggtgtgcgcagcccacttatggttgcactcagcaccacaaccgcctcactggcgcgttgtttcatgaaaaaggagcagacggtccagttgccgagtctgttgtgagttcccatcatctggcagctgaggcctatcgaatcgtgtggctgttcgtctttttcgatttaccggtgaccaccgacaaagaacggaaacgtgcaacccgcttccgcaaggccctactggatgatgggttcgccatgatgcagttttccgtgtatatacgtcattgtgccagcaaggagaatgcaaccgttcatgtgaaacgtatacgaaagaaaattccacctgatggacatgtgagtattctcgcaatcactgacaaacagtttggaaacatcgtcaatgtacggggtgcacagaaattggttatggataatgctcctgcgcaattggaaatgttctaacgaatcccccttgaccgcttccggataaagaaacataatctaaaagaattcagttcacagtaaggccatgtgccgaaggatatttatcctaccgccccgcttctggtggggcttgctttttcggttctttgacatcctaaatcggatctaaatcagagagatttttactgaattcccagagatatttatcggatcaacaacaccaagtctctaaacttcagagacttagagacttgaggctgtgaactgatttcaaactctagggaagaacaccgatactggccttttttgcttccagacgtatgctgtgaactgatttcaaactctagggaagaacaccctgttcagattaaagagtatgacaaagaccgctgtgaactgatttcaaactctagggaagaacaccggtgatggcggagtggagtacggcccacgagctgtgaactgatttcaaactctagggaagaacacctcaggacgtccaacaccgtacggacaagaagctgtgaactgatttcaaactctagggaagaacaccatccaacaccagatcacgcacgatttagtagctgtgaactgatttcaaactttgaggacaaacacaaaacgtgccccggattgctccggggcacgcgggttctcaggtgggaatgacgcttacgcgagatcaaaccggtcggcattcatcactttgttccatgcagaaacaaagtcacagacaaatttaccgtccgagtcatcctgtccatagacttcggagatggcacggagttgtgagttggaaccgaagaccagatccacccgggtcgcggtcgccttgaccgtaccggaggcatccttgatttcgaagagatctgcggcttcagaggtcggggtccattcctgacccagctccagcagggtgtcaaagaagtccgtggtcagcactccgggtgtttccgtaaagacaccgtgggaggaaccgtccgcgtttgcaccaaggacccgcatcccgccaaccagcacggtcatctcgggggccgtgagtcccaataactgggctttgtcaacgaggagttcctctgcggtcacggtgtaagatcccttgaggtaattccggaatccatctgcaatgggctccagatatgcgaaagactccacgtcggtctgttcctgagtggcatcggtccggcccggggtgaaggggacggtgactgtatgaccggcatccttggccgctttctctatcgcagccgcaccgcccagaaccatcaggtccgcaagtgagaccttcttaccgccgggtgcatcctggttaaaatcagcctgtacggcttccaacacttccaggaccgcatgggtgaggcggttcacgtcccagtccttttgaggagcaaggcgcaaacgggcgccattcgcccccccacggcggtcagagccgcggtaggtggaggcggaggcccaggcagtattcaccagttgggaaacggtcagtccggtaccgaggatcttttctttcaaggaggcgatatccgcctcgtcgatgagcgcatgatccactgcgggaaccggatccatccagattaattcctcttctggaaccaaggatccgagaaagcagggacggggtcccatgtcacggtgtgtgagtttgaaccaggcccgggcaaaggcatccgcgaattcatccggatttgcatgaaaacgacgggagattttctcatacgcagggtccatgcgcatggccatatctgccgtggtcatcatgggtttcaccttcacatcggcattgtgtgccataggcggaaggtctttttcttcaatatctttcgggtgccactgaaacgcaccggccgggctttttccgagttcccattcatagccgaacaacagatcaaagtatccgttatcccatttgacaggattcgaggtccaggccccttcgattccactggtgatggtgtcatccccttttccggaaccgtaggaactcagccagccaaagccctgtgcttccagaggggccgcttcgggctctgcgcccacaagtgcgggatcaccggctccgtgtcctttgccgaaggtgtgaccgccggccaccaacgcaacggtttcttcatcgttcatggccattctggcaaaggtttcacggatatcacgcccagacgcaactggatccggcacaccattcgggccctccggatttacataaattaaccccatctgaaccgcagcgaggggattttccagttcgcggtcaccgctgtaccgcttgtctccaagccattccgtttccgttccccagtaaatatcctgttccggttcccagacatccgcacggcctcctccaaatccgaagggcttgaggcccatggattcaatggcacagtttccggcaaacaccatcagatcggcccaggaaagggcgttgccgtatttctttttgatcggccacagcagacgacgtgctttgtcgaggtttccgttgtccggccaactgttgaggggggcaaatcgttgcgtaccggttgaggcccctccccgtccatccgcggtacggtaggttccggcactgtgccaggccatacggatgaagaacggtccataatgaccataatctgccggccaccactcctgggacgtggtcatgagttcaaacaaatcggttttcagcgcttcgagattcagggtcttaaaggcgtcactgtagtcaaacccctcatccatcggatccgatttttcggaatgctgatgcagaatattgaggttcaactgattgggccaccaatcccggtttgaggtgcctttgatcgtggggttgccatgcagaaacgggcatttgccttcagatgactcagatggactcataggggtctcctttcgataggtggttatcaataaggttatacctatattcgcatcctattggttgtccagttcgttatttctattttctatcaattgactgaaaaacaatcggaaccaccctttagaagccccttccagacatgcgattcagcgacggctcaatagggcccggtgacagggcgagggttccggcggtcggggggtatccggcgactcatctccagacggcaggattccagggccgttttctcggcaggatcctcagcaacggaactccactctccttctgggcggttccggttccacaaggtctcatgtccttctgaatcccggacataggtgtaggggcccattcggatggtatccgtcccccacccctctttcataaactcctggaacgtactctgccgcggccaatgcggtctgtcctgttttccccatggcagcagacttcttccctgaaaacgattcggcacgctgcccgtcgcggcttccaccaaagtcggtgcaaggtccacaagctccgccggggcctcgacctgcacaccggagagaggcaggccctgaggccaatgcaggatcaggggaacctgcataatcacatcatggccgggtggacctttctgaacccggccgaaatcaccgagatattctccatgatcggagcaaaagagaatcagggtggtctccaattctccccgttcatccagaaaacggatgacccgaccgatttgctcatccacatgggtggtcagtccatggtaggctgccacaattgaaccccactcctcacgggatttccccatggcctcttcccggccaggctcccagttcgggaaggaaaggtcccgttcgagggcatcggtccagaaatgctctggagggttcacaggcgcatgcggggcatagaaccccagattgacaaaccaggggcggtctggcggagcgtcttcaatcgcctgaatccccctgctggcgacaaaggcggaatgagtatacccctcttccccccggaagacgtaaggttcatgggtgttccggggttccaacgcaagcggaggcatccggcattcaggcggagtcgaacaacggcaggcttcgacggcatccggattctgagattccacccaacggagaaaatcatcctcgtaacatccgggctcatccgaattcaccatcagatcgaagtcccatgcaggatggggaatccggtggtcccgggtggcatgatttaaaaagtggagttttcccaccgaggcggtccagtacccggcctcggaaaggtcctgatgaaacagcctgacctcaggatccatttcaataccgttctgggtattccccagcgaggatggataccggccggaaaagaaactgtggcgtgaaggcatacacaccggggcattgcaggaagcatttctgaaaagaattcccccctgggcaagtcggtccagtgaaggtgtgtgcgcagcaggattcaggacgcccagggtatcaagacgctgctggtcggtattgataaaaaggatgttgggagggggcatgttgtctcctcccgcgttaccgcgtaatcacccgggtgaaaaaattcgccggagtccacggcccgggtcggccgtcgccatgaaaagaccctgcggctttgatctgacgtcctctggacaacagaagccaatctgcctgcagcggctcctgaaacagtccgatccggtacggattcaggaggaggggattttcagatcctgcctccacgatcaacaccttatgccggctggaccagggggacgaacgaatcgccatcagggtatcctccccctctctcatttcctgcaccttatccgggagttggacctgcagccgttttttccagtcccagtcactgtcccgggtggtaaagacaatcaaattgtgcccgcgacgttgctcctcggtcaactcatcccccttaagtgcaggaaaatgaaatgcaggtgtcgcatccgttcgggtgtacgatgtgcgaatcttctccacactgaacaagggggtttcctccacagtgggatcaaccaccaccaggaccggttctgaaaaaatatcccagagaggtcctacatgcccgttcaggtccgggggaggttccatcaaccgccccatccggtcaaatccgaccgtttgcgcttccagtgtaaatccggcctcctcttccggagggggaatcaccgtcagtcgtgcaatgttgcgtaccttgaactgaacgccatccttcgtcaccatggcttccacctctcctataccggaaggatcatggagtgcctccacacgaatccaggagaaccggttgtaccgcagattggacacccggaagcggatccgccgtggccagcgctctttggtctgctcaagaaaccattttcgggtggtcgcccagtcatagtccggcagcgtgatgttgtgtcccatatcaaagccccgctccacgacgttgtaccgaagccgctgtaactggatggcaatggccaacgcccctacagggcgggtactggtatcctgccacccaaaggccatttccaccggagtggtggccagattcggcatccaggttcgaatgtcgcttcgggccgcaagctggaaggcaacgggatcccggtgcatggcaaacagcgggtccatccattcatggtgcactccgtatgttccctgggagctgaccgcagcaaacatgtccggcatcagggctgacaattccagcacgccccgtcccccgaggctgattccctgggcataaatgcggtcgggatccacattgtattttatctgcatgtcctcaatgatgctccggacatcctccagcaccatgtgacggaattccgtattcttgtaggccccggcattggcaatcagcatgggaaattcttcgaaccgttgcccggcggcataatcggccaccaggttccggtaatcccctcccgatccatgcagaagaatcatcaacggtgcaggttcactcaggtcgagagccttgggaacgtaaaccgtgtaaggctgacggcggcggagatgaggactttcataactgcggatcagaaatcccgtcaggtccttaaacggatccgttggggttttcagtgccttttccacattcggccacaacggctgcttgccccagatcaagcgttcatggtttccttcctgcacccaactcgtcatttcctcccggtgagccgggtcgatttgcgtcaatgccgcagtgacattgtgcaacacaaggggttcaggtaacttgccctcgaggaattcctctccttctgcggataaggtgtaaaggccatccgggagatcatgcggaatcgccagtgacagctctttctgttcgcggatcacaccctgatacgacacccggtaggtttcttcccaggaagacaggggggcgtgtgacgcatctttcagactcaactgaatcgtcacagaccggggcggagcaggaggtggaggcgagtctggctgagcatccggtgacggagtgggaacctgggggggggcgagtttcggaagcacaggtgccgacggccagtccagccaaaccttgacctctgggcccatgatccttcgggccccccgccacatggcccgtgttttcttcccggctggagggtggttccgatactccgtttctgcgaaggccgttccaaaaagaaatacagtcaggaacagaagaggtgctttcatgagactcccctgtcacgcaggcaaggggactgtccagcataacccgagcgtatgacctctgacgggtccacgagccacatcgtgcgttttagggattctgattcactcaagagatcaaaacaacttatccggcatgaagaaagaggaccccgttgtcgggccgaaaacggctgcagccaccctccggttgtggtttcagcgccgagaagtgggcgtcggtctttcggtcatgctcccctccgggttctcagggttgaggcaatacctcgagcgtgcgggtatagacgtcggtatgtccgctgcgatctcggactgtcaacgtaaccggataggagcctggcgtcctccagatatgggcctgcgcattccctgcatcctgggcggtggccccgtctccaaactcccactgaaactccacaatatccccggcagagaaggctgcatccaacaggagaggctctccgagagtggcatgagaacgaaagggttcaaatctcgccttcagaggctgatcccgaagagaccccggcatgggagggacaggagggaggtcgaggtccttttgaacgccgaaggcctcgggggtatccggcaccagtattcctgcaagattccgggtgcccccctgccatgaccggtgaacctgtgcctgggttcccacaggacccgatattcgttccttcggaagcaggaacacattctggttgatgaggttgtgatccggttcatcgataaacatgaacggattcggttcgacatggttcatggtgtggaacacattctgttcaatccgatttcccgagggcagcagaaaaccgtgcttggcctttttgtttccacgcatgtagatggcggctccccccagtccggcaaaggtgttgtgctgtatccggcacgcttctgccgcccagaacaccgccccgtattcacgggcgatgtaatcataagggtctgattccgtcaaatccagccgctccccgcccaccatgataaccgcgcgatcatcctccacatcctgaagattccccgctggaaagaagagtccgcagaaatcgacatccacaaacaaattgttctcgatccggtggtggcgtccggtgacccagatgccacagccgagtttggcaaagaggttgttctcgaccacaatatgatcacagtgccgcaggctgagatgggccccgcctttgaaccaggcacccgggccattcgcgaatacattgttgcgaaaggtgttgtgggaggatttcacggtgatcacttccccgtgaacgtctccaatcgcgcggtcgaagacattaaattcaaccacagcacccaatggctgtgtccggaaatgactgaaccctctgcccatgaacatcgcctctccctgttgcccctcttctctccagcggctggtgtcccggaacaggttatgatctatacggagggatcctttctcccgtttttccattttctcctcatccccgttcaaccccaggataccggtaaaaggatcgtaaaaaaaacagccggtgatccgatggcgatccccgcgtaacgtgatgatgtttccggtggaactcccgttctcccgacgctgcacctgacaggacagaaaccggcagccgcgaaattcaattccccgggaggagaaactggaggagatgagagagtcatactttttctctgccggaactttgtgtacctgatcaaaggtgaacccctcaaactgaagataacttgccgaaattttccagcggagctctccagtgaaccgaacctgatggggattcaatgggcggagacgaatagggttctccggagttcctgaccggtgaaaggtgagtcgcccgacatcggcatactccccatccgcgatcaggaggacatccccgggttgcagcgaaggcagacgttcacggagttcatccacagaagaggcgagaagcctcgggggttccggggcctctcgttcatctggattctgcacacaggccgtgaagaacaacaggacaaaggcgcagacaacagtcagtcgtttatacatagacgaatcacgaggaaatctgagaaacgactattttcgcagaacgtctggcagaaaacaagcacctccgagaatgacagtcattctcggagggactcactggccctcgcctttcggaagaacatgccgtatcctgagaggtctatgaacacgtcagcgaaaccgaatgtcatcctgta

SEQ ID NO: 3573 - DNA, 23354 bp, synthetic construct
  misc_feature 1..23354: note = Synthetic
  source 1..23354: mol_type = other DNA
ttttccgcgcgcagccgcgtgacgctgcgttcgagcaagtaacgattttgaaaacaaccgccactcaacaccacgcgcggctggccgcagcgtttggccattgccaccaccgcctcagccagggcattgtggaatttcgcggaaatttccgccacggaaacccggccgttcacgtccgccaaaacggcattgatcagcagcgaccaatcgaaaaccagggccggcgaacgggccagcaacggtaatttataatgggtctccaccgcgacgccgtcgagcgcgaattccagttccatcgccggctggccttcaaactgcatctgttgccgcaggttgaccagcgaggcgatcacgtcaaacaaacgcccgacgctggaggttaaaggcgaattgaagcggcgctgcaacatgcccttcaaggtgaccatctcaatgggcggcatttcccgcaagggggccagatggcccatttcaaaagcggcctcgccatacatttcgtaaagcaatcccagcgcggcgcggcgcggctccttcacggctttatcgccgccgggcagtcggaacggccgcagatgcgcgacgcgttcgaccgtttccgccgtgaccaaaaaaaactcaccaccccaaatcgagccgtccgggccgtaacccgtgccatcccacgccacgcccagcgcgggcagggccacttcgttttccgcgatgcacgatagcacatgcgcgacgtgatgttggacttggatcaggtgcgaagtgtcgcgtgccggctcggtggggtggccgcttgaattaccagcgacgcgccgggccggaggccggcgctccagcgcatatttggtcgaaagataatcgggatgcaaatccgccgcgacgaccgccggcttcgccgcaaagagtttttcaaaatcggcgataacgcggtgaaacgcctgattggcggcctcggtttccaaatccccgatatgctggctgatgaaaacattttcgccgaccgccagcgccacggaatttttcagatgcgcgccaacggccagaatcgtggccgggcggccaacgtggggaggcgctgactgaattcccgttttagatttgagcttccccacgtcggcggctatcgaaagatggattggcaacggcgcaaagccacgcgcgcggcgcaccatcatttcacggtccagcagcacgcgaacaatcgagtcatccacgtggcggacaatcggacggttatgcaccagaaagaaatcggcgaggccgcgcaggcgttcgagcgcttccaattcatcggtgcaaatcggctcatcgctcaaattgccactggtggcgatgaccggaaaatccaactccgccatcaacaaatgatgcagcgggttggctggcagcatcacgccgaggttgggattgccgggggcaatgccttcggcaatttgaaatttagatggctggcgacgtggcaacaaaacgatcggcgcttcgggcgaacgcaacagtcgttcttccggcgacgaaacggcacaaagtcgccgcaggctggccagcgacggaaacatcagcgcgaacggcttttgatcgcgatgtttgcgctgacgcaaaagctggacgacttgttcatcgcgcgcgtccgccagcagatggaacccgccaacgcctttgaccgccaccaccttgccaccgcgaatcgcgtgggcggcggcgagcagcgcgccgccaccaccagaaactgtttcgccggccgcgttccaaaattccagccgcgggccgcacaccgggcacgcattcggctgcgcgtgaaaacggcggtcttgcgggttggcgtattccgcctggcacgcgggacacagcgcgaacgctttcatcgcggtgttcgcgcggtcgtagggcaaagcctcgatgatgctaaaacgcggaccacaatgcgtgcagttcgtgaagggataaccgaagcggcgattgctcgggtcaaaaatgtcccggatgcaatcggcacaggtggcaatgtcgggcaagaccagcacggttctgtcgccaccgacttcgctcgcacgaatcacaaaatcatcaaaccccacggcgtccagccacagcgtctcccaactttgaatgaagctacgcggcggctgatcggtttccaagtgacgcaaaaattgttcaagcgcgggacgcggaccttcaacctcaatgaaaacgccttggggcgaattattgacccaaccggtcaacgtcaattccgtggcgagccggtggacaaacgggcggaagccaacgccctgcaccgcgccgcgcagggcgattttcaatcggacccgcggatgcagttggggctggctcgtcataaaatattcctgcacggaaccgtgcaattaagatatggtctgttagcggcggcgtcacaacctttcttttcttgccaaaacgcgacctaaatttgtcgggtcattggaaatgaggaccgcgtccagattcgtaaagagcgcgttgtttcaacgtgagcgcgtcggatgtttttcagcggttaaaattctaattcgcgatcaagatgagacgaaccggttttatttcattagcactgggcttcagcccggtggccggttcaaggctggagctgagagccgttgaaacggctgacgcgtgctggcggatgcggcacactccgcgctcggaaaaaccgccgttaggcttcttagctgagggattgaattgatttttgcgggcgaacagttcacgttggcggggcgtcaatgcacgaagtttccatcatgaccgaagctctgcggatggcggtggacgccgcgcagtccgccaaggccagccgaattttgaaattgcgcctgcgcatcggcagtttgagcggggtcgtgcccgaggccatgcggttcgcgtttgacgtggtttgtcacggcacgatggccgaagacgcggtgttggaaattgaagccgtgcaggccgcgtgctggtgtgagacctgtcaggcggaatttgaatgcgtggattttttcaacgaatgtccccggtgccacaatgtcagcggcgagctgcggcgcgggcgagaactggatattgccgcggtggagacttcataatatgtgtcaagaatgtggctgcggcagcggcggtggcgacgtgaaaatcggcgcgcacgcgcatgatcacgaaccccctcacggccatgaacaggggcatgaacatcacgatcacggccatgcccacagccatgcgcacggcgtcatgaccctgaatctaaaccggtcgttgatggagaaaaacgcccggctcgccgagcgcaaccggggatttttccgcgcgaaaaaactactcgtgttgaatgtcgtttcgtcgcccggttcgggcaaaaccacgttcatccgcgagaccgccgccatgctcggcgcgcgtttgcgcgtgggcgtgattgtgggcgacctcgccaccgacaacgatgctgcgcgattgcgcaccgccggcattcccgtcgtgcaaatcaccaccggcacggtttgtcacctggacgccgacatgatttccaaagcggcggcccaactggatttggaccaactcgacgtgctggtcattgaaaacgtgggcaatctcgtctgcccggcggactacgatctgggcgaagatttgcgcgtggtgctgctctccgtcaccgagggcgaggacaagccgctgaaatatccgccgatgttccattccgcaaatgtggcgatcatcaccaagagcgacatggctgacgccgccgggttcaatcgcgatctgacgctgatcaacttgcagcgggtgagccatcatgcccgcatttttgaactgtcggccaagacgggcgacggcatgaaggcgtggctggattttctggtgcagcagcgggcggcggtctgatccaccaacaaacgagggctaactaaacgccgatgccgaaacgccttgccttgaccctgctgcctgcgccgcgctcgttgaaatgccacgccggaaaattcctgctgcccaggcacaaaccgctgggcgcaatcagagtcatccgcacccaggcggcacccgcgcaagccgaaggttacgcgttgacgattgaccgccgcggcgtgcggattgaatttcgcgagccgccgggcttgcgcgccgcagcggcgaccttgcggcaattgctgcgcgaatatggacgccggctgccgtgcctgaaaatccgtgactggccggattttgcccggcgcggggtgatgctcgacatctcgcgcggccgcgtgccgaagttggaaaccctgctcgaccttgccgaaaaactttccgatttcaaaatcaacgagctgcaactttacaccgaacacacgttcgcctatcgccattacaaatccgtctggcaaagttggggcgccttgacagcgaaggaaattcaaaccctcgacgcgcgctgccgggaactcggcattgaccttgtgccgaaccagaattccttcggccacctgcgctattttctcgcggacgcgcgcctgaaaaagctcggcgaactgtccgcgccttacgaggcggagacgaaagattttctccgtcgcccgaccacgctcgccccgaaccatcccggcaccctgccctttgtgcgcggcctgttcgacgaattgctgccgaacttttccagcgaattcttcaacatcggcggtgacgagacctgggaccttggcaaaggccagagtaaaaagctctgcgcgacgaaaggtaaaggccgagtctattttgattttctaaaagcgttgcaccgggaagtcgccggccggggcaagaaaatgatgttctggggcgacattattttaaaggaccccagcctcatccgtgaattgccgcaggatgtcatggctatgaactggggctacgaggcggatcatccatttgagaaagaagccgcgcaattcgccaaggccaggattccattctacgtctgccccggcacctcgacctggcagaccttgctgggccggcacgataacgcgctggccaatctgcgcgccgccgcccaagccggcaaaaagttcggcgcgctaggtcttctcaacaccgactggggcgacggcggacatccgcagccgttggccgtaagctggccgctgttcgccgccggcgcggcgctggcatggaattcaaaatcattcaacgaagataatctgctggcggtcttgagccgggatgtgtttgaagatccgacgggccaggttgcccaggccgggttcaagcttggtttcgcgcatgaaaaactgggcgtgaaagcgatgaatgaaaccccgctcggcacggtcatcgccgcgcccaagccggaagatcgcgaactgttttgtcggaacggattgaaatggttcgccaaaattccggcgcgtaaaattaatgcggccttgaatggaatccagaaacagcgggcaatcttggggcgcgcgaagccggactcggataccggaaaaatcctggcgcgggaactggatctggccgcgcgcatggcggcggaatcctgtcacttcatgctgtggcaacaagcggtggcggcgcagaaatctgccgtggcaaataatctggcccggcgcggcgtccgcgaactacgccggttggaaaaagacttcaacgcctattggccgtcacgcaacaaggccaccacgaaacattgttcgccgttcctgcaatggcgcatccaggattatttgcgcgcaaagaaaaacgcgccagcggataaatccagcgggcgcgtttgaaaaaacggttcggttatttttctgcgttcgtcgtgaccggggtcgtcagcaacggactggtcgccggtgccaccggctgcgccgccggcttggccgtcaccgccggcgtctgcatttgtttttgctgcagttgcttcgtgaattccgtcggcgcgctgtcgcgatgcacgatatcctgcattttgcccagccccaatgccaggaccaggaaaacgcccgtgccgtatttcgtgatcttcgtcagcgcattgccggagcccgcgccgaacaacgcatcggccgtgccggcaccaaaggccatgcccgcgccggcgtcttttttcggcagttgcaccagcacgagcaggatcagcagcgcgcaattcagaaccaaaaccaaggttaaaatgccaacaagaaaagtcatatgggtgacaggttagatggaatttttgatgatgtcagcaaaacttcttgcttcgagggcggccccgccgaccagcgcgccgtccacgtcgggctggctcatgagttctttcgcgttggccggcttcacgctgccgccatattgaatgcggacttttttggcggtgccttcgtcgaacattttcacgaggatgccgcggatgaacgcgtgggcgtcctgcgcctgttgcgtggtcgcggtcttgccggtgccaatcgcccagaccggttcgtaggcgatgaccgtttccaccatctgctctttggtcaggccggcgaggctgccgcgcacctgcgtgtccaacacggtttccatctggccgccttcgcgttcggcgagggtctcgcccacgcagacgatcggcttgagcgccgccgcatgaactgccgccgccttcttggcgatgagcgcatcggattccttttggaactgacggcgttcgctgtggccgagaatgacgtagcgcacggaaaattccttcaacatgcccgcgcagatttcgccagtgaacgcgccgaaattattctcgctcatgttctgcgcgccaagcttgatattggaatccagcaccgccttggacaccgattccagcgcggtgaagggggggcagacgaccacgtccacttccttcacgcccatgaggtcacgcttcaggtcgctgacgagcgttagcgcctcggcgacggttttgttcatcttccagttgcccgcaataatcaatttacgttctttgttcatttgaattggttttaaaatttaaatttatttgtctgaaagcgccgccacgccgggcagcaccttgccttcaagaaattccagcgacgcgccgccgccggtggaagtgtgcgtgacctttttgtccgcgccgtatttcttcgccgccgtcgccgtgtcgccgccgccgatgatggtggtcgcgccggcctgcgtggccgccacaatggcatccgccatggccttggtggcctgctcgaaagcgggaaattcaaacacgcccgccggcccgttccagatgatggtcttggcgcccttgatggcggctagaaacagcgcggtggacttcggtcccacatccaagcccatccagccgtcggcaatgccagaggcgtcatccgccagcttgacttgtgcatccgccgcgaacttgtcgccgcaaacgtaatccacgggcaggatgatctgcttgcccttctcctgcgccttcttcatcaggtcaggcaccagcttggcgccttcggcgtcatagagcgaattgccgatggccatgtggttaagaactttcttgaaagtgaaagccatgccgccgccgatgatgatttcgtcggccttgtcgagcaggttattgatgagttggattttgtccgagaccttcgcgccgccgaggatggcgagcaacggacgcttcgggtggtcgagcaccgcgccaaacgcgtcgagctctttcttcatcaggtagccgcacgcccgctgcggaagttgcacgcccgtcatcgaactgtgatcgcgatgcgccgtgccgaacgcgtcgttgatgtaaatgtcgcccagcttcgtcaggctcgcgcggaacgccttcaccttttctggatcggccttgagcttggtgccgtcttcgagtttcactttgccttcttcctcaatgtggaagcgaaggttttcgagcaaaatcacgtcgccgggctgggccttggcgcaggcagcctcgacttccgccccgacgcagtcagcgaggaattgcaccgggcggctgagcaatttctggagggcttcggcaatgggtttgagggaaaacttttcaatgcgcttgccgtccggacgacccagatggctcatcagcaccacggatgcgccctggtccagcgcgtagcggatcgtcggcaacgccgcctcaatgcgcttggtattggtgatggcacccgtgactttgtcctgcgggacgttgaaatccacgcggatcagggcgcgcttgcccttcaattcgatatcttcaataaacagtttggccataaattaaaattgtatgtgtttgcctggcaaacaagagcgaccagcttatcacaggtggcttgccagtaaagtgaatttaaaactgcaaacggctggcgggtgcatccgcgctcggccccgcatagcgcaggtttcccaacctgcggtatcgccaactgccagtcggcagagcttcaaacggtttgaaatttaagcggcgaccacgaccagcggattgaaaatccgcgatccggcagattggaaatctgcgcgacgcgggtagggtcaagctgcgctcacggctggcggacggcgttcagccgcagcgccgcgtgaaatcgggttagaccgccgttgctcccgcccaaggcccggtcgggtgctgccatgagccagtcgtgcgacgcaatggcttggtcgggttccgcaacaggccggtcggggccttcagccgaccggtcggaagctgcatccgcccggcaagttccttcaatcatctggtcgtgtttcgcaatcggctggtcggtccgttcaacaccccggtctgaaggggcaatgagccagtcgttatctgccatgagccggtaaccggcttcagccggtcggtcggacctttcagccagccggtcgtgcccttcaatggcccggtcgtgcgtttcaatcagccggtgggttccttcaaccagccggtcgcgtcgttcattttattcaacctcacgcacttatgacacttaagccgctccacaaccaaccttatgaagcccgcgcattaaaggcttgcaatccaatcccgttaccataagattgcctgtataatcctcgttaaatttatgaaaaatgaattcactaaccggatcggaatgtttcaaacttcattgggtattctgcaggatcccaagcgccagcctctctggttccagctcaacccggtgattttcaccaccaaagtcgccgccgccgccgccggcgtgctggccctggaaaaattctgccagcaacagggcatcgtccccaccggcaccacggccgacaagatgcacgcggaaaaaacgctggacaccaccgcgcattcgctggcccgggcgctggtcacttggttcaccgacaagaacgacctgaccaacgccgccaaagtggatttcgtccccagcgactggctgcgtttccgcgacgaagtgttgctgggcaaggcgcgcattgtcagcgacctggcgcatcaagtgatcgccgacccggccgccacggacgccgccaaatacgacctcaccgccgccaccgccaaagtagtggatgacggcatcaccgattacgccaaatacatcaccgcgccacaacaggcgcagagcgaccgccacagcctcaccgagcaattgcgccttcgcttcaacgccgtggaaaacctgttcgtgcaagtggacgacatgattctgcgattcaacggcaccgaggccggccaggcgatgattgccgcctaccatgccgcgcgcgtcgtgcgcaactacggccacggacccggcaccccgccgcccgcgccaaagccaaaagccaccgagacccatccggaggaaaccaccccgctcccgaccaccccacaaccataaaccaaaaaccatccagaggattctaaaggcgcatcggcaacgatgcgcctttcttcatgttccagacttgccgccgagaaaaaacaaacccggcggggcttgaaaaccccgccgggttttttagaaacgctttttaacgcggcgtgtccgcatggcgaacagtggcacggtctgcgttatctaactttgtcttgattccatcgggactttaatcaaagctggctgcctcactcaagaaaaatgttatgggcaacaacacgattcaggatttggaactttccttcgacgtcggccacagttccctcggctgggcggtgctgcaaaacactggagcggagaacttcaccagtcccacaccattcgccaaaagaaccgttacgcaggaaactcctccggcaccgcgcgtcaacctgctcggctgcggtgtcgtcacgtttggcgcggatgattgcctggccagcaagcgacgcgattaccgccgtcaacgccgccacgcccgcgccacccgccagcggattgcccaaatggaaaaacttttggcgcacctgaaagttttgtctgccgaagaactgaaacaaaagcatcagcaggccggtggcaatgccgtgccgtggtttttggccgcgcgtgttcttgccagcaatggcgaggcgaaatacttgctcggttggaaggagctttgggacgtcctgcggtggtatgcccacaatcgcggttacgatggaaattcgcgatgggcaaatgcgtccgaagacgcgcttacagctaccgagcaagatgacaaaaagtccgacacggaaaaagaaaagaacgccaacgcactcatggcgcaacacagcacgcagacgatggctgagaccttctgcaaggttctcggcctcgaaccgctcggcgagaaacaatcttccgaaaaaaatttcaagcgtctcaatgccgcgttcccccgccccatcgttgaaaaagaagtccgccgtctgttggaacttcaccagaagaatctgcccgccatcaacgccgtgtttctgaacagtctgtttaaagattggcaggccgccgctgtccccggtttgaaattgcccgcgcggtatcaaggcggactgctgtttggtcagcttgttccccgctttgacaaccgcatcatttccacctgtcccagcactggcgaaaaagttccgtccaagaactgcccggagtttttcaaattccgctgggcaatggcgctggcaaacatccgcgtggccggggcaaaggaaaaagaattgcgaccgctgacgggcgacgagcgaaagaaaatcaacgcgcttatggtaagcgaaggcgcgttgacgccgaccgaattgaaaaaggccatccgcgaactgccgggctgcgagcgaaataatttggaaaccatgctcatgcacccggacgcgaaagacgggctgctgcttgatccgattcaaaaacttgtccggggcgacaaattgaaaaccctctggccggcattttctccgcgtgtgcaaaagcgcgtccgcgacctctggcagcgcggcaagctggtgacgctggaatgcatctgcgccatcgcgcaaaagctcggcgaaccactgacggagtttgaagtggagttgaacaaactcgccgatgctgcgaatacgaagcgcggcaagaaggaaggttccttcaatcgcgaggtgttgttgcgcgagccgttgacgatcaaaaagctggatgggcgcgccgcttacgcccgtcccctgctcgtccgcgcttatgccgaagtcatggcgggcaaacatcccaaggaaaccggcggctgcttggaaatcacggatgccatgcggcaggcgcagttgcaaaagcagattgaccagcagacgaacaatcatctcgtccgtcaccggcttttaattttggaacggctgttgaaagatttaatcgccgaacccgcctacgcgaacggcgacaaatcgcgcgtggccaaagtcaccatcgaagtgaaccgcgatttgcgcgaaatgtctggcaagtcggcgaaggaaatccagcaagacttgggacgacggctggcaaaccatcacggcgtcgcggcgaagttggaaaaagatttggacggcaaaacttacaacggccagccgattcaaatcaccgccggactcatccgcaaggcgcgcatcgcggaagatttgggctggacttgtccttacaccggcaaaacttacgacgcactggacttggtttcgcggcaggtggacaaagaccacatcatcccgcgctcgctgcgtccggcagacggtttggattcgctggtcatcacgttctcggaagtgaacaagatgaaaggccagcggacggcgattcaatttgtcagcgacgagcaggaaagacccgtggaagggatgccgcagttgtccattgtctcaatcacgcgcttcaagaaatgggcagaaagtttggagacgttcaaaggccacgacgacgacaaacgccggaaaaagaaacgcaaagaattgttgctgctgcaaagctacgaggaaaaaggattcgtgccgcgcgatttgaccgtcacctcgcagcttgtccggctgggcgcgcagaacattcggaagacgttgcccgacctcaatcccagcaaggtggtttccctgcccggctcggtgacgggcacggttcgcaaaggctggaatctgcttggctgtctcgcgctcgccgcgccgcaggtgaaggaagcggacggcacgctgaaaaataaaaccgacatccgcagtgtcacgcatctgcatcacgcgctcgatgcgtgtgtgctgggactggcctcgcattatctcccgaacaacggcggcttgtgggaactgatgctcaaacgcaatccgaatgaggcggacaaggccgtgctgcgttcaacgggctactttgattttgattcgcaaggccgctttggtttgacggaattgccggaaaccttgaaggaacaaatccgccgacgcctcgcagagaaacgtgtggtgcaacatattccggcggacatgagcggaatgcgcgtggaggaaaatacgcggggcataactgcaatcaaagatggccgcgtttatctgcgccaacaatcgcgcgacgccaagacgggaaaactttccgtgaaagagacggaagaatccgcgagcaaagttgtcggactgaaacccggaaaactcacaccacagaaaggcgtgcgtgtcatcacggataacttcggcgtcgctattctcgaccatgcagaggaaggtgaggaaaaatttgtcgtcgtcccgtggcacaaggtctggcctcggattcaggaattgaagctgaaaaattccggcaaagtgccgcgcttgttgcgaattggaactctgattcgtgtgccaaagaaagcaggacgaagtgattatcggggattgtggatggttcgcggagtccagttaaaccaacgcgccggctttcttgtggatttaagttcgcccgacgttatccagtatcgtgtatcaggtcgtgacgactgcgcacagaacatcaggctgcaagctctttatgatggcggtcttgaaattctaaaaactccgctcacgggcatcgtgtcatgtcctatcacatcgtcagtatagactcgccgcaatgctccttgagttgcaaagacggccagttgacctgcaaaacggcggaaggtgaaaagaaacttccgctggaggacatcgcatccattatcatcaccagcttctcggcgagcatccaaagcaacctttttctggaagcggccaaacacggcgtcgcgctcatcatctgcgaatcgttcaagccggtcagcctagtgctgcctgcgaaccgctccacggacacgattctttcccgcgcgatgatcaatctcacgcccaaagcccgcgccgcactctggcaaaaaaccattgatgccaagtgccagaatcaattcgcgctggcggaacacatcgcaccggaaggcaagggtctggacgcgatgcggcaaacggccttcggcaaaaaaccgcacaaggaagccatctgcgcaaaaatgttctggcagatttttggccggacgttgaacgatgaggatttcatccgcgaccggggacgcggcgggttgaatcattttttgaattacggttacgccgtgctgctttccaccgtgttgcaaaaacttttcggcgtcggccttgatcccacgttcggcatttcccacgtcgagcgcgaacgcagcacacccctcgcgtatgacataatggagcagttccgtccgtgcgtggactggcgtgtgtgccagtgggtgaaacagcatccaaatccgaatgaatggggagtgaccaaggaatttcggaaatgggtgacgggctttccgctggagcgcgtggattatctagatttgagtctggagattcagggcgtgattgaaggcgtggtgcgcggcttccgcaaggccgtgattgaaaaccagccgcgccattataaaccgtggacaccgaaaaatataaaatgggctggctcgtcgtgacatttgatctgccggtgaccgccaaaaagcagcgcaaggccgcaacggactttcgcaatttcctgattgatgacggctatcagatgatccagttcagcgtgtatgcccggtcatgcgtgaccttcgcgcgccagaaaacccacattgagcgggtgaagaaacacctgccgcccgaaggcagcgtccgcgccatttttgtgacccgctcccaatgggagaagtcctacgtcattcaaggatcgcccgccaccgagtcggaagccgaggacatgcccgaacaaatccaactctggtagtattgcccaagcagagcaaaatcaggggcttgcgcccactgagtttgctctacccggttttggaatcaaggcaaagctgaatgcgctcggcggtcaggtgcagcgggagtttgctctacccggttttggaatcaaggcaaagctggtgatcagtgccgtggcattcacaacgagtttgctctacccggttttggaatcaaggcaaagctgaacaggccggcgagcgcgaacacgctggagtttgctctacccggttttggaatcaaggcaaagcagcaagcccccgtaaggcgaagcaaggcaaagtttgctctacccggttttggaatcaaggcaaagcgtcaccagcgtgcgcgcggccgtgcagagaagtttgctctacccggttttggaatcaaggcaaagccgcggtctggttggcagccgtgtagctgcaagtttgctctacccggttttggaatcaaggcaaagcgaaaccggcggcgggaagttgctgcaaattgctttggttcgtttgtcgcgcaaaaagagaagatccgtgctttgcggcagcaacttcccgccgccggttttgatttccctccgcccaaatgttctggaagtggaaagccactctcctcgaaaaaataaattcaatccacccgctgcagccaaaggtggcgtccggcgcgatggccaggccggccatcgcagaccgccaaattaccggccacgcattgactgaaatgggaggttgcgagcgctgggacattgaggttggaaccgccggtaaactgactcaaatgaataaccacccaagtcctgagtcaactttcataccagcgcgggaagatcatgccggcgcgtttaccggcgatcagattgctcaccatgccgtgcgccgcgaaccaagtgctgcgtcccaggagtcgcaggctcatgcgccggcagcgcggactgcggtgggcgacgctgcgccagagagagcggaggcgcgcgggcgtccagtgcgtggcgaaggccatgagcagcgcccattcgagctcgcgccgcgcgcccggccgcgtgctggagggcagaaaattatagtcgcgaaaactttcgccggtggcgtcccacagttcgtcgcgccaaaagggcgtgcccggcagcggcgtgagcggaatgaagaacgcctggttcaattccagttcgtgcgagagccggaaaatggcccgcacggtttccggggtgtcgccgggcaggccgtagatgaaactaccgaccgtgaagacctccgggaattcctgcgccaaaatgcggaaggctgcgcggacttcgggaatggtcgtggtcttgtgaatggttttcaagccgtcgccgtcgggccgttccacgccgatgtaaacctccttcaggccgccacgcacctggcgggcgatggcgccggattgcgcgtcgcgcacgaggcagtcggcccgcacccacgcgctcatgctgacggaaatattttcgcgcagcagcgcgtctgcaagttcggcgggcaactgcggatgcgcgttgtagcttgggtccacccagccgaaatgctggcgcccaaaattgcgcgtctgaattttgatctcctccagcagccgcgcggcagacttgaaacggacgaacggccgcgtctgttcgccgacgaagttgcccatctgccgccacagcacgcagaaatcacaggcgtcaaaacagccgcgcgacgcttcaatggcggcgaggccgggatgattctggctgcccgcgccatagcgatgcatcggcagcaaatcccaagccggcatcggcagctcgtcgagatttttgatcagcggacgatgccgcgtgtggatgacttcaccgtcgcgccgaaaggaaattcccgcgaccggcgcgagggcgtccggcgaattttcgcgcagcgcggcggcgagttcgacaatggtgttttcgccttcgccgtgcgcgacgacatccacgaggccggtctgcaacacctgcggtgcgacgtggccgaagaagcagccaccggcgatgactttggccccgagactttttgcgaggcgcgcaaggcggagacattccgcacaactcacggcctcctcacccatcgcgacgacagcaggacgacgcgcgcgcagttccgcttcaagcgtgcgccagcccatttcgagcacgggcgcgtcgagaatttccacgcgccagtcgggacagtgctggcgcagcattgcggccatggaagcgaacgcgagcggcggccagaaggacgaagcgggaccgttgaacggccacagggggcgcggcggacggacgaagagaagcagctctttcatccgaatttcgaagttggggagcacgcccgcctcgggcgtcgctggccgcgccctcgcggccagccgcttgcgcgtgaaggtgccatgaaccctcgaaaccattcggtgcgtccgagttttccgcgagggcgcgaaaaactgcgcccgaggcgggcgcgctccccttctatttcggaattcgggttcatgcggccgcgcggggagcgggttggaaaaaccaccgccataatccgcgcaccgtgagaaacaaattggccagcaccagcaacgccagcaccagggcgccagcagcggtcagcagcgagagcgcggtggcggcaaaaggattttcgctcacgcccaggagcggtgtgaacaccagcgcggcgatcaggaccgtgaagaatatcaaaaactgcgtcggtgaattcttccgttctgcctcgggtaaaatatttatttgcagtggcagccagagaaaagcgatgaggccgaagccaaagagaatgccggaagcggcgcgcaactccggcccttgcggaaaccaatgaaatccggccggaaccatgaacaacaaaaacaagccatggagacgaagccagaaactggttaccggcggcggaccggcaagttgcagcaacgcagcgacgaatgcgccaacatagacgccggtgcagcgctggcagcacggcaggagttcgccgccgggcgaccaggtgtgcgcgagaccctggccgcagatccaactgaaccactgatggaattgctccggcatacttcagaagttcataccttcatcccgcacatttggctggacgatcggcaccttggtgaccttgggcagccgccggtccacctcgaccaggaataacgcgcagtcttcgggcttgggattggatttatctttcaccccaagccacgccgaagaaatcgcccaagtccggccatcatgcgagagggatggttgcgccagcaacgcaaccatttcatcagacttcaccgagaacagcggcgtgaagcgcagcggtttttccgagagcgggatttcgagcaggccgcactcataattggtttggccttcggtctggcttaagtaagtcgtgaaggctcgatctttacccggacccagcgccaaaaagatgctggccactttcacgtcataacccggccgcgaaatgaggcgcgagaaggtcttctgcccgtcgcgttgcacctgaaattcctgattcgtccccacgtgagcgatgaaaatagcttcgtgcgcctgcgagttaaagatcgggaacgtgccatctttgatgctgttggtgatgattaacttggactgaaactccagcgtttgcggattcaccaggccgaattcaccgctgtcattttccgcctcgcgccagcccacgatggtcttgccatcctcgtttggcatcattgccagcaggttggtcgtagtcacgccttcacccgtgcgcaagtccaggcgcacgaagccgtgctcctgattcagaaaaacccaatggccggccaccgcgaatggaaactgcaaagccatcgtggcatcctgacatgcgatgctgccgaaatgacgaatcggctcggcgacaccgcgcggcagcaaagtcaaggacaggcgatctttctcgtctgcctgcgccaccagaatgtgtttgccatcgggcatccactcggcgcgcatgggggaagaatggaagttggtgtcggcatgaagttgcatgcccgagaaaacgtgttcgctgcggcctgatttgcggtcgtagatggcaaagctcaaggcaccgctttggggatcaaacgagggatacaggacctgccggtcgtccgggctgaaggcagtcgaacaggcgagaacgtaaaccaacagcgacgccaggccgatgccggccagcaggacatgaatggggcgatttgttttcataggacagtatcggtgcggatttcttttgggactctccgcacgacattaactccgaatggggcaggatgtgaattgaaaaaagccaacgaacatcgaaaagcccgatgcccaataaacgcgacaaaaccgcccttctcgccgccacgcactgggtagtgcgcagcggcggaacgataaatggtgaaccaataccaaacgctggctcaaaacggcttggtatccagatacagtcgataatccttgatgcggccgttcggcgagtcctggcgcggtaacaggcgcacgccggagatatcctgctccgcgccaaaatcaatcacgaccgtgtgcggatgactcgtgtgtggcgcgctccaaagcgtgtgccagaaagtcgccgggtcactatcaaagatcttttccgcctggtcgccctcggagaaattttcctcgctgtccacatagatgactttccagcttttgcgcgaaaccgttttgccggcagcatccagagcgtcgatttccgcgagggtggtgaactcatcaccgttatgcgacgagagcgcctgcaaccccagataccgcgccttctgcgtggggattcgcacggtctgctcatcttcgctgtccgcgagcgcaccagttttaaccaaagctgacgcggggaatttcggctccgacatcttgccgcgcgacgcggtgttctcggatttgttgctcacctggctgcggacgacggcgttctcgtccgggttcaactggttcagcacggggtccgtgagcgtggcgagctcgtgaatgccgtccttgatttgctcgaaaaggacaatttcattgcggccttttttgagccagacaccgggcacataaagcgtctgttgcggcccgatataccaatagcggcccaggttgtggccgttgatgaaaacgatgcccttgccccagccacgcaggtcaaggaatgcatcgccaactcgggcaagttcaaacgtgccgcgcgcgacaaacggcgcggctgccgtggtcgggccggaaattttcaaagccgaaacattatcgaagggcagcttgaacatttcccagccggtaagttcgcgatcgccgagcgtgacagcttcggtgatgcccttgtgattgaaaggaatctggccgccgtaattgatgcgcccgccattctccaggaggatgtccagcgtggcgctggcattggtgataaccagcgtcaaggaatcctgcttgtgccggcggtcgagcgtggcgacgcgcttgccgtccacgcacaccacggcgtaatcgcgcagctcctttattttcagggccgcatccaccggcccgacaattttcgtgcgatacaaaacgtagccgtaatcctggccgagatcctcaaagtttaatggcttttccgacttcacgggttggccgagcaggtcaaacacgctcgcggattcagtcagtttaatttctggaattgcaatgattggcggagtcggcggaacgtccgtcaaggtttcgccgggggcaagatgccgcgccagcacttcccgcagggcgaagaatttcttcgtcggccggcccgcctcgtcaatgggcgcgtcgtaatcgtagctcgtcggctgcggctggaaatggccgccgtagttcgcgccgttcatgaaaccgaacgacgtgccgccgaaaaccatataatagcaaaacgaaacatggttcgtgatcttccattcagtttcccgcaccaggccgcgaatgccggtctgcgcatgatcttcgccccaatgatcgagccagcccggataaaattccggcacgaaccacggcccggtcggccgatacttgccgatctccttcatgatgttggtgccgccaccgccattgagtccgggcagcacatccggcaaggaaccgccggccatcatgtgcccgccgccgtccgaagtgaactgcggcacatcaaagccagcggcgcgctcgaggtcgcgaatctggcccatgtaaacatggtcgctgccgtagctgccgtattcattttccacctgaatcaggatgatcggtccgccgtgcgtgatttgcagcggcgcaagctgctcgccaagcttcttgaaatacgctcccgcctgcgcgaggaatttcggatcctggcagcgcactttcaaatcgcccgacttgagcagccaccacggatagccaccaaattcccactcggcgcagcaatacggcccgggccgcacgatgacccacaggccttccttctgcgcgagccgcacgaactcggcaacgtctgcgtcgcccttgaaattaaatttgccttcctccggctcgtgctggttccagaacacataaatcgaaaccgtgttgagtcccatcgcgtgaatcattttcagccgatccgcccaatattcatgtggcacgcgcgccggatgcatctcgccggccttgatgagaaatggtttcccatcgagcagaaaatcactgtcgccgatggtgaaggtggccgccgacgtcgagcggaccaggaggcagacgcaggccgtgatcgcggcgtgccggccgaagcgggcgaggagttttttcataaagagagaatggattggttttattggaggttggcgaaacaaatttcatttgggcagggcatgaatatgcccggctccgtcggccgcaagctggagggtgatttcatcgctaatggcggagccgacttgaagcggacggcgctccgcagcgaggtgggtggcaaaaaatccgtcgccaccgcccgtgtgaaaccctgtgacgagcaaaccaaattggtcgctatctgaaaaagcacggacggattgatggccatcggaatacactcgcaactggtctgaccgatccacgagcgatgcttcctggatggcaactttcgtgctgctgaaatcatttccgcccagctcggttgcatccaccgaccacgcgttcgcgggcggcgtcaccgcgtaaggggaatggcccgtcgcgcggcgagctttcgctgttccaaccgggcgtccaaggtgcccaaccggataatacgaccactgcgccgagcgcttccactgaagcgttgcaaagtttttcggcgcaaaaaaaaccatgccccactggcgcggattcacttttatgttcgaggcgaaagcgtaacgaatcttgattcctcccgccgtgtccaggtgaatcacataatcacctgtggccagcttgctcgatcctttcacggcaatctcaaccgaacggtcggcggcttccttcgccaacaccatgttagctatccagttttcaccgccgttattcaatggtttccaaaccccaaggtccaccggttcgcacgcttcggattgcagcggcagaagcatcagcgccggaccgccggtgagaaaggtgttgccattcagcttgccgctgatgaactgcccgctgtggcggtcaataagatattcgactttagctcccttgatttgaatctgaccttccgccggtgtgaccaagagccattcaccgttcttttcagcgatgggaggaatgtctgcggtggagttccccaggacgatattatcttcatcacagacaaaaccgcgcggatcggtgaaagtcaaatgcagcacgtcgccatgcttcaatccggcgggcgacggaatgacaatttcgccactgtgccgcgcaggcagatcggcccgcacttttccctttgagccgccgacattccacgctatccggacttcgttgaggtctgcaaaactatatcggttctcaacgggaacgcggatggactcgccggctgctggcagcggcaagctggttgtagtcacctggacaggcgaataggttttcttcacatgccacgtctccggcttgtcgcgccgccagccgtcgcaaatgctgccccacatgccgtagccgacaaattttccattgggcaaacaaaacacgtcgtcaatcgccgcccagatcgcgccgccgagacagccgtcgtgctgatacatcaagtcgctcatgcgcgcaaagccgcgcccccagtcgtcgcgcacgcctggatcggtggcgagttcgcggcggttgtaacattcgacgtggcaatattcgccaaacaagactgggcgatttgcttcatcgcatttggccggcccgttctcgccgggataatgataaaccgcaatatccgcctgactgtgcgcgttgttgtagccgccccagcattggtcgtgaaacgacgtcggacgcgtcggatcggcgagcttcacgcgacggttcacttcggcaaacaacggcgaccaagtggattcattggccagcgaccagatcgtgacgcacggatggtggcggttcgccgccaggttttcgaagttggcacgcaggagaaaattgaaaaactttttgtcgcgataatcccaggaactccagatggaattcgcgccgtgattcacccagcacaacggcgcttcacactcgacgaagaaaccgaattcgtcgcacaaatccaagaactcctcggcgggcggataatgactggtgcggatgtagttcacgtttgccgcccggaaaagctcggcgtcctgcttccaaatctgcggcgtcaggctgcggccgcgcaacgggtccacctcgtgccgg

SEQ ID NO: 3574 - DNA, 23273 bp, synthetic construct
  source 1..23273: mol_type = other DNA
  misc_feature 1..23273: note = Synthetic
ccgcgccaaccggctcgccctggaaagcgatgccgcaaactatgaggtgtttaacgtgggtggtggtcgcggctacaccgtcgttgagtttgcgcgcatcgtcggggaaacgctcggggtgaatctcgagccgaacatcagcggcgagtaccgggttggcgatacgcgtcacagcgtctcggatatttccaaactccagcgactcggctggcagccgaccaaaaccccgcgagacagcgtccgcgattacgtcgagtggatccgccggcaaaagctggacaaggattatgcgggggaagcactgacgaagctgcgcgaaatgggcgtgttgcgaaaagcgacctgaaccggtgatggaagcgcgcccgtacctgtcggtcgtcattcccgcgtacaacgagcgggagcgactcaagcgttttgtgcccgggatcgtcaagtttctgcaatcgaaggggcagtccttcgaaattatcgttgtcaacgacggtagtcgggatgacacggcgatggtggcgggcgaattgtcgaaggaatttcccatgctgcggctgatcgacctcaacccgaatcgcggcaaaggcggggccgtgaaagcgggcatgctcgacgctcgcggccagtttgtgttcttcaccgatgcggaccagagcacgccgattaccgaggtcgagaaactgcttccgaaattggagcgcgatggatttgacatagcgattggttcacgggccgtgcccggcgcgctggtggaacagccccaagcctggtatcgcgcgctggccgggaaactttttggcgtcgggacgaagatcttctgcatccgcggtttttacgacacccaatgtggtttcaaagcgatgaagggtgaagtggcgcaaaaaattttcccgcaggtaacgtcgaattcggcgatcttcgatattgagatgctagtggtggccacgcgagaagggtatcggatcgccgaagtcgcggtgccatgggtgcatgatcccgacacgcgcatcccttacaatatgcgtcgcgcggtgagtatttggctcgagctgtttcgcatcaacagggtgcaaaaagtttttcgggcgctgaaggcgagaacgcattgaacaaaccacggtcaacatccagcccgccgctctcccccaaggcggaatggctcatcgtggcggtgattgtcgcggtcggtgcgtggttgcggtttcaacatctggagctactggagttcaaaggcgacgaggcatttgcagcgaaccgggcgctggagtttgttcatggcggcaaactgccgacgtccgggctgatgtcgagcgtgggcgtttcgaacccgccgctcttcatctggctgttgatcccgatgtttttcattacctcgagcattgcgggtgtgtgttgcctgattgccagcctgggactggcggcggtggtcgcgacctggtggattggacggaaatattacggtccgttaaccgggctggtagcggcggcattgtttgcgactgcgccgtgggcggttatttattcccggaaaatctgggcgcaggatttcgtgccggtcttcgccaccgggacgatgtgggcggtgcatgcgcttattctcggaaagaaaccgaaggcggtgttctgggtgttgtgcctgccgttgtgtgtgatccagattcactacagcgggtttgccctgacggcgaccgtggtggccattttgctgctcctgcggccgaagatcgattggcgactggcggttgccggtgtcgggttggcgctggcgctggcggtaccctacgtcatggcacaacagaaggacaactgggtggagtggaagcggatgtcggaagaacgcagcagcagccgctgggagaagcttccgttggggatgacgatcaatccgcagagcggttacccgttcccgcgacggccgagtgaagcctgggaacacgccctggcgatcatgaatgccggcgagatcgaggacgtgctaggattgagcaccggcaaggaatttgatcccaatcggatttgggtcagcaagggcgcgggacagaaccggtattttgagtcgtcgctgacactgggtgattggctgccggtgctgcagcgactggcgtttctcgcggccctgggatggttctgcgtggtggccgcgaaatccgggaaagccgtgttccgccgcgaagtgacggcggatgaggagtcgaagcgggcctggattttggcactgtggtttgtcgtgccgctgggcgtctatttcatcgccgggttgtggacttatttgtcgtactacgtgattctgtaccccatgttcttcctgatctttggggcactaagtcaacgcgctgtaccggcgaaaatcctgatggctggcgtggcggtgttcgtggtggggaatgtgatttttacgctggacatggatgcgtatttgacgcgctacggaggagcccagggcacgtatggatccgggcttggcttcaaggaggcgacggcgaaatttgtggcggcgcaggcggacaccgggaagcttgtcatagagaaccggctgctgcagatggaccattggcagcgcacggaactggcgcagcaggatctaccttttctggcgatgcaaggtagtcacggagatgtactggccaccaataccgtggtgcttgttgtggacgacaaccggacgagtttcgacgccggtcgagtgaactttggcggtttgagcaccaactttggtccgatgcgcgtttaccttatcaaccggccatgaaactgcttttcgagacaaaatgggagcgtaatgccgccattgtgttggtggcgttgtgggcgctgctgtttctcccgaacctgcggacgaatccaaactggtacggcgacgagggtgagtggatggagaaatcctggacgttcatccacgggacggcacggatcgggcctatcgtggacgacttcattttcccgtacccatacccgccgctttacatgattgtgaacggcgcgctgctgcgcgtgttcggcaacgacatcgtcgtgggccgcgcgctgggcgtggtgacggcgctggcagccggggcgctgttgttttggattgggactcgtcttcgcgataaacagtttggctttctttgcgcggctgcgttcctggtttactccgaggcgaacgttaattttcgttgggtgcgttcccatccgatgtccggcacgtgggctttggcgtcggtcgggtttttggtttgttacgtccaggagaagcgcctgcgtgacgcggtgtgggcgggggtgttttgttcgttggcgacggcgacgaattatttcacgtaccccctggtcggggcggtggtcgcgacggtggcgatggtgaattggcgcgaatggaaatcatcgcgtgcgtggcgggatgtgatcattgccggtgcgctggcgtgcgcctacgcgggtctgtttgtcttgtggtacagcgcggcgcacggatgggggcacttgatgacgcaggtagggcggctgacgagcattgccaacaacgaggcgcgtccgaccttcggcggcgagattgggcgattcattgaaaacgtgtggaccctcggtttcaagacgccgacacaaggaccgccgatgccgtggtcgggacatgattggtggctgaccgtggcgacgatcggtttcgtgtttcttccgacgcgtgcctggcgattgcggttgtgggtgccgttttggttgttggtgttgatgtacggcgtgttcaagaagctcaacaatgtaccgttgtttttctatcccgcgacaatcttcctgccgctcatggcggtgggctttgccggagtgctgacgtgggttggggagttggttaaaaagattgcggtaaaatcaaaggatgcgaccgcaatggcggtcgccattctcgtgcttgccgggttcggcctgcagtcggctgccggtgcgtggggtcatttccatactcgcatcgacatgtggacccagcagtccgcgacggacggcgaggcggccatggcttacgtcaacgcgcacacggcgaaggacgacttcgtgattgtgcccaagcagatctactggctggcgcggtgcgaccgccgcagcatgttgactttctgcgcgcgttacgagggggtggacaatgacatgcccgtgccaacgcacattccgacggagctctactggtttgattgccggctggagcaggcaaagttcctcgtcctggagtatggagtcgagcagcgaacactcccggatggacgaaccgggcagttgccagtgggcatcgatgcagtgtataccatcggcctacggggcgtacgcgaagtgatccagcaggtgcaacaagagaagtggccggtcgtgtttcaccagggggcctatctggtgatggcaaatccgcggattgtaaaggagacgaaatagcgtggcgcaggacgaacaagcgttggttattattccgacttacaacgagaaggagaacatccactcgatcgtcgagctggtgttgtcgcaggtcgcgaatctcgaaatcctggtagtggatgataactcgcccgacggcaccgcggccatcgtgaccgagatggcgcaagccaacccgcgcgtgcatctgttgagccgggcggggaagctgggactgggcacggcgtatattgcgggattcaagtggggcctggctcgtggttatgcctacctgatcgagatggacgcagatttttcccacgatccctgcgagatcccgaacatgttgaaagcgatccagcaagcggacctcgttctcggctcacgctacatcgacggcgtacgcgtcgtgaactggccgctctcgcgcctttttttgagcaagggtgcttcttactatgtccgaatcatcacgggtttgccgatccacgacccgacgggaggttttaaatgcttccgccgaaaagtcctggagacaattgaactcgataaggtgcgaagtaatggctacgccttccagattgagatgacgcacaaggcatggatgatgggtttccgggtccgggagattccgattacattcgctgaccgctctgcggggcaatccaaaatgtccggacacatcgtgcgcgaagcgctctggatggtttggtcgctggcatttgcgcacggatttcgacgcaagccacacgccacgttgaagtccgacgcgtgacgatggcgacggccagcgagggcatgagccagcctcaaaaaccatgagcgattccccagagccgaccgggacgacggaatccgcgcacgggatttcgcgcgagccaacaccgttcttcagtgtttgcgacaaagttgcgttcacactcgccagtaccgtggcgttcgcgggctattggtatacgttggcgcccagcgtgacgctggaggattccggcgggttcctgacggcggcttacagcctgggcgtgccgcatccgccggggtacccggtgtggacgatcctcgcatggatttggcagtggatcattccgttcggcagcgtcgcccggcgcgtgaacctgatgtctgcgttttttggcgcgctcgccgtcggtttcgcggccctgctgatttcgaagagcgggcgcgtgttggcgtcgcggtgtggttttctgcagccgatcgagaacaagcgcgggctgcgccggatcatcctcgccagttctgtgtccgcgtcgctgatcctggccttttcgcccgtgatgtggtcgcagtcggtgatcacggaggtgtacgcgttgaacgcgttcttcctgatggtgacgctggtgctgctgtatcgctggagcttcgagacggaacggcgcggacggctctacctggcggcgttcctgtggggcgtgagcctgacgaaccaccagacgctggtgttgctgacggtggccttcccgacgtttgtgtggctggcggatcgcaagctcgggcgggacgtgctcgtcccgatcctggcggtgattgtgctcggagtcttgaagatgattgtgacccagaacagtcagttccatcagggaggattctccgcgatttggattctggcacacggcgtgggcgcgggagtatggttgtacctgctgtggaaggaaagttccgggttgctgctgctgtggcggcaggtgctcgcgacttacgcggcggtgattctcggactggcggtgtacgcttatctcccgttgtcgtccgcaacgaatccgccgatgaattggggttacacacgcacggttgcgggcttcttccaccagttcacgcgcggccaactcgagaaagtccacaccgagcgcaccgtgttgcagttctggggccaggtcaacatgttcttcgacgacctcaagacacagttcaacatcgtgtacgccctgatcgccctcgtggcgctgtttttctatcgtgatttggcgcgtgaggatcggaactggttggtgttcctgttgattgccttcctgttcctggggttggacttcatttttcttgcgaatccgagtttcgaaaagcagaagcatttcaccgacctggtgtttttcctaccgtgtcactgcgtctacgccctttggatcggctacggcttgatacttggagcgggatatcttttgtccgagaagccatggttgcagggagcggcgctgccgatggcggttctggtgttggcgttgccgatcgtgtccgtggcgatcaactgggcggacaacgaggagcgcggccacgattttggctatcagtttggctatcgcatgttcaaaccggggggaggttaccccgagatggagaagggcgccattctctttggcggcacagatgcggggcgttttgtaccgacgtacatgatccatgtcgagagccaggtgtcgccgcgcgccaggacacaactggcgaaatatcccgagagcgccacgttcgatcgtcgggatgtttacatcatcacccagaacgcgctcgcggatgggaggtacatgcattccgtccgtgaccattacggggccgaccgtcctgacccgaaaagacccgagacattgaaggatcgttccggttggcagggtgcgttgttcgatttcgcatggcaacatttggggcgcgaggaagcctacccgcgacagccaatctgggttccgggagaaagcgatttacagatggcattgcagcagtatctggaagaactccgcgcgcgcccgcggttaccgggcgaagacgtgaaggttgaagggggccgcgtcagcgtgcaaggcatcgccagcatcatggcggtcaacggctacgtaatccgggagattttcgcccacaacagggaccagcacacgttttacatcgaggagagttacgccatcgcctggctgtacccgtacctggaaccgtatgggattattttgaagatcaatcgcgatccacttccgcaactcaccgccgcgatggtcgcgcgcgatcgcgcttactgggacgcgctgtttgaggacctgcaccatgatccgcggttcgaccgcgacgacgtggcggagaaaacattcgccaaactccgcacggtcattggcggtctctatgccttccggcacatggtttcggaagcggagtatgcctacaaacaggccatcgccctctgtcccgacggccccgatggaaactttcatctggcccagctctacgttgaggacggacggttcgatgatggggtggcggttcttcaggagtaccaaaggcacgaccggtacaacctgcggattcgtgaagtgatccgggtcatccaggagttgaagcggcaaatgggcgaggaacgcgaactggagcagcaatacgcggcgcagcccggcgacctgccgctggcgctgctgcttatcgactcctacgcccggcatcaacgaacggacgccatcgacgaagttgtcaccgcgctggtggcgagccccggtctgcccgccgatacgttcctgcaacttgcgcagcggtatcttgcgctcggacggctggatcgcgccaccgacctgctgacggtcatggcgcagcggtatccgcaaaacgaggttgcctggtacagtctcggtgtggtgcaatgtgcgcgaaggaattgtgacggagcggtcgcggcgctggagcacgcacttgcgctcgatggcgcggaccatcgtctcctggacacaatccgcggcgacccgcgcctggacaattgccgtcaacatccacgcttccagcagatcctcggtcatcaatccaaccaaccgcagtcctccaccatcctgcccggtggcatgacgattacgcactaattgctgagcggcggcgttctttttctctctggcggaggaacttggcgcgggtattgctattttgcacaattgaatgaagaccggaagaatcaaccgaccaacccccctcagcctcgcgttgcacgctctcaaaaccgcgatccttgaaggggcgacgtggcggtacgagcagttggtcagcgtggcagtgaaagcgggggcgaccgatgagcagatcgatctcgtggcgcatgaagccatcgaggcaatgtttgcccgggcggaacagccgatcacgccacgcaacctcacgcatttgtgcgccgccggctattttcgtcgctgaagcggacttttttggacgcttcggcctgagaaggccggagccgctctcccgcaccctgtcaatccgctcctcattatcgtctgcttggaattcatttcgggcttccgcgtacaacgggcggtctcgcccgttggaattggcgaggtcgtaccccaactccaaagctgaccccacgggagcgtgggagcgacctcagcgttgcgacacctactgccatcgccgctattctcggtaatctcctctcccctccgggggagaggattaaggtgaggggattcaagggctcgtcggtcggattccgtctgagctaacccaaaacgaacccaaaatctggcccccgcagcgctcaaaaagggtcgaattgtggtgtccggtgggttcgttttccaaaccgagtcggacgagatgccgcgatgtagttgccgcggcaaccgaacccctcaaaacaagcccaattgtggtgtcccggtgggttcgttttccaaaacgaacccaccgaaaaacttcccattccaaagttctaaacctctggcagggcgacggatacgctcaaaacacacccggaaaacggtgggttcgtttcgcagaaaccatgtttttggggaccctctttttccacaaggttcgctttaagagcacaccttcttccttggccttactagcatcgttgaaaagtgggcggacttttcgccctatgctttccctatttcaaagaactataccgactatacccatctccccacaccgtgtccagcaaaaactatcctttaacgatatttgcgagacccccggctgtaggccgcaagccgagttccacggagtcaagatcgacggagccgagtcggacgagacgccgctgtcgtctgcggcaaacgcgccaatgacttgccgatggcgcaaccctcacgcggtggggttcggtgtagccgcctcgctctgtcgaggcgttttccgccaatccacaaagcgcaatataatgcgcctaacggcggttttcttctatgaagcgcattatattgcgcataatgaacgacgtaagtatggggaattcgtcgccctacttctggcccccatagctttggcgaaggcggatccccctcccgagccggacgagtccgccatagctcgaagagcgacggaggatcggaggggcaggggtgggttccgcgccttgcgatattgtagggcacgcggcccgcgtgccgtcgtccgcccctgaattccccgcaaccgacccgccccgcgttcgtgccttcgtctgtcgcccgcttccccaatctcccatccctcatccttgccctctgcgcgttccccaaaaagcaaaagagcgggaggcatatcccgctcttttgagactagaaacgcttttgaaccgatgtatccgcgtggcggatagggaagcggtctgcgttatctaactttgtcttgattccggcgggaagagtaccagaatcaccccatgagtgccaagcagaatcctcctccggacctctcgctctccttcgacgtgggacacagttccataggctgggccgttctgcaaacgagccctgatgtggagatcaaaggttgtggtgtggtcatcttccgcgctgacgattgtctagcgagtgcgcgtcgtggataccggcgacagcggcgtcatattcgcagcacacgacagcgtatcaagcgaatgaaggcgctgttgttgcatctctgcgttttgacgcaagcccaactggacaagcccggctgcgcgtggccgtggaagttggcggggcgtgttctggcgggtggcaagacgctaacctggcctgagctttgggacgtgttgcgctggtacgcgcacaatcgtggctacgacggtaaccggcggtggagcgccggtgaggcagccaatgagaaggaagaccaagagaaagtccagaacgcgcatgcattgatgagggaacacgataagcagacaatggctgagacgttctgtgcggtttgcggcattgatccgatgggggcgaagtgttcttccaatattgatccagcgaagaggttcaaagcgaagaatgcagcattcccgcgtggaattgtggaagccgaagtcgctcgtctccttagaacgcacttcggaaagttaaaaggtgtggatgagaagttcgccacggcgatgttcagcgactggagggctctctcgtgcccagcaatcaaactgccaatacggtatcaaggcgggttgttgttcggccaacttgtgccacgcttcgacaatcgcatcatctccaagtgtcccattactggccagaaagtcccgtcgcggaacacccgtgaatttctcagttaccggtggggcatgttattggcaaatgtacgggtggcgcgattggccgaccgtgagttgaagcctcttaccgtcgaggagcggaaggaactcgacaagctaatgcgggccgaaggtagcatgaccgccaaacagtttacagaagccgtggagaaagtagctggatctatccgccacaatctctccacgatgctgatgcacccagatgccaaggacgcgttggtgctcgacgcggtgcaggaatgtttgactacggaaaaaccaatgccggtcaaagcattgttcgcggcattaccgacacggatccagaaacgagcacgcggtcagttgcggcgcggccagtcattcacgttcgccgcgctctacgaagcagcgaagcaagccgaggaattagtggcagcattcgatgccgccgtacaacaacaactcgataaggctgctggtaagggacgaaagaaggataagccattaacacgcgacgaattgttagcgaagtcgttgtcggtacgcaaactcagtggtcgcgctgcctatgcgcgcccgattctcgtgcaggcgttcgcggaagtgatgaatggtaagcatccgaaggaagaaggtggctgtctatttgtgacggagaaaatgcgtgaagcgcaattaaaccgcacgcttgcccaacagaccaacaaccaccttgtccggcatcgcctgttgattctcgcgcgggtactgaaagacatcatcgaggaatatgccggcggcgacaagaaacgcgtaggcaagatgaccatcgaagtaaatcgcgatctccgcgagatgtccggcaagactgcaaaggaaaaggcgcaggatctcggcttgcggcttgcaaacttcaagagtgtcgtcaagaaactcgaagaagcgtttgaaggaaaacagattcgcattacaccgggattgattcgaaaggctcgcattgccgaggacataggctgggtgtgcccttatactggcgagcactatgatgcctttgatctcctgcacaagaatgttgacctcgatcacatcattccgcgagcagatcgtccgagtaactccttagattcattagtcgtgacgtttccagaagtcaacagaatgaaggggaagcgcacggcgcttgcttttatgaaagaggcagaaacaaagcaggtcgaaggactacctcgtttgacactgaagtcactcaaccattttaaggcggacatcgaagcattgcgccccggttccgacccgcgtaaagcaaaaaggcgtggtgcggtgactggaccgattgacgatgatttacgccgttggaaacgcaaggagcttttgctaaaggttgagaaatgggatggtggtgattttctccctgcggacttaaccgtcacatcgcaactggtgcggttgggcgcgcaggcactcaagcgcgagtttatagatttggaagaacctccggtgaccgtctcgttaccgggtgctgtcaccggtgaagttcgcaaggcgtgggatgttcttggttgtctgagcaaggcgtgtccagaagtactcgatgctgaaggtaaagtgaagaccaagacagaaattcgtgacatcacgcacctgcaccacgctcttgatgcgtgtgtaatcggtttggcggcgcatttcattccgaatagggggcgcgtgtgggagctgatcaccaagcgcagactaacggctgctgagcaaagcgaacttgtcgccttgaaggtattcactccagagtcgcatggagaggttcggcttaatgacttgaagccggagcggaaggagcaaatccgccaacgtctggccgagaggcgcgttgtgcagcatattccgaagcggattaccggtttgcgtgttgaacaaaacacctggcgtgtgcaaagcattgaggatggcgatgtgacccttacgcagcgcattcgtcagccggatgggaagcgtccacggaaacaggtcatacagcgatctggcaaacttatcggattagagcctggtaagttgcaaacactcaaaggcgcattggttattggcgaaaatttcggagttgcacttgacccgacgccgactgtgattcatttccacaaggtttggtcgcgcttgcgggaattgaagaaggtaaacggcggcaaaatgccacgtgtcttgcgaaatggtcatttgatacgcgtgtctgaagggtcgcgggctgggctctggcgggttacttcaatcaaacagacggaagcatatggtttggctcttgatctggcttatccagatagtgtgggcttaagtcgtccgaatgctcctatattacaactacaagctgaagggttggcgattgttggcacttctctgacaggattcgacgcgtcggctgttatgtacgctgccatcaagcgtcgccctcgcaaacttaaaacagagcaatcggaatcgtcgtaagtccgtagtcattaaagctggcacgattctggcatcaatacggcatgagaagttgcgctcatgtcgtatcacatcattagcatcgatagcccacagtgctcgatcagttgtcgcgacgggcagttgacgtgtaagtccgccgacggcgagaagagcgtgccgttggaagacgtcgcttccattatcatcaatagtttctcggcgtcgattcacagccagttgatcgtggaggccgcgaagcacggtgtggcgttgatcatttgtgaatcgttcaagcccatcagtcttttgctgccagccaatcgatccacggacacgctcttgtgtcgcgcgcaggtttcgttgaccgaggaagttcggatgcagctttggcgaaagactttcgacgccaagtgtcagaatcaattctccctggctcagcacactgtgccaaacgatgaacggttggaggttcttcgcagtaccgccttcggcaagaaggatcacaaggaggcgatctgtgcgcggatgttctggcaaatgtttggtcggagcttgaataatcctgattttcagcgcgaccgcgagagtggcgggctgaatgatttgctgaattacggttacgccgtgctgctgtccacaatcctgcagaagctgtttggcgtggggcttgatccgacgttcggcatctcgcacgctccgcgtgagcgcagcacgccgttggcgtatgacctcatggagccgtttcgtccgtgtgtggattggcgagtgtatcagtgggcgaaggaacatcccgatccgaaggattggcaggtcagtaaagagtttcgccaatgggtcaccaaattccccttgcagcgcgtggagtatttggatttgacgctggaggtgcaaggttgcatcgaaggggtcgtgcgcggttttcgacgcgccgtgttgtataagcagccgcgactttataaaccatggacaccgagaaattcaaaatgggctggctagtcgttgcgttcgatctgcccgtgatgagccgggagcagcggaaacgcgccgccggtttcagaaacttcctgatcgacgatggctaccaaatgattcagtacagcgtttatgcgcgggcgtgcgtgacgtttgcccggcaggagacacacttgggccgggtgaagcagaaccttcccgaagaaggcagtgtccgggcactctttgtgacccgcgcccaatgggaacgatccttcgttattcagggttcccccgcttcggcaaccgaggcggaggagatgcctgaacaaatccagctttggtaaagcccgtatgccgcgggccttacaatcggccagtatgcccccgccgatttaggaatcaaggcaaagcccgaactccacagtggcgaaacggagcggcagtatgcccccgccgatttaggaatcaaggcaaagcgatcccttcgtccaccgacatcggtcgggtagtatgcccccgccgatttaggaatcaaggcaaagcacggccatgccggtgcgttcgctcagatgaagtatgcccccgccgatttaggaatcaaggcaaagcaagggcatatcgagacacttcaacgagatcagtatgcccccgccgatttaggaatcaaggcaaagctggcccacgactggcccgggaacatccgcgagtatgcccccgccgatttaggaatcaaggcaaagcatcactcatccccgggttggcccgggcaaagtatgcccccgccgatttaggaatcaaggcaaagcaacaactcaatgatcgcgatgctgactgccagtatgcccccgccgatttaggaatcaaggcaaagcaacccaaacccacaaccgaaagaaagcgcagtatgcccccgccgatttaggaatcaaggcaaagctggcggcaccagcgattcggtttccagtccagtatgcccccgccgatttaggaatcaaggcaaagccgcggttcttggcggtggcggatgtgcgagagtatgcccccgccgatttaggaatcaaggcaaagcaacagctcaatgatcgcgatgctgactgccagtatgcccccgccgatttaggaatcaaggcaaagctcaaccaatggagcatgacgagagattgccagtatgcccccgccgatttaggaatcaaggcaaagcgctcggcctgtgcccaacgcgtgcgactgcggtggggggctgcgttgttccgcgaatttttcttgaaatgggtgtcggaaggcggttggcgcaactgcgactaaaacgcggccttgagccccttgcgataacggtcaaacgccttgcggccggcgcgcgtctcccacgcggattgtttgccgggcaggggacggttcactgcgcgtcgagaaatgggaacgcgttggtgccgcttccgtcgtcgatgttgaagctgaaaccgacaaggatgtagcgcgcggagccatcggcatacaacacgttgagaccatcggcatggtttttcacgcccgttagcgactgaaagtagtcggctatcaatgagacgtccgccgatgcgccgaggagaaccggcgcgccgtccggcggcccgcggaaaaaataactgctctgacaggtttggccggggacgccgaagttttggtggccatacgtcggatcgttataggcgttgaccttggcactggggcaatagaagaccttcggatcgcccggtagatacccttttccgacgagagaagcataatgcccgtacgcggcgccgtcccagagaacattgccactgtcgtccgccgtgagcggcatccttgtgtagtcgttgacatacatgtgggtggcctggccgatctggcgcagattgttgaggcaggtggcgcgtcggcctctctctcgagaggccccgagcgtgggcaggagcagggccgcgagcaggccgatgatggcgatgacgacgagcaattcgattagcgtgaacgcgcagagacgccggtcgcggccggccaaacgcccgtgaggcattgaggaaagttgtttggagggacgcttcattattcgtaatatagctgacgacccgatgtttcgtggatgatttgcgcgctgcgaccattcagcctgacgagcactgataatctcacctgtggcattgctggcaagccgattctgaggctttggcttcgcgccaaccggaacgcgctgctagaacgcggccttcagtcccttgcgataccggtcgaacgccgtgcggccggcgcgggtcaggcgcagaattgtctgggggactttgccgcgatacgtcttttcaatttcgacgtagccggcttcctccaaccgagagaggtggctggacaggttgcctttgttcatctcggtttcgtgcaggaggtaaaggaagtcgcattcctccacggccccgagcaggacaaagatcatcagccgaccgggttcgtggatgacccggtccaattcggaaatggctcgcagttgctcgttcattcggttgtcggggcgggcggttgtgtgtgccgaatgtacaaatacagagtggccgcgccggacccaagccacgtaagaccaaggaacaaacccacaggccgccccaactccgcaatatccccggggccgatgagaccaatcgcgagaagcccgagcgccatgaagaataataccagccatttccacgggtggtgcctctccatgcggtagatccagaacgcgtacaccggcacccagacggccaagtagcacattcgttgaaggcttatccaatcgtgtcgccttgtgacttccatcaagcagacacaaccggccccaaaagcgggggctgcgacgaaagagatccaccgggactttctgtcacggcggtaggcgacatacccggtgcgcggccaggtaatgtgtttcttgatggctttggcgttccagtatatgagacccagcatcgcgcccacgccgccgttgaagaggagcaagaaaccgacgggatggtgcttcccgctccaactctccggcaggacgccccacaggtagctcagcagggcaaagcccagcaccatcagccccagactcatctcgccggtcccgtcgatattgtcgtattgcttgggtcggctcatgtaagtttgaagttcagctttcatacatactagtttgcagcacaaactagtttgtgtcaaggtcatttctcgaaatatatttgagtgcgaccgagcgggaggggctttgtcggccggtctgggtgcgttactttccagcggtcgccgaagtattttcttcgcggcggaattgctcgaaaccgaaatcgaaaagcgctttggcatcggtccatttattcgcgctatgcaacaggatcagatgtaattcgtggccgtcgcgggtggccgacgcggcaaaggtgtgccgggagcggagcgtccagcccgtcttggccggccccatgccgggataaacgcccaggagcttgttgtggttcttcagcgtttgcacggcggcggcggtcctgagcgcaagtctgggcgtccgacagatttctcgcaattccggcaccgccatcgcggcctggaagatctttaacaagtcgagggcggtcgtcacctggcccggtgcgggcaggccgttcgggtttaggaacaagctgttggtgcagcccagctcgcgggcgcgggcgttcatcagcgcgacaaacttttccaccgaaccgcccgtgtgccgcgccagcgccagggcggaatcgttgtccgagccgatgaggagggattgcaccagggtcctgaccgggacggtctccccggtttgcaagggaatgcggctgggttcgacgagcgtgtcggcctgctcgatgacgactttgccatcgaggtgcgttcgctcatagaccagcagcgccgtcagcaacttgagagtgctcgccggcggcaagggctcggtgggattccggctgaacaagaccctaccgctactggcatccaccagcagcgcgctgcgggcctgcacttgttggttgagcgacgcgagggaattgggctgggttgccgcctcggccaacggcaattgcagaagcaggagtgcactggcaacaatacggcgcattcggcgcctggtgatggtccccatcaagattccgtagccgactggcccgccccaggcgcacacgcctcttccaacaaccccatgatcttgtggttctgcatcgtagtcacctttgctgatgttactgaatgccggttgcgttgcaagctccgccttgtcggggaacggcgttgcgctgctgcattgacggcgaaagttattcggcctagagttgctgttcttcgggggcccatgcgagtgcgagcgatggcgcaacttcggcaaagggcatcgccggcggttgacagggcgagtaagattgcagccggtcaacacggaggggtgatatgaagaacgatccgaaactcaaggcggtcggcaaattgggggtgacgcctcacggtgtcgtcgagctgatcgattatcaggcggatgccgtcgtcagccgtgtgatcctgaaagcgaaaacgggtacggtgacggtgtttgcgtttgatgagggccaggggttgagcgagcataccgcgccgtttgatgcgttgatacaggtcctggatggggaggcggagatcacgattgccggcaaggctcatccggttcgggccggggaggtcatcatgatgcccgcgaacaagccgcacgcgctgaaggcggtgggacggttcaagatgatgctggtcatgattcgatcgtgagctgtccatcggaccggggagatgtgagattggggattggtgattggaagggggcggccagcaggcgattgtcattgtatagcgcggcgtcgattgctagcctgcgggtcaacttgaaggggagaaatcttatgagatacgcgctcgcgttattggctgtggtttccattgtttcaatcgccacgccgtcctttgccggcgacgaggtgctgaccaacgcctcgatcaccgagatgaagagtctggggcttggcgacgatgtcattatcggcaaaatcaaatcttcggcctgcaaattcgatacgagcatcgcggcgttgaagcaattgaaggacgcgaaagtttccgatgcgatcatccaggccatgctccttgtcctgacgccgcccacacccacggctgcgccagccgccgcaccaacggccgcggcagcgccgggcgatccgaatgatccgaaagcagcgcacgtctccggcatttatctctaccaggaagtcggcggcaaaccgaagatgactctgatggtgccgtcgagagttcaagagcttgaatccggtagtggttggggcatggcttggggcggatcgatgaagagccacgctatcctgtccgggacacaagccggtgtacaactcaccgaaacccaaccggtgttttacttctacttcgacaaaaaagaggcaagtctcggcagtacggacgcttcggcgacttcacccgatgatttcgctctgggaaaaatggaggagcacaaagttcatcacgaaatggtgcgcaggatcgaagtcagcaaggccagcatgggcgggtatcgtgtcggtctaaacaagagcgccattcacacctttacatccgaaaagctctcggatggagttttcaaagtcacacctcaggacctgccaccaggagaatacgtcttcgtgcaactattgggcgtgcgtatggtgagtacgttaaagatgtttgactttgggattgcaggcggcaaataaggcgaagcggccgccaagacgtttcaggaatttgcgcgtaaacacactgtgtaaccggaaaccgtcaagcggttaccacccattccccggaactttagcgagtaaaagtcctgctcaaaccccaggccaattccgcctgtttcctcaaattaagacactacaccctaaccgctgatttaaagaaagttgccgaccggttcggcgcgccgatgccgggggggagcggtagaagtgagaagggggaagggcggagaagaacgcttgaacgctcaaccccgaaaaggattcggggcgggctgttcaatgcgaaaatagtccgcgcttggcaggcgcggctacagcggaagaaataatttgggcaagggggcggacggatggaaggcggtagactgtgaacatccataaggcaactcacaaatatgaggcctggctggaaggtcaggggccgttgatcgcgcgcgatctgcgcttgaagcatacgttgatgaggcaggcggtgttttctttcttgcgggcgacgttctaccgctggtgtcagctctggccggagatttgtcccgatcttgcccaggggccaggggttcttggcgtgggcgatttgcatgtggagaatttcgggacgtggcgcgatggtgaggggcgtttggtgtggggcatcaatgacttcgatgaggtggcagtgatgccgtacaccctggacctggtgcggctggccgcgagcgcgcgtatggccatcgaagcggaccatctgcgcgccgatacgaaggatgcttgtgatgccatcctgagcggttacggggatgctttgagggcgggtggatgcccgattgtgcttggggaaaagtatgagtggttgcgcgaactggcgaacagtgaggcccgtgatccgctcaagttctgggagaagatggggcggttgcccaggctgcggcggcgtgttccgcgtagcgcgatcaaagccatcgagagcttgatgccggatgcggatgtggaataccgggtggcgcagcgcagggcagggatcgggagtctgggacgcgaacggtacacggcgattgctgattggcgggggggcaagattgcgcgcgaagccaaagcgttggtgacttccgcttatgcctgggccatgggtggcaagatcaagcgcgaggtcctttaccaggaagcgctggatcaggcggttcgctgctgtgacccctttgcgcgggtgcgtggtcggtggattgtgcgtcggctggcgcccgattgttcgcggattgagctgtcgtcgttgccgaaggaatgggatgagacacggttgttttatgagatgggatgggaaacaggcaatgtccactgcgggaccgcgaaggccgtgacgatgatcgcgcgggatttgaggaagcggccggcgaagtggttgcacgatggcgcccgagcgatgacgaaggccaccgtaaaggactggcaggaatggaagacggcgcggggtgattaagcaggggggggagggaatttgggattggggattgccgcgaaaactacgtcgcgggtttgccacagacgacagcggcgtctcgtccaactcggctccgtctgacccggcttgagattggagagcggaagggggagcgggcgagtgaacggcccgcgatgagcgcccgcggcaaagaccacgggggcgagtcaggtgtgtttgggtttgatggcaccggtgagaactgaatgcaacgtttcggggacttgcaggaattctgcccatttctgcaggtagatgcggtcgagtgtggttccattgacggcgacgacgccggcggcatcggagagttggcggtcggagggggtgagcttgtgccaatagagtttgtgcaagatgacatcctcggcggtgcaaatgtaagccggttcaccaaagagtgtcacgcgaagtcgccgcgaaaacatttcgcgttcgaagggctgcggctggagcaaccagaaatcaaccttgagggcggagcgtttgtccagggcattgaactggtggggaggttggtaagcggcgtggatggctttatcgtccagatggaaatcgcttttaaattcttccacgaggcgcgggatggcggtgggtggcagttgaatgacgaaatccaaatcgtgggtgctgcgggggatgccccagtagttgctgaccatggaaccggtcagcatgtagtcgagttccgcgcgattcaggcgctggaggcagtcgatgagcaactcgcgctcggtcacggtcaggccgccagttggagacggtggtggaggagttcctcgacttccgtcgcggtggcttggggatgctggcggcggatgccttcgcgggcgatgtcgcaggccaactcgtgcaggtccagggcgatggcgagacgttgttcgccggtcatggcgcggtaacgttcgatctgcgcgatgagtgcctgttgcgggttcacggtgtgacggtagcagaagggtgcgggcgcttcaatatcgtagtgtgattttgccgaggatgaacactgctgcggtgcgacattcggccgacgcggtggctgatccggtttacttgcggacgttggcgaggattcggttggcgatatcctggaaggcggtggggatggcgctggtcgttgtggcgaaagcagcggagcctgttggctgggtggagtcgtaggttgggctggcgggatcgttggcaacttcctggaagaacgtttggtcaactgcaccgaggccgatggtgtaaacggtaatgccattcgcacgcatgccattagcccacatttcccggattcgcttcacaagtcaatgttagtgacatacaggagccgcataaacaaaggctctggtcgatgttgaagcgacaaaaaagcggaggattcaatgggtgcaggtaacaaacaggctctgcgggtaacttttgatagtcgggtgaagttggagtttcatggctcgaacattacctccgatgcgggcctgctggcctaccgggaactcgatgaggtgctggaactgaccgcaaggagtggtggcctgttggatgattggcgcacggggaagaacacgcaacactcgctggtggcgctgctgcgccagtcgatcttcagccgtctggcgggttacgacgacaccaatgacgccgaacggctcgcggttgatccgaccatgcgacatgtggtgggcgggcgagccagcgaacgccatgccgcctccaccagccagatgggccgcttcgagaccgaggtgttgacgcagccgggaaatctggcggagttgacgaggttgtccgggttatggattgatcagttacg

SEQ ID NO: 3575 - DNA, 23171 bp, synthetic construct
  variation 1911..1912: note = note, n is a, c, g, or t
  misc_feature 1..23171: note = Synthetic
  variation 9795..9796: note = note, n is a, c, g, or t
  variation 14491..14492: note = note, n is a, c, g, or t
  source 1..23171: mol_type = other DNA
ttggccggcgtctggcaacccgccaaggacgccaagctggcggaactgaccaaactcctgaccaagtcgcatccgaaggagaaaattctcatcttcagccagtttgccgacacggtcgcctatctgggccgggaactgcgcgccgcagggctgaaaatggccgccaccgtgaccggcgacaacgagaatccgtccggcatcgttcaccggttcagccccgtcagcaacgggaagcgcgaacaggtccagcccaccgatgaactgcgcgtgctcatcgccaccgacgtgctcagcgagggtcagaaccttcaagatgccgccatcatcgtcaattacgatctgccgtgggcgatcatccgtctcatccagcgcgccggccgcgtggatcgtattggccagaaggcggagaaaattctctgctactcgttcctgccggccgatggcgtcaaccggatcatcaaactccgcgagaaagtccggcaacgcctccgcgagaacgccgaggtcatcggcacggacgaggcttttttcgaggacgagaagcaccaccaactcatccacgacctgttcaccgagaaggccggcatcctcaacgatcccgacgacaacgaagtggacctcgcctcgcaagcctatcaggtctggaagaatgcgaccgacgccgatccgaaacttaaaaaactcatccccgatctacccaacgtcgtgttctccacaaagccgttgtccgccatcacgccgcccaccggcgcgtcgcccgtgccaccgacgaccggcgtcatggtttatgtccgcgccgccgacggtaacgacgcgctggcatgggtcaacgaggagggccagacggtcaccgaatcacaacatgaaatcctccgcgccgccgcctgtgagccgaacacgccgggcctgctgcgtctcgacagccatcacgatctcgtccaacaaggcgtcaaactcatcgccaccgaacaccgtgccgaaggtggtcaactcggtcggcccaccggtgcccgccgccgcacgtatgaccggctcaaagactacgccgagcaaaagcgcggcacgttgttcgacatcaaaccactccaccatgccattcaagacatctacgacacaccgttgacagagtacgccaccgacctactgaaccgggaactccggcttggcattgataccgagaaactggcgaagctggttcttgccctccatgaagaagaccggctgaccgtccccgccgacgatcaccgctcccaagaacctcgtatcatctgttccctcggcatccggaaggattgacccatgccactcgacttcacccgcgcccggccgttgctccaacaaagcgatctcaccaagctgttcgtcgaggaactcggctgggatcgctccgaccaggcgttcgaggtcaatgtcgagcaacagcgttaccagttacaggccatcgcaaagaagtgcgggctgatcgcctaccggtgcgccatgctcgacggcagtatcccggattatcggctgcgactgaaagtgcagcgggaggtcagccgaatcaccttcgagcacattctcgttttcaccgtcggcgacaacctccaatcatggctgtgggtgcgacgtgaacccggccggcctatcgcctgccgcacgcaggattaccatgccggccagagcggagatccattgctccagaagttgcagcttcttgccgtgtcgctggaagaggaggaggccggactcactctgccggatattacccgtcgcgtccgggcggcattcgatgttgagcgtgtcacccgccggttctacgaccggttcaagacagagcacgcggcatttctcgccttcatcaaaggcattcccgacggcgaactgcatcgctggtacgcctcggtgatgctcaaccggctgatgttcgtnncgcacccacgaataccaccgcagccagcccggggattcattgctccaaaagctgcaaggtctgtacgtctccctcgaagaagaggaacggggcgacgtccatacgctggtgctttccaaccgcgcccgcacggcgtttgacctggaaaaggtcaccaaggtcttttaccgggattttgacacccatcggaaggcgtttcttaaattcattgatggcatcggcgaagtggccgaccgtgagtggtacgcgtccgtcatgctcaaccggctgatgttcgtctatttcatccagaaaaaaggcttcctcatcggcgacccggattacctgcggaacaaactcgcgctgagccggcaatcccggaagaacagcttctacgccgagtttctgtgtccattgttcttcgagggcttcgccaagaaagcccggaaccggtccgtcgagaccaaccaactgctcggcaaagtgccctacctcaacgggggcatcttccagcgccaccagatcgaggaactccacggcgagaagatccaggtggccgacgccgcgttcgagggcttgttcgacttctttgatcagtaccagtggcatctcgacgaacgcccgttgcgtcgcgacaacgagatcaatcccgatgtgctcggcttcatctttgagaaatacatcaatcaaaagcagatgggggcgtactacacgcaggaggacatcaccggctacaacagcggctacaccatcctcccgttcctgttcgaagtcgcccgcgccaaatgcaaagtcgcgttcgaggacgagaactccgtttggaaactactccaggccgatcccgcccggtacatctaccccgccgtgaaaaagggcgtcgaactgaagttgccggccgagatcgctgccggcatcaaggatgtgtccatgcgcaccgcatggaataaaccggcacccgccgaatacgccctgcccacggaaatctggcgcgaggtcgtcgcccgccggcaacgctacgaggaagtccgaaagaagtttgccggcggcgagatcaccgacatcaacgatttcatcacctacaacctcgacatccgccagttcgcgcaggacgtgattgaaaacgccgaacccgatttgctcagcgcgttctacgctgccctgctggttcttaccgtcctcgacccgacgtgcggctccggcgcgttcctgtttgccgcactgaacatcctctatccgctctacgaagcctgtctgaatcgcatggcgctgttcgtccgggaatgggagcgcaccggtagcaaggcgcacccgaactacgcgaagaactttaaagccgaactgtcccggctggccgctcaccagaacgagccgtacttcatcctcaagacgatcatcgtcaacaacctttacggcgtggacatcatggatgaggcggtggaaatctgcaaactgcgcctgttcctgaaactggtcgcccaggttgaatctgccgatgacgttgagccactacccgatattgatttcaacatccgcgccggcaacaccctggtcggttatgccacctacgatgaagtcaaacgcgccgtcaccagcaaactcgatttcgacaacgcgatggccaagatcgaagataaagctgctctgctgcaaagcgccttcgaaatgttccgccgccagcaaaccgaactaggcggcgaagtcactcctgccgacaaacgcgccctccgccagcgtctcgaatcactcgaagccgaactcaaccggcatcttgccatcgagtacggcgtggacgcgccgaagcccgccgcgttggccacatggttgcactcgcacaagcccttccactggtttatcgagttctacggcatcatgaaacgcggcggcttcgacgtgattatcggcaatccgccctgggtcgaatacgcaaaggtgaagggcgactaccaaccgagaggattggtaacgctcgaatgcaacaatctctgggccttcatcgttgagcgctcctaccacttgcttggtcgcaccggttgggttggcctcatcgttcccatgagtctcgtatgtactgagaggatgctcccaattcagaaagtggtggcggcatcgggagtttcatggttggccaattttgagagcgactccaaccctggacagctttttgacggtgtgaagatgaacgtgacgatcttgttaggggcggctggacagaaacggaaacagtttgccacccggctgtttcgcttcttccaggaatttcgagactacgtctttttctgcatcgagttcacaccaatcaacgagaatccgaaccggttcggtttcccaaaaattagctcggagaccgaagcgagcatcttgcggaaagtttttgccaagcctccgctggcgacagaattgacacagacgtccagacatccagtcttcatacaccgaattgcccactactacatcaagtgcgttgactttgtgccgtacttcaaaagcgaccgggacggcatcaagaagtccgaggactacaaggagttcaggttcaatgcccctgtcgaacagttcgtagccgcgatcaatagttcccttttctacttttactggcaggtattcttcgatgcattcaaagccggtaaactttgtgtggagtcgtttccgttcggcaacgcccggcaatccggcacgctgccagacctcgtcagacttgcaaaggcgcttatgcgcgaactaaagaaaaactccacacgcatccgcgccgactacgaagcgaccggcagggtggagtatgatcaattctacccgcgcgaatccaagccgatcatcgacgcgattgaccgggtgttggcggggcactacgggctgacggcggaggagttggatttcgtcatcaactacgacatcaaataccgccttggccgcgactctcaagacgaggaggaatgatacccatcgcgctcaacgctgctgacgcccgctatccagcgcgtttacgaaagcggttgcgcactgacgtcctgccgcaactatccgccctcggcaatttagacctgctcgcattatccaaaaccgccctcttttgttccacccgttgccccggccgcgccatcctcgccgtctacgaccaagccacacgctggcgcgatgccggtcgctgcatcatcagcggttttcattccccggtggaaaaggaatgtctccgcatcctattacgcggaagtcagcccgtcattatctgtcctgcccggagtcttgaaaaactgcggctcgcggtggattggcaaaatcctttgaccgatggccgtctcttgattctttcctgtttcaccagaggcaaccaccgtgtcacgacctccctcgccatccgccgcaatgaatttgtcgctgcgctggcagatgaagtttggttcgcccacatcgtccccggcggcaagatgcaacgtttggcacataaaattgctgcacaggattgatttgtttatgcagatcattcgcgccgtgcaggtgagtgccgatcattatgtgagcacaagcttccatcagggtatcgagccaccagttgaatgccctcattgtgatgcaagggatgcgctaaaggcgctgggttattattgccgcaacattaccagcacgaaacgcggagttttacgcatttttgtgcggcggtttcgatgttgtatctgcggcagaacagtcagcatccttccagcatttgtgcagccataccgcttggtcttgaataccacgataaatgagtttttcggcggaactttacgagccaacgcgctttcgtggcttcctcttctgcaacaatactggaaccggttcactaaatggattccagaaattaaccgcatcataaagtccgtggtagaacgttcgccacctcacccagacgccgctggctggtggcaggttatggtcgcggcttttggcgacctcgaaaaaatcaccgggacgcttgtgagtcgttttggtgtcactctgtttggtcgttatcggtgccactcgccttgcaacaagggggcaatcgcaaattgacccgtctccacacaacttgtttatttcaatgaaaagcaatgcgtggaaaacttgtcgtatcaatgaaaagtgcttttgaatcgtatttgagagacaaagcaagcgttgccagcgcgtcgtattcacaaatcagggaacagacaagttgcgattttgacatcatcaccagcggtgattgatttattttgcatgaataaaggaaacacagaattgcgaatcatgagcgtcgtagcttatgccagggtatccacggaacaccgtcaattttcgatcagtaaacagaggcgcgcgattcgcaaatacgccaagcgcttgggattggaaattaaaaaagagtattcggatggggcaaaacagccgattgaacgataaagttcggagtttattcaaatgagcatagaagaccaggcactgccaattgtcagtgccgcggcttacgtccgaatgtccacggaacaccagcagtactcgacgagcaaccagatggacgttgttcgggagtatgcgaagcgccgaggactggagatcgtcaaggtgtattcagacgagggcaaaagcggtttaaatattcaaggacgcgattccttggcccagatgattgaggatgttaagaacggacaagtaaatttctcgtgtatccttgtctacgatgtcagccgatgggggcgcttccaggatgcggatgagagcgcctattatgagtacctctgtcgccgcgctggcgtcccggtccattattgtgccgagcaatttgaaaatgacggcagccccgtttccacaattgtcaaaggtgtcaaacgcgcgatggccggcgaatatagccgcgaattgtcatccaaggtttttcagggagcctgccgcttgattcagttggggtacaaacagggcggtacggcaggattcggcctgcgccgaatgttgattgaccagaacggccagcacaaagccgcgctcaagatgggggagcacaaaagccttcaaacggatcgggtgatcttgatccccggcccggatgaggaagttaaagtggttaattggatttatcaaacattcatcagtgaaggaaaaagcgaatcggaaatcgccaagtcgctgaatgatcgaggcctggtcacagactttggacgcgcgtggaaccgggccaccgtccatcaagtgctcatcaacgagaaatatatcgggaacaatgtgtatcatcgcacctccttcaaattaaaactcaaacatgtggccaacccgcaagaaaagtggattcgagctgacggaatattcgaaggcattgtcgagccaagcctgttccacaccgcacagggcatcattttggctcgcagtcggaagctctccgatgatgagatgttggaaaaactacgtgccgtgctgaaccagcacggacgcatcagcggtatgctgatcgacgaggcggctgacctcccgtctagcacggcgttcaggtatcgtttcggcagtttagtatccgcctaccgtttaatcggctacgatccgggtattgattacagtttcatcgaaatcaatcgtaagctgcgcaaggagcaccccgaaatcgttgcgtcggttattcaacggattggggatttaggcgcagtcgcctcttgggacgagcggacacatttgctccacctcaacaatgaattgcgtgtctccattgtcctctgccgccattggatcacaaccgccggttcgtctaggtgggttatcaggttggatgagggactgaagccggacattacggtcgctgttcggatgactgccaccaacgagggtatccgcgactattatttactgccagcgatcgacatgacatgggagaacctgcgcattgcggaagaaaacggcgtttatctggatggctaccggtttgatacgttggattattttctgggcatggccgagcgcatcaagtttgaggaagcagcatgaaagatgaaattgaaatgatcccgattgatcggattcgcattctgaatccgagacatcgtgaccggaagaagtttgaggttattgttcagagtatcaaacacctcggcttaaaaaagccgattcaggtcagtctgcggtcggcacaggaggaggaaggggctgggtacgatctggtttgtggccaggggcgaatcgaagcatttatcgctctaggccacaaagaaatcccggcggtggttgttgaaatctcaaaagaggaacgcctgcttcggagcctggtggaaaacatggctcgccgatacccgtcacccctggcattgatacgtgagattgaacggctcaaggtggcagggtacggcaatgctgaaattgcgagaaagcttgatcttgataacacaatggtcgctggcttgatcgccttgcagaacgctggtgaagaacgcctgctggacgcggcgtctagcggaaggattccgctgggagtcgcaatggacattgcgaaagcggacagtgttgagacacaacgtgaactgcttaaagcctacgaaaccaaacaactcaaccaggtgtccattcgtactgtgaaacgcctcattgaccagcgacgtttcgctggcaagcaacgagacaccagcacccgggctgggcggaacagactgaccagtgtcgagagccttgtgaatgcttaccggcgcgagagccagaagcaaaaactgatgattcgcaaagccaagatttgcgatgccaaactggtcttcatcgtcacggcgtttgacaaactcctcaatgacgaaaatttcgtgaccttattgcgggctgaatccctttccaccatgccaaaatacctgtgggctaaactcggcaccaaacataaggaggctacatgactgatacaaaaatcggatttgaaatgcggaaggttcggctgtcactcgccgtcatccttccagtgcgtcagttgaaagacccacaaaaaaacatccgtcgctaccaaacaatccacgcctccatcaaagaggttgggctggttgaaccgctcgtggtgcatccacagaaggacggggcgggaacatatttgcttctggatggtcatctccgctatttcgcgctgaaagaactcggcgaaaccgaggcggactgcatcatcgccaacgacgatgaaagcttcacctataatgcccgtatcagccggctcgcccccatccaggaacataaaatgatcgtgaaggcggttcggaacggggtgaggccggagcggatcgcagtaacgttgaacattccggtcagaaatgtacgtgcgtcaatgaaactgctggatggtattcacgaagaggctgtcgatttattgaaggacaaagcaatcagcccaaaagccattcatctgcttaaacaagtcagttgcgtcaggcagatcgaaatatccgaactgatggtgagcgccaataatttcactgccggctatgcggaagctttggttttgggcacgccaagagatcaattggcacaaccggaaaaaccgaaagttaaggagggattgtcagccgaagaaattggcaagatggagcaggagatggagtctcttgagcacgacctcaaggctgttgaggaatcctacggagaaaatatgctgaacctgaccctggcgcgcggctatattagaaagctcattgacaatgccaaagtagtcagattcttgaatgggaatcaccctgacatcttctctgaattcgaaacgattgcgaccgccgagacagtgtgatggtaatcagccttgcttcaacggggcagcgctcacggggtgcggagattcatcgaccttatgggatggccagtgaaagacttggactttgccgcttaggcttcccccctgccctacgccgccgctcgcaaagctccaagacttttcctggcatgggctatccgaaacgctggcgatnnagcgccttctggcgttttgggtttcctgaccggatgcgtgcaaattcagtcatcgggttacaaagagaaagagcgggaggcatatcccgctctttcgatatcagaaacgcttttgaaccgatgtatccgcgtggcggatagggaaacggtctgcgttatctaactttgtcttgattccgggaagctgtgtatcacaatggcgacatggcgtctaggagaaatgcgccagaccttcaactggcattcgacgtgggccacagctccatcggctgggccgtcctgcaagcaaatcctgatgtagaaatcgcaggttgcggcgtggtgatcttccgggccgatgattgtttggcgagcgcacggcgaggataccggcgtcagcgtcgccacattcgctccacaaggcaacgcatcaagcggatgaaggcattgctgctgcatctcggcgtgttgacacaaacacaacttgataagtcaggttgcgcgtggccgtggaagttggcggcgcgcgtgcttgtcggtggcaagacgctaacatggcctgagctttgggatgtgctgcgctggtacgcacacaatcggggctacgacgccaaccgccgctggagcgcggcagaagccgaagcggagaaggaagacacggagaagctggagaacgccaagacgctgatggacaagcacggcgtcaaaacgatggcagaaactttctgcaaggaactcggcgttgacccacgcggcgcgaagtcctcttccatgacgcgattcaagggattgaatgcggcgtttcctcgtggcgtcgtggaagcggaagtcgcgcgcatcctgcaggctcatttcggcaagttaaagggagcggacgagaagttcgctgcggcactcttcagtgattggcgcgcgatcccctgtcccaagatcaagttgccacagcgctatcagggcggcttgttgttcggccaactcgtgccgcgcttcgataatcgtattatttccatctgtccgatttctggccagaaagtaccgtcgcgaaacacaccggagtttctcaatttccgctgggggatgttgctggccaatgtccgcgtggcgcgcttggttgaccgggaattgaagcctctgacggtcgaggaacgcagggaacttgacaggcttacgcgtgcagaaggcgcgatgacggccaagcagttcacggatgctgtggaaaaggtgacgggtgcgatccgtcacaacctcgccactatgctgatgcatccggacgccaaagacgcgctggttctcgacccggtacagaaattggtgacgaccggacatcgcgcggccctctggccgactttgcctgagcggattcagaagcgggcacgcggtcaactgcgccgaggaaagccggtcacacttggcgatctcggcaatgaagtgccggcgttccacgcacaggttcaatccattctcgacaagactgccggcaggggacgcaagaaggataaggcgctgacccgcgacgatctgcttcgtgagatcttgcaggtgcggaaactggacgggcgcgcggcttattctcgaccgattttgcggaaggcattcgagcaagtgatggacggcaaacatccagcagaggacggcggctgtttgttcgtgaccgaacagacacgtcaggcgcagttaagccgctcattgacgcagcaaaccaacaatcaccttgtccgccaccgactgctgattcttagccgattgctcaacgccatcgtcaaggaatacgctgacggcgacaagacgcgaatcggcaaaatgactatcgaggtcaatcgcgacctgcgcgaaatgtccggcaaaactgccaaggaagttgcacaagacctcgggttgcggctggccaattttaagaacgtcgtgaaaaagttggaaggtgacgagagtttcatgcgggaactgaatcagcgcgggttgcaccatatcccgcctggcatcatccgcaaggcgcgtgtggccgaagacctcggctggcgatgtccgtacaccgggatggaatacgagccggtccatctactgacgcggcgcgtggacaaagaccacatcatcccgcacgcggacagggcgtcggactcattggattcactggtcatcacattctcagcaatcaatgcgatgaaaggcaaacggacggccttgcagttcgtgaatgaagaacagggcaagacggtcgaagacctgccgaacctgtccattgtcagcgtgaatcgttaccgagagtttgtcgagggattggaggcgttcagagggcatgacgacgacaggcgacgtaagaaacgtcgcaaggacctgttgttgctgccgagttatgaggagaaggaattcacgcctcgcgacctgactgtcacctcacagctagtgcggcttggagcactgacgctcaaacgtgaattcgccgacgtgaaacaaccgccggtgattgtgtcgctgccgggcgcggtaaccggcgaagtgcgcaaagcgtgggacgttttgggctgcctgggtttggcgtgttcacaagttctggacgttgagggcaaaccaaaaaccaagacagaaatccgtgacatcacccacttgcatcacgcactggatgcctgcgtgctcggattggcttcgcattttatcccgaacaacgggcgtgtctgggaattaatcaccaagcgcaacctaacttcagcagagcagaaggagttgatcgcgctaaacgtgttcgccaccggcccgcaaggccgtgttcagttaagagatttgcgaccagaacgaaaggaacagattcgacaacgccttgctgaaaagcgcgtcgtgcagcatattccgaaacggatcgcgggactgcgcgtcgaacaaaacacgtggcgggtgcgaggctcgaaggacggtgatgtgacgcttcaacagcggattcgacagcctgacggcaagcgcccgttgaagcaggctgtcgagcgggcaagcaaactcattggactggaagacggcaagctgcataggcttagcggtgcgctggtggtgggtgagaattttggcgttgcactcgacccgcagccgaccattatcccgtttcacaaggtctggccgcgtttgcaggagctgaagaaagccaacggtggcaagctgcctcgcgtgttgcgtaacggacagatcatatacattccgaagggcacatactctggtgtctggaaggtattctcggcgaagaacaacaagtccggtatggctttggatatggggcggcctgatgttgtgagacttcggaataagacggacggacacaagattaatgtcctcctttcatccttgctcaaagacgggatgacgattgtggatgcaccgctgacgggcgtttcgtccgctccaaagcaatcctaagttggcacacttctggcatcattacagcatgagaagctgtactcatgtcgtaccacatcatcagtatcgatagcccgcagtgttcgattagttgccatgacgggcagttgacgtgcaagaccgccgacggcgagaagaaggtgccgttggaggatgtggcttccattatcatcaatagtttttccgcatccattcatagccaattgatcgtggaggccgcgaagcatggcgtggcgttgatcatctgtgaatcattcaagcctgtcagtttgttacttcccgccaatcgttccacggataccctgttgtgtcgcgcgcaagtgtcgttgactgaggaagtgcggacgcaactctggcggaagacggttgactccaagtgtcagaaccaattttccctagctcagcacattgcaccgtccgacaagagcttggaatcgcttcgcggcacggcgttcggcaaaaaggatcacaaggagtcgatctgcgcacggatgttctggcaggttctcggtcggagcgtcgcgcagccggactttctccgcgcgcgcgagggcggcgggttgaacgacctgctcaattacggttacgcggtgctgctgtcaacgatcctgcagaaattattcggggtggggcttgaccctacgttcggcatttcccacgctccgcgcgaacgcagcacgccgctggcatacgatctcatggaaccgtttcgtccgtgcgtggattggcgtgtctatcagtgggcgaaggagcatcccgacccgaaatactggcaagtctcgaaagaatttcgcaaatgggtcacggcatttcccttggaacgcgtggagtacctcgacctgacactggaggtgcagggctgcatcgagggcgtcgtgcgcggctttcgccgcgcggtactgcacaaacagccccggctctacaggccatggacaccgagaaattcaaaatgggctggttaatcgtcgcgtttgacctgcctgtgatgagcaaagtgcagcgcaaacgcgccaccgatttcaggaattttctgattgatgacggttaccagatgattcagtacagcgtctatgcgcgggcgtgtgtgaccttcgcgaggcaggagactcatctcggccgcgtgaagcagaacctcccagaagagggcagcgtccgtgccgtcttcgtgacccgggcccaatgggaacggtccttcgtaattcaggggtcccccgcctcggaaaccgaggcggaagacctgcctgaacaaatacaactttggtaaagcccgctgccagtgagccttacaatcggcgagtatgcccccgccgatttaggaanncgatttaggaatcaaggcaaagccaccgtgccgggcggcttcgttggccttgtagtatgcccccgccgatttaggaatcaaggcaaagccgtggggtcgatgtcctcctgccattctctagtatgcccccgccgatttaggaatcaaggcaaagcatacatagcacgaacagcaacccacgcaagagtatgcccccgccgatttaggaatcaaggcaaagcgagcaggccgtgcgtatccgcatggcgcaagtatgcccccgccgatttaggaatcaaggcaaagcgcccgcctcgtcacacttcgacgaaacctcccccttacccccaaccgcgtcaggcctgcgatctttcacggattggagacattgcgccccttcgcaagagagaaaaagaaggggcgcaccgcgcaagcacgacaatgttttacgaggaaatagcaacgtgtcaattccgcaaagaaaaagagagaagcaagtcgagcagctatcagcattcagctggcaagcagggatgctgtttctgaattctggttgttcatgcatctaagaacagagtctcagatgttcaccaaatcccgctgcgcatcgaccgcgctcacggcatcgtcaagtgtacccggtagaaccgttgggtcaagccgacggcagaggtatccgtgaattgcatcgttccgccggttcctgtaattcctccaaacagtacggaccaattggttggcgtcagacagtccgtgtactccactgcatacgtcttgccgctgacactgccaaagctgattaccatgccaatggtggtgaagttcaatgctggcgtcttgagcacggtgccggcatcacgatagacacccttgttgaggaaaccacccaagaaatggccgaacccgttgaccagatcgacagtgccgttgttgacgaccggcccaaggaattcgatgtccgcgccgttggtggcgatgatgctgctgttgtttgtcaagatgccatcgagtgtgagcgttcccccggggcaattgacggacagcgtgccgctgttgtttacgtttccgatgattgtcccacagccggcgatctcgctttggttcgagatactgatattgtttccgatcaccgtcccgtcactcaagaagatgtacccggacggtaatgtgagcgaggcgttggccaagttgttggtcacgataaacgcgccaccattaacgaccgtgactgtgttgcatggagcgatgctgtttccgacaatcgcctgaaacgcctgcacaacagcgctgttggagatgagcaaatgatcgccatagttgttaccgattatcaattggccaattccggcccattgggaacctggatctgtcacgaccgcagtgtaatcctcaccataaccctcgattaaggcatgcgtgttgcttaataattgccccccctctttgatcaacagcgacggtggaaagttgttcgtcgagaggacctgcacccgtaggctggacaattctagttgagtcctgacggtagttttacctcgtggttggttggttgttcaatgctttctgtaccctcacagcccccatgggggctggccgccgcccgcgcgaactcttgcggcgtgcgattgcccagggaactgtgcgggcgttgctcgttgtagtcctgacgccagtgttcgatcagcgtgcgggcctcggccagcaccgtgaaccagtgctcattgaggcattcgtcgcgaatcttgccgttgaaactctccacgtaggcgttttgcaccggcttgccgggctcgatgaactgctgcttcacgccgcgctcatacgcccagtggtccagcgcccgactggtgaactccgggccgttgtcggtcaccacccgttcgggcaggccacgaccttggctgatctggtcgagcacgcgcgccacgcgctgcccggacaacgaggtgtccacttcgatggccagacactcgcgggtgaagtcatcgaccacggttagcagtcgaaaccgccgaccgttggccaattgatcgctgacgaaatccagcgaccagcgctggttggcccgctcggccggtgcgggtttctccccgcgccaccgggccgtccgtttccgtttgcgcacgctcacctgtaagtgttcctcctgatagatgcgtaacacgcgtttgtggttgtcgccccagccctcgcggcgcaacagcaccagcaaccgtcgatacccaaaccggcggcgctgggccgcgcgttggcgcagccactgccgcaagggctcatcgtgatcgggttgggccacatagtaataactgcttcgggggagttgcatcagcccgcacgcccgtcgccgactcaccgcgtggtgctctcgcacggcggcaatcgcctggcgcttggcggcgggcgtcagtactttcccgagttcacctccttgaggatctggatgtccagggcttggtcggccaccagccgtttcagccgccgattctcgtcctccaactgcttcagacgcttggcgtcgctgagttccatcccgccgaacttgctcttccagcggtagtaggtttgctcgctgatggcgtacttgcggaccagctcggccaccgccagaccggcttcggcctccttcaagatcgcaatgatctgctcctcacggaatcgcttccctttcatcttggctccttcctggctcccgccagattacccgccaagactcacatagcaaatggcacagtttcaggggagcaggtcagagaaatactctgagcccacagtcatcgtgctggcgttgcaaatcgtgttgctgccggtaatgatcatttgatagatgagatcattgcccggtcctccctgaattcccatacagttgacagtcgcgccattcgtgagcaccagcaaatctccagaagtgtagtcggcgatggatatccatccggtattccatatcgtgccagttccgtctaccaaaatggaattgctggaggtgctgatggtgcacccaccgtcattgaccgcggccccagcgctgatgaccagctgattgttgtttccacaacagtacccgaactggaggctgccgttgttgttccacaccgtgttgccgccggtgatcaacacgacgttgctactgtcccccacccacgctccggcgctgatgaacgtcgcgccgccactcaatgtaaactggttacccggtccaaaaccacccaccacaaacgtgccactactggtcaacagcgagttcgcgccgtccacaatgagagcgctgttgatgctttcactcacccacacggaagtgttgctcacgactgctgcgccgtccagaatctgcatttgattgcccgaactgccgctccttccaaccaccaggctgccgctgttgctccaaacggtgttggtgccggtcaccacaaccgtattgttattcgcaccggatccgtcaccgatgtcgatgaccacggaactgtaaaccgtcgcaccgttggtcaccagcagcgtgttgttggagctcgatccaaagtagaaatctcgattatgccaaacggtaccgggtccggcgacaaccagccggttgttgccggaaattgggtcatccccgacgctgaccgtggtgttgctcacgacggcacccgcatcaatcgtgagttggttgctgcccccgcaacagtaccccaggtcgaggctgccggtgtttctccacacggtattgctacccgtgacattgatgacgttacctgcaccgcctacctgggcactcgcacaggtaaacgaagcaccgccgctcagtgccaattgattccccgaaccgccctctcccataaaaaggcgaccgctggttatcagccgcgacttagaacccatcacaacaagcgcattgttgctggagatttcggcgccgagaatgacaccgccagtattcaaaagttcggccccgttcaatacctgtacttggttggcgattccatgatagccgatcaccagactcccgctattccagacggagccgcttccggtcaacagaaccagattattattggccccctgttcatccccaacataagaagctatgggcacggtcaggacgccgccgtttgacacgatcaacgaattgccagctgactcgaaaccaaacccgtttgcagcggccaatgtagaattcgtgcccgtgaccaatgctgtgttgttactggcgggaagggtgttgccgattgtggcataaacgcatccgagcgatccgccgttgttgatctccagataattcatgctgccggtgtcacccaggatgaagtaggtcccggcattggtggacacaccgctgatgatgttggtggtgaagctctcggcgcgagacaacgcacaccagccgccctgtagacacagcactgccgcgacccaacaaaacctccttcgcacgtacgcctccttgttggatgtgtttgtactataagaattatggaaaaggccagcaaatctaggtagtcaattcaggttctctctgatgcgagccttctggctctggatgaccagttcacactgagagagtccatacgagcccacagggacccacaggagcccccaagacggatctttttgctcaattttgcttagtggatggtgtgaaacgagatgaaactgcgtgaatggtatgccctggcgaattggcctaaaagcttgcagaaaaagtccttttgagcccccactcacctcaaaaactccggggcaatactgtctaggttcgagtccttgcgaggcagccatttggtaccctacgacaggcttctgccgattgtggtgatgatgatggaagcgacgaagggtctgccgcgatcgagaccggcatagcgtttggacaggaaatggaccgtggccaactggcatggttcacactatgcgtgtgattttggcagggacgcccaactcctaacgaggttagggttccgcccacaacgcgcaggagcatctcccgcaaactgttgacaactattgacatgcgttgacaaagtcaacaccgctcaacacaccgtttcaacgtttttctacccgcaagcagctcaaaagttgttcctgttcgggaacaaaattgaggagaacctctggcattcttgtcgccaatgaagcatgaagcgcccaaaccgatttcgcaggggggcaataacccccaagaaattgtccgcgctcgcgaacaatctccaagggaatctgcggcatggtcgcccccagccatgaatgaaattcggcaacaaattaagctgcccactggtagtaataccagcgcatcaacaccttaccaatttacgatccatccgactcaatcccggcagggttgcacaggccgtctccgacggctgcctgtcggcagttggcgagtcattaacgctgacggagtctatcggtcagtcggcccgcctaacacagggtattcggatttgaaaccatgaattcacaacgggaacaatttctgaacctgaaggtgactcccgcccggctgacagccgaggaagtcgcttggtatcttggatttcaagcccatgagatcccgattctagtcgccaaaggattgctcaagccactcggtcacccaccgaccaacggcgtcaaatacttcgccaccacggcactaacggagctacaccgggacgtgaaatggctgacgcgtgcgtccgatgtcattgtcgagcactggcgagacaagaacgccaggaaaacgaatgccgatgctgcattcccggtcatgacttcgacaactacagaatctgttgacacgtgtggacatcgtcaacgcctgtcaacgcgacgtgattcggtggctactcgcaacaactccgccactacccggcgtaactcgcctactactcgctaacgtctggagtacgatccaccgtactctcgggccgatgaattcggaagccacacccagcccgaaccaagagaaacgggcaagaaccggcggcggtccggcgtttcacagccggctcgatccccacgttgaattcatccgccagcaacggcggcaacgcaagacctggaggcaaatcgccgaacagcttcgcaccgagaaaagctgcctcattacgttccagggcgtacacgggttctatcgccgatacttgagacgctgcgcacggccccattgggaaagagacgcgccttctccaaggacgcagggttctccgcgaccggcgaccacaacgcaacgcaagcccctactcgcagccactccggtcgcgcgtccgtttcggcaaccgaatcccaacaacatcaacctcaacgatccgtcaagtctatgaacatcactcaacgcattcacttgaatccacaatccaaaggcaaccttggcaagagctttgaggccgaattccgtaccgcttggctcgaccgactcggcatcgcctggaccggctccgatctcgatgatcgtcatcatacttttgccagccgccatcccgaggctgtccggtcgtatccactgggcaaccagcaagaaagcaagacggagttgctccgcttgttccgccgcgtgctcaaggacaccgcccccgtccacatcatcgacacccgcgcgcaagccgatgccctcatcctcagcgcactggaggaactgcaagtcatggaagcttgtgccgaacaaggcgtgcggttgacgttctttttgtttcccaccgacgataccgagagcatgaccaacgtcgggcacttgttcctccgggctggcgaccgtgcggattacatcgtcgtccacaacccggcgaaagcgcggggcgatttgttccgtgggtcacaattggaaaacgagatgatcgccttcggggcgcactccatcagcctgccgaccctcacacccaccaccctgctggcggcggaaaaggcggaggccatcgccaagcgcggcctgtgctttgccgaactgtcgcgcgtggacgctggtcatttggaacggttgctcgccggtgagatgcagtgggccatgatgaggatgttccagcaatacgacgcgattgccaatctgctattgcccacggcgttgattcccaaacacaaatccgcgccaacggtggcgtcacccgtggcggaaccgagtccggaactcaactttggagactagccatggacgagaccaatttcgatgcgctctgtgaaggagcttcaccccaggaagccaaacaactgcgaaagatcctgtccgaatggtgccagggagacgaggattcgtttcccgttcaactcaccttgctgacccgtgcgcagtggcgcgtggcagcgcgaatgccgcagcaattggctgcggcccgtcagcaactggatcaagccttcgccgaacatcaacgccaaactgccacagcctttcataacttcaccgacggtatggccgtccggaccgggacgctggaacagatcgtcgtcaggcacaccgagactgcgaggaagatcgtggccgatatgcgcgtcgaattgacgcacacagaagcgaccgccaagcgcatccaaaatcagttggaagccggagtcgccgtgtggcagaacgcgcggactgacttcatgaccgaacgcgaccgactgatggaaagagttatcgagatcaggaacgggtacacgcaacaggaatggttctgcgttatcctgatactggctgcggtatttacattcgggattgtactcggtatgcgcatcgcccgctgaccgacccggtcgccgcgctggcccgtgccagtggccagctccactcatttcgttacgctgcctctggcacgcgccgcgacgttggtggttcaccagcggtccgtgccgtcttccgtcgcgtccagcgggaacgactatgcgtccgttccgcctgccgctctgtccaccggcaccgaccgcttcttgcacgccggttggcgctcacatccgctcgaccatcggcgaagtcgcgctacccgctctcgacggaatgggcggcgtgccttcgcgcctcaattatatggctccgctcgcgccgtcaaggtaagagcgtccctgttgtgcccttacgcttccacctgtgaccgcgctcgtttcgccaccggttggcgcttaacatttcacgctcgccctctcatcgcctgctctggatggcacacaattcgtgtagtagctacacatgcccacgcttccattggcgtagagtgcaccctccgtagtcagaaagaaagtcaggctctgcgttgaagggctcttgacatgaacaatgagcgaaaagatttcctgttggtgtgcgggactccgccggctcgcatggacgcgcaggaagctgcctggtacttgggcttcgccgcgcacgacattcccattctcgtacacgcgggattgctgaaacctttggggcatccgccggccacggccatcaagtattttgccacggccacactgaccgaactacgatccgatcctcaatggctggcccgcgcctctgatgctatcgtgcggcactggcaagcaaagaatgcccgcaaaaccaaggtgcacaacgggcggattgaaccgcctggccacaatctcccacaatcagccttaactcgcgccaactcgcccgctgctcgctaacgcgctctccccctgccgcagtaatcttcctgccatgcttgcggccaaagcacaatacagtttgcaggatgccgagaagtatttccaagagcacctctctgttggcgattactactcggagagccaagcagtcgccggccagtg

SEQ ID NO: 3576 - DNA, 15347 bp, synthetic construct
  misc_feature 1..15347: note = Synthetic
  source 1..15347: mol_type = other DNA
cgccatggggcagtcgctccaaaccacatggcccgctcgggcgattttcgatttcagactttgttgggaatcaatgattcgaactgcaatttcactggataaccggcgctcggagacgatccgcgcgcgttgagtggcctcccggcacgccaccaccaccactgtgtcgaactccgactcgacgccggtttcaaacaatagcggaatatcgaccaggagccaagctccggtttcgcgggccagctttgcgagagccgcccagcgcgcccggatcggcggatgcaggatttcctctaaaatctggcgcttcccggcgtcaccgaacacgatctcccgcagcgcggctcgatccgctattcctccgggcccgatcacgttcgcgccgaaggcgtcgcgcacggattcccgcacttcgggatcgccgtcgagcaactctctcgcgacgctatcggcatcgaagcaagccgccggcagccagttaagcagttggcgggtaaacgtcgattttccggtggctatgccccctgtaattcctaagacaggcacaagcgcatcgggaaaagcgaccccagcccgctatttagggaggatgggagcgtcaggcaggccgtttggaaccagcgactcgaccacttcttctttctcgtcatcctgattgatcggttcccccgcgggattaagcaaccgggcagtgacaaacaccatgaggtttttcttcaggtgttgatcaaccgaagagcggaataaccggccgaccagcggcagatctccaatcagcggaactttgtcttcgaccttctgcacgtcctcgcgaatcaatccgccgagcacaacggtcgcgccatcccagatggtcacctgggtgtcgatcttgcgcttgctgaagatcggctgattgatgatgttcggagtgatcaccgaagccgcggttcccggagtgaagagcccgaaggcgttaaggaagcccggggtagccggggcaaggatcgggctgccgtagttgatgaagccttcaaattcctccacctctggatgcaattccaagtcgatcgtggaagtttccaacacgacgttcggcgtgacgttcaaagtgacgcccacgggctctgttttccactgagtcggcgaggccggagtgaccggaacggaggtcgagccgccgccgccgccgccgccggttgagccaactgaggtcgggactgtcggcggggagaagtcacttggataaatgaactcacgaatgatctcgattttcgcgctgcggctgctttgagtcgtcacccggggcgccgagaggagatcgactccctttttctgattaagagcccggatgaccacctggaactgcggatcggtgaaaaccccggcaatgcccaaaacgcccggtgccgccgtagtcgctccggctgccgccgggaataacagcgcatcgatggcgtttgcggagattgctccgccgatcccgctccccgtgcggttcccggcggtaactggattctgacccacgatcgatccgttgggggcaacaaatggataattcgtagcgtccaccgcgttgccggttccctgggtgccgcctgaactgaagacgcgcttggaacctccaacattgaactgtccaaggagccagtcaaagctgagttcctttagattgttctgggaaatttcgacaaacttcgcctcgatctcgacctgcttgggcaccgcgttgttctccgaggcgacgatctgctcgatgatgtcgagttggtcctgagtgttgcggacgatcaacttgccgctggtcgggctgtaattagccatggcgccctgcgggaagagaactccgttggcctcgagaaattcccgagccttgaccttttcctggactccgcccgtacccgccccaagcgttccagtcggagaggtggcagacgcagtgccgccacctgaaggcttgttggccaggaagccaggggcaaccttgaattccttcaaaatcaactgatcgaccatggccgtcatggggacgatcgcgaccgcatagggatcgattttgagtttaagtccagtgagctgcacgacgtaccgaaggacttccatcagaggcacattgctcaaggagagcgtgatgcgcgattcgttcgggttgatggcaaccggtggcacgccgcccgccccagcgggagcgggagccggtgtcgttccatccaagcccggaatgcccgccgcagccgtgtcgccgcccgccgccggggccggggccggggccggggccggggccgccggggccgccgccgcgcctggggcatcgagttgcagcacgatattgacgcctttgcgcgacggatcggtctcagccacgtccagggcacggctcttgtccttgaggaaatcgaccgcctcacgcacggtggcatcgcggaactccaccttgggaatgataatccgggaaagtttgttgctcaccaccgccgtattattgggcgactgcgggccttgatcgatcaccgaactgggcgccgagccgtatttccgaatcggcatcccccatgcgttgtcaaccctttgaacggcgcgggcccgggcttcgttgtaggcgctcgtggcgtagttgtcccgagcctgatcgacctgctcctttcccttttgcgcggcaatattgtaaggatcgatgttaaggatctgctcgtaccgcttgaacgccatatcgtagcgcccggtcgcgtagaagcccttggcatccaccatccattgattcacttgatcgacgttcgcccggaacttcggagtgacggtcttgttgaaatagtcgggttcacgcaggtggaccagcaacgtctgtgcgtccccgcagtgcggattatacttgtcgtcgagaacggctttggcgatcatctccgcatcggcgaagcggccctcggctatccgctgtttggccaggttcacgctcgcctcacaatatccatcgaccgcttcagcgcggagcttgtgagtgctcgggcactcgggaagaaagttaatggcggcccggtattgctgaacggcgatgtcgtaatccttctggcgcatcgcggcatcgccggccaccatcgcttcgtgtgcgcgaagcatgtcggcctgtctgcggacgatctcgcgctcagcaactccctgaacggaattgggcaccgaagaaggcaccgagccggcgaaggccgatccgaccgtgaacaggccgaggatcgaacagaaagtaaccagagggggtttgatcatagttgcagttgctaagttgtgagaaagttttaatcaaggcatgcggaaaggccgtaggacgggcgttctttaccggggcgcttcgaggcggggaatttttatctgctcgcctccatttttaaggttcgttattagggctcctccctcttgaatgtcaatcagtttatattccacccctggctcaactttgagcctgaatctctgatctttcttgattctgagttcctgcccatcgagcaggcatttcatttgagcgtaggaatcgggggaatcggcgatacgatttaggaccagcacgatttggatctccgtctcggtattctgaaccgtcaattcggaaacatcggtttcagagccgttttttgggttcggcaccactttgtgctcgaacttgagcactttgaatttggtgccggcgatcttgtcgcccagtttcaagaattgcgtgggctgacggaggtccagcgtgttgatctggaagctgtcatcgtcgtaggcttgaaatagaagccggaagggctgctggataaacttgaccagccgaagcttgctgataaggggcgggtggtcattcttgtcgtttggatcggtcttggccgtccactcttcaagattgctgaagccgtccccgtccgcatcgtcggtgaggatattattctcaaggatgttgaggtggttggcgaaaaaccaagcgttcggaacaggagggtgaaacgggatggcggcatcctccgggtcttccggcttgttgtctttgacaacgtagggcctggaaacgaagagcgaacctttgtgagcgccgccccagcctgccggcttggcgagcgcatcgcgcgcatggtcaaaggcggacgtgtcgagcggcttcgacttgctgccgtgggtcacattcgcctgcaccgccgtgaacccattttggaactgctgaatctgcaaggcgatcaggccggaggaagccagcaagagaaccgccattacaatgagggcagcccggtcgtaattctttttgatccaatccataactatttggaaagcgaactggcaaacacgaccatttccacccggaggccaacggtgactttttcggtcccgacgatgtagtgaagagccggttcctcagccgggggcggaaccgccccagccgccgggtccccaggattaacactggttgcgagttgagtcttgggcgttgggttggcttcggctcgcgagagcggcttctcgacgtcgttcttgatcgttaccggacgaacgatgaagaattgtttgctgtttttaaccaacgcgttgagtccgttgcggaagtggctttgctccgccgagaattgaatctcgaacgggaactttgtaatcagcggagtggctttgggagcggtcgatgcggggcggcccacagtgattgaaggttgggccgccaccttggagggctccccttcctcggggagcggagtgcggatcaccgagtcgatagtggcaaccttgctctcgatgagagtgttcacggccagttccaccgccttgagttctcgcccaaggttggcggcagcttccgctttcggtggcagtgtccggtagttgtcaaaaccgagatagaatttctcgggaagttttaccccgagcgccttcgctttttccgaagtcgcggaaaccgcgacccggagctgatcctgaaactgctcagggctgatctgttccaaggggaatgaaagcggaaccagttgctggttgagggtcttcacggcttcctccgcggcatccttcttcgcgtccaattttttcaaattggccggctccggatagagaggcaaagcctgcaggcgggtaagttcgccactgagtgtgctatattgttcgttcagtccgctgtatttcgaatacgaatcgaagaggagatagccgaaggtcccccctcccacgaccagcgcggcagccaagccaactaaaaatttatttttgcccaagttcatagctcaatccctttcttcgagagaggaaggcaaagcttgtattcgaaggtccagttctcgttgttttgatccggacgggtagggttaaactcggtcctcttttttggatcgatcacgaagaagggggatgccgagagattctctacaaatttgtcgaggacggccgaggccccgcctcctttgtcgttccaaaggcagagccctttgatgaccagcaccggtgcagcgggggcggcctcaggcctggcaccccctatcggtgcggccatgcctccgaccggttgcggctgcttgagggcttccatggaggtaatccagatataacgctcgggaagacgcgtatttaagtcgtcgataagtttgagccagtattcccggtcttcaatcgcctgaatcaacggcgccgccatatcctgcttggctttgatctgtttttcagcggcggcaaactctccttcggtctttttcagggaagccactcttggctccagtttctcattaacagcggcctggagggtcgccgcttgctggaaatagagccaccacccggccaggattagcaggatgcatgttcccgccatggccaggtaaggacgacgcgcagccatttcccgtgcgcgggtgacgctcggcgggcgaagatccaactccatcgggcaagcgttgccggcccgaagtgccagcccgaccagttcaccgagttggtgggcgtctttgccgattttttcggcatcgacgccattcccgaccgcgacgttgcgcatcggattgaaaaactcgatgggcagcgccagtttttcgctgaaaaactcgcgcatgtagggcatggcgactgcgccaccgcacaggaagacccggacaggctggttgccgccctgctgggagcggtagaatgaaatggagcgggagatttccgcgtgcaaccgggtcatcgtgttgcggatcatcttggagaccctcgccacttcgggatcttccggctcggcataagtgccgccgaggctcacaaaaccctgccgctttttgcgttcttcggcgaaggtaaacggctcgttgaaatctttggcgattgccgctgtaatggtgttgccgctgatcggaacggagcgcgagaagacccgcttggattccacaaacaaaagattggtggtgcgtgcgccgatatcgatgagcagcgagcaaccgcttacatcgctgtaattataacggaacgcattgtagagtgccatgggcgccacatcgaccaaagcggtccgaaccgttgcgccttccaccgcttcattgacgctatcaaggagatcggatttgatcgccaccatgacgacttccaatttgcctgcatcgttggatgagaccagttgataatcccagaccacctcttcaatggggaatggaacattctgctgcgcctcgaaggtgacgatctgatcgatcttttcctcgcccaccgaagggagtttgacgaaccgcgcaaaaaccgactgggagggaatcgagtagccgatctcctttccggtcgcgttcatcttgccgacgagttccttgacggccattgccatctgaccggcccgcgatccgtcggttgccgggtcggccatcagttccgtcgcctggtaatcgcgcaggatcaggcccccctggccatcggcgctgaattcagcaagccggaccgtttgagagccgaggttgaggctgaaaatgcgatttggtgcggccatgatgctcgcttagcgggatgttgcgggcttgagcgcctcgtagtaatcccaggcgagcggcgcgaagggcgtctcgctcttattgacgacaaacccttcctcggccttcatttgcgcccaccattctccgatcgacgccttggcgctcttcatggacagcggtgcggaaacgcccggcttggtaatggtcactgacacattcttcagatcgctgttgctgaccgttttccctttcatgatctgagcaatggctttcggagaaatgaaagccaccgagtgcaaatcccggcctttttgaatgctcacatgactgacgtgcccgacaaacaaccgctcggcaaaaagaatgtagtagttgaacgtcaattcgtcggtgaactccgggacggcatcgaatgccacctccacctgcatccacttctgaggaggcaccagcttttgcgcaggagctaccgaatattgcggtgtgggaacaaaagcgacggagacagccttgatttcaaaatcaccagccgcaaacgcggaagccgaaaatgcggccagcgacagcgcaaaataggttagctttttcattctttggagggagccgatatcgtagtagttatgcaggggaagccctaggaaagcaaaggaaaactcacaatttatatggcgttgtttaaacgcggttccggaaaaattcgatggtcgtggcgatcccttcctcgaagctcaccttcggttcccagcccagcacgttgcgggcacgggtgatgtccggttggcgcaccttcggatcgtccaccggcaaaggacgatattcgatcgctgacttgctgccggtgatccggataatctcctcggcaaactgcttgatggtcatttcccgggggttgccgatgttgaccggttcatgggcgtcggaaagcgcgagccggtaaataccgtcgatgagatcgctgacgtagcagaacgaacgggtctgggagccgtctccgaaaatggtaattggctgccccgtaagcgcctggccgataaacgctggcaccacccggccatcgcgcagacgcatccgcggcccataggtattgaagatgcgcacgatctttgaatcgacatgatggtagcggtggtaagccatcgtcatcgcttccgcgaaacgcttcgcctcgtcgtaaacgccgcggggcccgatcggattcacgttgccccaataatcttcggtctgtgggtggacgagcggatcgccgtagcattcgctggtggaagcgaggaggaaccgggctttcttggacttggccaggccgagcgcgttgtgggttcccagcgctcccacctttaaagtggggatcgggaattccaagtaatcgatcggactggcgggtgaggcaaagtgaaagacgaaatcgaccggctcatcgacaaagatgtagtgggtcacgtcctgcttgataaagcggtagttctcgttgccggccaggtgctcgatgttgctcgggctgccggtgatgaagttgtcgatgccgatgacgcggtggccttcggaaaggagccggtcggtgagatgggaggcaaggaagccggcgccaccggtgacgacggaagtgagtttgcgggtggatgaggaggtgttcggcatagggtttgtgcggatggaaggggttaatttatcggttaagctgaaaattggaagcgtttcgtattgagggcatcaagttcaaaccggcgcagcggcactcttgggcgccgcaatcctcaccacgatctcggtgagcacggtgcgcgcctccaaactgctggtcaccagcgaaatgttcgcctccaggcacgcctcaagcgccgcccgcagttccggcagctcgtaccggtgcgctcccatcgcggcaattccgagggcaaaggtattgatgttcccgtcctttttacgcggcagatgatcggtcgcattggccgggagccggttgagcgctccggtaaaatggaagggggcggcgggacggctgagccggtagcgctgcatcaaatccttggcaagcagcaggttgcgaaccgtcgggatgatggccaccagcagaatgccgatcggcgtttcgccttggaagaggagctgttcgatgagcgccagcgccgtgttgagatcccgcgcagccagggcgttccccagttcgaacaccacgccggcccgcgacgccgggaccatcaggcgcacatcccccaccgtgatctcccggcgcgcttgcccaagataaagatcgagcttttcgagttcgttgtcgatctgtcgggaatccccgcccgtcagcgccacgaaaagctccagggcctcgccccggaggcgcaggttgagcgattccgcccggcctcgaaccacagaggccacttcctcttcccagcccgaacggctggcgtcgagtttgtcgaacacggacacctcggccactttgccgagcgatttgtaaaaggcgcgccgtttgtcgatttccggcgcactgagcaggaatcggatcccctgcggaagacccttgcccaaggtttcgatcagcttttccagcgcctccaaaaccgcgggagatttcgaagcgaccgattcgcccatgaaattggcgttcttaagccagatcagtttatcccccccgaaaaacggaagcgtcagcagcgcttcaatcgtctgatgcacgcgcgtcacggcctgatcgacactatccgccacgccgtcgatcacctcgcagccgaggtccccggcgtcggcgggcgccagctcggtggcgcgctgccgggcgaagcgcttcacctccgattcatcggagccgacgacagcgcaggcagaggctttgggctttttggaggcaatggccatgaagcctcagagcttcccgcaaagcgccgccgcacgcaagcgggaagaaagactcaccggctgcgaattggcgcccccagtctccaacccaaatgccaaacgcactctttgggatcaaaacgcaaaaaagcggagacattgtctccgcttttttgtaaagaaacgcttgtgtatccggtgtatccgcttggcggatagatttcacggtctgcgttagctaactttgtcttgattccaacggaatgaataactcgccctccccagtcccgacaagctcaaaaagcgccaatcttcaccttgcctttgatgttgggcacagttccatcgggtgggctgtgctccactcctccccggaattgcttgggtgcggggtcgttacatttcccgcagacgattgtctggcttctcaacgaagggcgtttcgacggcagcggcggcatatccgcgccacccgccagaggatatctcgaatcgaacgcctgctggagcacctcggcgtaatgtcgagggatgaactgaagaaaaaacatgcggcaggtggggggcactctgcgccctggctcttggccgctcgcgttctccgtggcggaaagttgctcacatggaccgaattatgggacgtgctccggtggtatgcccataatcggggctacgatggcaacaaggcttggagtgctcaggaaaccgaggcggaaaaagaggacaccgagaaagtccaaaacgcccaagagctttatggcaaataccacaccagcacgatggcggagacgttctgtgccgtaagtggcctcgacccgctcgggaagaagatctcctgcaatctgccgggggacaaacggcccaaggcgcttaatgcggcgttccctcgcgaggacgtggaaagggaagttcgtaatattttggaacgccatcttgggattttgccggagatggatcaaaatcttcttcgctgtctgctggaggattggaccgcattagattgtcctcaagttcaattgcctcggcgatacggtcagattctgacagctggaaaacgcactcctggtggccttcttttcggtcaactgatcccacgtttcgaaaaccggatcattgcaacctgcccaatcacctacgaacgcgtttaccaggagatcatggaggcgtccggggacaacaccaaagccaagcacgaagcgaaaaagctggcgaaggtttccaacaaggattgcccggaattctaccgattccgctgggcgatgcaggtcgcaaacatccaggtggcgtccggaattgaccgctcaacccgttctctgacggcggaggagcgttgccgtctcgatgaaaagatgaaggaaaagggcgcattcactcccggagatttcaagaaagccgttcgcgaaataaccggcgaagcccgcgacaatgtcgagcaaatgctcactcatcccgacgcggacaaggccctcgttctcgatccggccctcaaggcgatcgaaaacaacaaaatatggaaggcggtattccctagtttgccagaaccacttcgaaatcgggcactcgggaaactgcgccgtggaaaacgcatcaatcttggcgcgcttctcgcgcactccaaaagcccgctgcctcaagtcgaagctctcatttcaggtttggttacttccgccaacaccaaaaccaaagcgggtcagcccgctgccactcgtgaaacctttctctcggaatccattcgcgctgaacttccttccgggcgcgccccgtattctcgcgcggtcatgcgtgaaacgaccggttatattttctccacggatcgccatcccaccgaagagtgcggacccctttaccgcaacgaagccattcggaccgctcaactccagcaggccatcgacgagcagaccaacaaccacctcgtgcggcaccggctcttgattctcgaacgcctgcatcgagacatcatcaaggaatatgcggcaggagacgcctcccggatcgaacgggtcacaatcgaggtgaaccgcgacctgagagagttttccggcctgaccgcaaaacaggtcgctcaggatctcggccaacgcttggcgaatttcaagagtgtgacaactcgcctcgaaaaagctttcgagggcaagaacatccgcctcacccccggcctgatccgaaaggctcgcatcgcggaagacctcggctggaaatgtccttacacagggaaatcttacgatgaattcgacctgcttcaccgcgcagtggacaaggaccacatcattccaaggagtgaacgcgccagcgacagcctcgactcgctggtcatcaccttcgcagaggtgaataaaatgaaaggcaaacgcaccgcgttgcgctttatcgaagaatgccaggggcagaccgtggaaggaaaaccggagctttcacttaaaagggtttcgaattacctcaaagatgtcggtgccctggaaacattcaaaggtcacgatgatgacaaacgccggaagaagcgccgcaaggagatgctggaattgcgagactacgtcgaaaaggaattcactcctggcgatttaacgaaaacctcccagcttgtgcggctcggggcgcagttgctggagcgggcctatgtctcgcaaaccaagaagccggtcatcgcctcgctgcccggaagcgttaccggaaccgttcgcaagtcatggaaactcctgggatgcctttccgcggcgaacccgcaggtcattgattcgcaaacgaacgaagtccataccaagacggacattcggggaatcacccatctgcaccacgcgctcgatgcgtgcgtgctggctttcatttcgaaattttttcgcaacgatggcgggatttgggagttgatgatcaaacgccggcttaacgcaagtgagcagaatgttttgaaagaacggctcggctcctatgtggagttcacccaggaggggcagccaaaactcatcgatctcccgttgccgcttaaaaaccaaatccgccagcgactcgcggagcgccgggtggtgcagcacattccagcggagcggaccggcttgcgcgtcgagcaaaacgcgtggcgtgtgttgtctgttcaaaatggaaaggccactctgaggcaaatcaggcgccagccagacggcaagcggatcaccgaggaaaaagaggagaagatcgggaaacttctcggactcgggtccggcggtggcatgggcaaattgtatcagaacaaagccgccctggttattccggacaatttcggcctcgccctcgaccccgaaccgcagattctcccgtttcataaagtgccggtccgcctccgcgagttgcgggagaaaaacggaagccgacccgttcgcgtactgcgcaatggcatgctgatccatgtgccgagaggaaattacacgggcgtctggaaggttttctcggtcaaggcttccctcacggtggacataggcgctcccgacaaagtaacaatggaaagcaagggggtaggacaaaaacgggaggttcgcgtgaaaacccttatccgagatggccttcggatacttcatatttcttataccggtatctcaagcggccgcaccaccgacaatgaaggttagccttgggattgcaggctccaaatcgatgattgcttggattaaaggccgtgctaatctatggacgatgaaactccggctcgatcttctgaagcggctgacagcggacgatattctggaagaagcggtggcaacgaatcaccgcttcaaacccgagccgcttttgtcgaaaactggagttgggagtctgttatcggcatcaacaaaggaacgtgcgaacgaggcggagcgcagcatggccttagctaggaaactgcactcgcgtgtggcacggagtgggaaaagccccgcgtaacgacaagcacgctcctggaattctacgatttcctgaaagagtgccaccgcgaagctccattccttttctttaacggcaacacgttcgccgccattggacgtcaactgacacttgctctgttcgattatctccccatggttcgtaggcgggagcttgggtcagctgtggctcactacatcgctggtgtgcttgatcgggaaacaatgggttccgctgtggaatctctttgcgtcagcgcggatttccaaccgggcgaccgggtgaaaacattacgaggtacaatgcgaggtgttgttgtcgccgtgctcgataatggcaggatttcatggcaacccgacggttccgccatggacttgaacgctttaccggaatcccttgcacccgacgactagcgtttgcgcgtttccgatgctgccgtgtctttccacatcgtcagcatcgattcgccccagtgctcgctttccgttcgagacgggcaactcgtctgcaaagcggctgacggggaacggaaacttcctttggaagacgtggcctccatcatcgtcaccagtttttcagccacttttcatggacagttgttgctcgaagccgcgaaaaatggggtcgcattgattctgtgcgaggctttcaagcccgtatccatcgttctacctgcgaaccgatccaccgatacgcttcttagccgcgcgttgctgacactcccggaaaaaactcgcgaaaatctctggcataaaactgttgatgcaaagtgccagaaccaatgggcgctcgcgcgagcgattgcaccggatgacaatcgcttggaagcgcttcgttcagcggcgttcggaaaaaaaccgcacaaagaagccatctgcgccaagcttttctggcagataaccgggcgcaccttgggggacgaggaattcatcagggaacgaagcgctggtgggctgaacaatttgctcaattatgggtacgccgtgttgctgtccaccactctgcacaagctattcggtgtcgggctggaccccacctttgggatcgctcacgcaactcgggagcgttcgacgcctttggcttatgacatcatggaaccctttcgcccttgtgtggattggcgggtgttccagtgggctcgccaacaacccaaaccttgggaagtcacaaaggatttccgcaagtgggtgattggattttccacagaccggatcgagtggtacgattccactttggaaacccaatgcgtcattgagggcgtggttcgtggtttccgccatgcggtgatgcaaaaacagccccgatattacaaaccgtggacaccgaaaaattcaaaatgggctggctcgtagtcgccttcgatttgccggtgggcaccaaagagcaacgaaaacaggccgctgattttcgggggtttcttctcgacgacgggtttcagatgatccaattcagcgtttacgcgagagcttgcgtttcgtttgcgcgacaggaaacccatatcgaacgcgtaaagaaaaatctcccgcccgaaggcagggttcgggccattttcgtcacaagggcgcaatgggaccggtcttttgtgattaacggaacacccgcgaccgaactttctccggaggcgatgccggaacaaattcagctttggtagggagttgctctttagttgatctgaagagcaactccctatccatcagccacttgggcccaccgattctgccccccccggatttggaatcaagg

SEQ ID NO: 3577 - DNA, 14828 bp, synthetic construct
  source 1..14828: mol_type = other DNA
  misc_feature 1..14828: note = Synthetic
atgacgagtgtggtgattcaaaaatacattcagcaccatcgtgtgttagagcaagggcctgcgcagcttgctttgaagctgcgctgaagatgccccgcggcttgccgcggggtatttcacgccttgggaaaagttacgacgttgcggtgaagtcggttttgtcgttgatgcgcatgatcgtttcggcaatcaggcgcgcggctttggcggcatcgtcgagggaaatcatttccaccggactgtgcatgtagcggttgggaatgctgaccagcgcggtggcgacgcccgcgcgactcaattgaatttcgttggcgtcggtgccggtaccgcgcggctcggccacgatctggtgatccagctttttcttgatggccgtgtcgcatagcaacgcaaacaacacaggattgaaattcggtccacgcgccaacaccggccctttacccagccggatatcgccaagccgccgcttatcgccatccatcgtcggaaaatcggtggcgaaggtgacgtctacggcgatgccgatctgcggctccagtgcgaacgcgctcgtcgtcgcaccccgcaaaccaatttcttcctgtacggtcgccaccgcgacgacctcggcggtgggtttcattttggccagcaaacgcgcggcctccagcgccacgaacgcgccgactttgtcatccgtcgctttggaaacatagcgaccgttgggcagttcgaccacctcgacggcaatcgcgccggggtcgccaatggagaccatggtctcggcttcttttttgctcgcggcaccgatatcaatccagaggtcttcgagtttgaccactttatcgcgctcatcggccttcagcaggtgaatcggttttttgccgatgacgccgaacacgcgttctttcttcccgcgaatatggatgcgctggccttggagaatttgcgggtcccagccgccgatgggcgcgaaatagaggaagcctttgtcgtcaatatgcgtgatctgcacgccgatttcgtccacgtgcccggccagcatgatgcgcggcgcgccgcccttgttgaggcgcgcgtaggtgttgccgtgctggtcgcgccagacatccttggtgaacgttttcgcttcgtcggcccagaccttggcggcctcaccctcaaaacccgatggactgatcgtattcattaacttcttgaaaaatgcgcctgaaatcttgtccataatcctctcctgaatttctgccgccgcgcggcggtggaactatacacaaaaccattcggcattccagcgcgatacgggcccaccccgccaatcgccgccggcttgtttatccaccgatcatgtagatttcacagattcagccgctgtgaaattgacttgaacccaagccccgcctctgcgagcctaccgttgcggattgggcaaaggagttatcatgcgggtgaaaataaaaagcggaagatgcgcatcttccgctttctataagaaacgcttttgaaccggtgtatccgcctcgcggatagttttcgcggtctgcgttatctaactttgtcttgattccggaaaggatcatatgaaaacggagacaggaagcaacaagaaaaaggccaccgtggaattggctttcgatgttggccatagctccatcggctgggccgtgctggataaccagaaattggagctttgcggctgcggcagcgtgatttttcaagccgatgattgcctcgcttcgcagcggcgcggtttccgtcgccagcgccgccatattcgttcgacccgactacgcattgagcggatgaaacgacttctcgaacatctcggcgcgatgaagcgcgaagctctggaccaaccgggctgcgcgtggccgtggctgctggccgcgcgtgtcttgcgcggtggcgaacggctcacctggccggagctttgggatgtcctgcgctggtatgcgcacaatcgcggctatgatggaaatcgtgcctggagcgcagaagacgcggcggcgaaagaagattcggaaaaagaggaaaacgcaaaggcgctctatgcaaagcatggcacgcattcgatggccgaaacgttttgcgcggtgagcggtcttgatccgctgggagacaagaaatcatgtaatttatcgggtgaccaacgtccgaaggcgctgaacgcggcattcccgcgcgaagatgttgaacgcgaagtccgcagcattctgcaaaagcacactggcaaactatccaagattgacgagaagctcatcgcggccctgatggaagatgcgcgggctattccgtatgacaaactacggttgccgctgcgctatcgcggcggcttgctgttcggccagctcgtaccgcgttttgagaaccgcatcatcgcgacttgccccatcatgtttgagcgcggctatcaacgcgtgttgaaggaaacgggcgacagtcacaaggccacggttgaggcagagaaattttccaaggtgccgtcaaaggaatgcatcgaattctattcgtatcggtgggtgatgcagcttgcaaacattcaagtcgtgagcgagggcgttctacagccgctcatcaaaaacgcagcctggcgcaaggcgatgaatgaccggatgaccaaacgcggattcttcacgccgggtgaactcaaggatttcgtgagggaactcacgggcaacgcgcatgataatctcgaccaactgttgttgcatcctgacgcaggcgacgccctgatttttgatcccgcccgcaagcttgtggccacgcacgccgcgctgaatgccatctggcccctgctacaggagaacccccgacggcatacttgaataaatggcggcatgggcagcaacttacgctcaaaagcattctggacgggatcgatgaggccaaccgagcgaaggccatagccgctctcgaaaaatttatttcacctgaaaaaacatccaagaaaaagcgaaaagaaccgcttacccttgaagggctactcgccaaaatattatcggccaagttgttgtcgggccgcgcgccctatcaccgcgaaatcatgcgcgaagcggtggccgatgtcatggaacacggaattcatccgacggaggaacgcggctgcctttatcgtagcgaagcgatccgcaaggcgcaattgcagcgcgccattgatgagcaaaccaacaatcatctcgttcgccatcgtctgctgattctcgaacggctgcaccgcgacatgctcaaagaatatgccggcggtgatgcggcatgcgtcgcgcgggtcaccatcgaggtcaatcgtgatttgaaggagctgtcgggcaagaccgccaaacaagtggcgcaggatctggggcaacggctggcaaatttcaagggtgtgaccaagcggcttgaaaaagcctttgagggtaaaggcattcatatcacaccgggtcttattcgtaaggcgcgtatcgcggaagaccttggctggacttgcccttacaccggccagaaatacgatgagtttgacctgctcaatcgcaaggtggataaagaccacatcatcgcccgcagcgagcggccgagtgatagtttggattcgctcgtgatcactttttcagaaatcaacaggtggaaagggcagcggacggcgttacgttttgtggaggacgagcagagcaagccggtgcaaggcttaccacagttgacgatcaagacgcttgcccgtttcaaaaaagatgttgaagccctcgaaaccttcaagggccatgatgacgaccaacgccgcaagaaaaatcgcaaacgtttactacaactgcgcgactatgttgacaaggaattcacgccgcgcgacctgacacagacttcgcagcttgtccggctcggcgcgcagatacttcaaaaggcctacgcagggagccaaaagccgccggtcatcacctctattccgggcggcgtgactggagccgtgcgccggagttggaatttgctcggttgcctggctacggcaaacccgctggttttggatgaaaacggcgagacgaaaaccaagacagagattcgcaacatcacgcacctccatcatgcgctggacgcttgtgtactggcattcacctcacaattcttgccgcgcgatggcggtgtttgggaattgctcatcaaacggcggctgaacgaggcggagcaacgcttgatgcggcagcggctgggcaacatggtacaaatcaacggcaccggcgaattccgcttggttgatctgccagagggtttcaaaaagcaaatccgcgagcgcctcgcggagcggcgcgtaatgcagcacatcccgaaagaaatgacggggctgcgcgcgaaacaaaacgcctggcgcgtcgtgaaagtggagaatggcgaagttcacttgcgccaacgttttcgtcagcctgacggctcgcgacctttgaacgtggcgacagaaaaaatcggcaaagtgattggcttgcagcccggcgaacttcaaaagcgcaaggccgcactcgtgattcaggataactacgggctggcgcttgaccccgaaccgaccatcattccattccataaagtctggccgcgcattcaagaattgcgccagaaaaatggcggcaagctgccgcgtatacttcgcaatggcgatttgatcgcagtgccaaagggtaattttattggacgatggaaaatattttctgtcaaaaataacgcaagcggcattgcaatagatatcggacgcccggatgtcactcggcttctaaacagaaccgagggccacaaaatcaacgtccgtttggctacactgctcaaagatggaatgataattctagcgacaccctacacaggagtcgcgtcatgtcctaccacatcgtcaacatagattcgccgcagtgttcgttgagttgtcccgatggacaactggtctgcaaaacggttgcggcagaaaagcggttgccgctcgaagacgtggccgccatcatcatcacgtccttttcggcgtcaatccatagcagcttgttggtgcaggcggccaaacagggcgtagcgctcgttctctgtgagaccttcaagccggtcagcctcgtactgccggccaatcgttccaccgacacgctgctgacgcgcgcgcaaattcgtctggctccggcgatccttgcgcagctctggcaaaagaccgtggacgccaagtgccagaatcagttcgcactcgccaaccagatcgcacccgacgatcccgtcctgaagcgcctgcaaggcatcgcgtttggccgtcagtcccacaaggaagccacctgcgccaagctgttctggatgattctggcgcgcaccatcccggccaatgattttatgcgcggccgttttcagggcggattgaataatttgttgaactatggttacgctgtgctgctttccactgtcctacaaaaacttttcggcgtggggttggacccaaccttcggcatctcgcacgtcacgcgggaacgtagcgccccgctggcctatgacctgatggaaccttttcgcccatgcgtggactggcgcgtgtttcaatgggtgcggcaacatcccaacagcaaggattggctggtgagcaaagagttccgcaagtgggtcacggctttcccgctggaaaagattacttacggcggctatcgcttggagacgcgcaattgcatcgagggcgtcgcgcgctcctttcggcgtgccgcactgacagaccggacagcgctctataaaccatggacatcgagaagttcaaaatgggctggctgatcgtcgcctttgatctgccggtgctgaccaaaccacagcggcgggtcgccaccaaattcagaaaatttctgctggacgatggctatgacatgctccagttcagcgtctatgtgcgcgcctgcgtttcctttgcccggcaggaaacgcatatcaagcgcgtgaaggaaaacctgccgcccgaaggcagcatccgcgctttcttcgtgacccgcgcgcaatggcaacgggcctttgtgctctacggcagccccgccacccaacagccagccgagaagatgccggaacagttgcagttttggtaatccgtccgtttagaacggattaccaactgcaattatgcctgccccgcatttggaatcaaggcaaagctttccgctggttgcgccgccggacaagccgattatgcctgccccgcatttggaatcaaggcaaagctatggaactcacgacgaaaatgcgcgacaaattatgcctgccccgcatttggaatcaaggcaaagcgctcgccgtgtttttttacgcgatcccaagattatgcctgccccgcatttggaatcaaggcaaagctgggagcatcacagtgctgcttgaaccgtaattatgcctgccccgcatttggaatcaaggcaaagccgctaattccctagcgatgtcgtgggtatttttccaaagcttggaaccacgcgaggatgcggtcttcaagctttggaagacatgccgcgtcgtttcctttttaggaattctgtggcatcagcgcaatctgtggatgaacttcttggagagcggatcacgggatgcgaatgtgggcggcgttgaactttggacgcgggaatttcattttcaggccttcgagcgcttcaacgatgatttgcgagacggcccagttgcggaaccagcggtgatccgccgggatcacaaaccacggcgcatgcgcggcgttacactttgtcagcgcctcctcataggcctgctgataggcgctccagtacttgcgttcggcaaaatcggcgggcgatatcttccagcgcttggtcggatccttgagccgatcctgcaagcgtacgcgttgctcgtcacggctggtgttgaggaagaacttgagaatgacgacgttgttctccgtcagaattctctcgaacgccttgatctggtcataacgttgcccccagacgcggcgcggaacgaggtcgtggacgcggacgacaagcacgtcctcgtagtgtgaacgattgaagataccgatctcgccgcgaccgggcacggcatgatggatgcgccagagaaaatcgtggtcgagttcctccggtgtcggctccttgaaggcttggacgtagcaactctgcggattgagacccgacatgacgtggcggatggtgccatccttgccgctcgcgtccatgccctgcaacacgatcagcagcgcatacttgcgttgcgcataaagcagatactgcaattcatccatgcgcgcgatgttctcgcgcaagccgtcgcgggcatcatccttgtctttgaagctgccggtccacgtcgcatcccagtccgccagtcgcacagcctgaccaggcttcacgcgaaaatgtttactccatttcattgtgcttcctatttcccgaaaatcattttgagggcgatcacccccatgaacacaccgaagctgcgccggagcaacaactccgggatggcggtggcgaattttgcaccgacccagccgccgcagacgaagccgagacagatcagcgccgccgccgtcagattgacgttaccctctttccaataggcccacgcggcgaggatgccaatcggcggcaccatcaatgcgagcgtagtgccctgcgccagatgctggctataaccaaaaaaataaattagtgccggaataatcacgatgccgccgccgatgcccagcaacccgctcaaaataccggccatcaatccgatggcggcaagtgtgatgttctgccacatatgcgctccttttctccggggaatattagcacatgtttacgtagcttcctattttttccaagccttggaaaatatagcgccggtttgcaaataaccggcgcaccgcgtagcttcccgcgccatgaaaacaatcaagaccgcttttttcgacgccaagccctatgaccgcgaagccttcgacgcggtgaagcggccgttcggcgtcgaactgaaatacttttcgggacatttgagcgccgacaccgttcatgtcgcggcgggcacggaggctatctgtattttcgtcaacgacgtggtgacgcgcgaagttgccgacgcgctccacgcacaaggcgtgcgactgatcgcgctgcgctgcgcaggttataacaatgtggatttgaaagcggtctatcagcggattcacgtggtgcgcgtgccggcctattcgccgtacgcggtcgcggagcacgccgcagcactgatgctcgcgctcaatcgcaagacgcacaaagcctatttccgcacacgcgacggcaatttttcgatcaacggcttgctggggttcgacctcaacggcaaaaccgccggcgtggtcggtacgggtaaaatcgggcgcgtgatgaccggcattctgcgcggcttcgggatgcgcgtgctagcctttgatccgttcccggacgcggcgttcgcgcaggcgggcggttgtgtttacaccgatttgccgacactctaccgggaggccgatgtcatcaccttgcactgcccgttgacgccggataatcggcggatgatcaacgccgaaagcatcgcacaaatgaagaaaggcgtgacgatcatcaacacggggcgtggcaaactgattgatacgcgcgcactgatccacggcctcaaatctggaaaagtaggtgccgctggacttgatgtttacgaagaggagaccgactatttttttgaggatttttcctcgacggtgattgatgacgacgtgctggcgcgcttgctgacgttccccaacgtgctcatcacgtcgcaccaggcgtttttcacgcgcgaggccatggcgaatatcgcgcagaccacgctcggcaatattcagacctattttacgcaagatcagttgccgaacgagatttgctatcggtgcagtgacgatgcctgtcagcgtaaaatcaccggcaagtgcttctgaagcgcgtgaacaaatctcgacaagcaccgcgccgcatcgctacactgcccgcgccatggacgaacccatttcaaacagcggcgcaccatccgaagttcatgatctgctgcttaacctgaattttgtgccgcaatgggcgcggcagtcgccgcaggaaaatccctacgcccgccatgaaccgcgtgagcggtatgccggacgggaaggccgtgcgccacgtgaccagcgcgagcaacgccgtggtccgcgtccggaacgagatcgtcgcccgccgccgcgcggcgaacgtggcgcgccgcgcttcgcaccgcgcccagcgagcgaccggcgaccggccccacccccacccttgccgctcactatcgcattcatccccgagcgcgagcgattggcggcgttggttcacgacttgcacgtcgcacgccgcgcgtggtcgctggccgatattgcccatcgttttctggccaacctgaatgcctgtctcattaaaatcgaactgcggcaggagcggaatgcgcgcgttccaaaccttggaaaaaacggcccccagcttttccaatgcttggaatgtcaggcgctttttagcaaccccgccgccgccgaagcgcatgccgtgacgcggcacctcgacaaaatgttccagattgaggacctcaccaccgagccgccggcgggcagcttcgcttgtatcatgcgctgccggatgagcggcgaattgctcggcccgccgaatcatcacggctatcaggaaaagatgatggcgctctatcgcgagcgctacgcgcatctatccgtagatgattatcgcaacagcatggagacggtgcgcgatccggcgctgatcgaaaagtggaaagaggaagcgcgcaaacagacggtgtacaaacaaaaaggtgtcgaaaatccgccggcattgaaacgtaccgaggccgaggcacagttccgcgaaaaaatgttgcccggcatgatccatcgcggccatcggttcattgtcgctgcccgtggcacgcaaaactgggaagatgacatgctgcgtcgcgccattcacgacacatggcaacgtgaaagtcggttcccggcctcgttgatgtttgcgctccgcccggcgttcaagcatatgcatctgcatttgttcaaggtcggcggcggcgtcaccttcgtcacgccgattcacccacatccactgccggcggaacatgcggtaccatccattcgcggcgtactggagtttctgcacgcgcatccaggttgtacgcggcaacaattgctcgaaggtttgcagccgggcgcgacgacggaagcgccggaggtcgtggcggtgctcaatccgttgcgctggctgattgatcgcggccatgtgatcgagttcttcaatggcacactcgcggtgccgatgagcggcacacgggcggatagccccccaagcgctcaagcctgagcgcgttgccattccacttgcgcgcgaaggccttccgccaaacgcgtggtcggattgaaacccaatacgcggcgggccttctcgacattcgcggcagtgtgccgctgatcgccgggccgcgcaggctcacgctccaacggggctttgcggcccgtgatttcctccaacatggcaatcacacggttgagcgaaacgatttcgccgccaccaatattgaagacttgaccgagcgtcaccgcgcgtttttcaaaggccagaatggttgccgcaacagcgtcaccgacgtaggtgttgctgcgggtctgctcgccatcgccaaagaccgtgaaggttccgccccgcaggagattgttgatgagcttgtgatagcccatgtcgggccgctggcgtgggccatagacagagaaatagcgcaaaatcgtgatcggcagattgaagttcgcctcgtaagcacggcaaagattttcggcggcaagtttggttacgccatagggcgaaaccggctggagcggcgcgtcttcgccctgggtggcctcgcgaccatagacgctggaggtggaaatatgaatgaactgcttaattttaacgacacgcgcggcttccaataggcgctgcgtgccggagatattacaggtttcgtagagttgaaaatccgtccagcttttcatcaggcccggcatggcggcaaggtgaaaaacggtgtcgcacttagtcacaattggcacgagttctgccacgcgcagatcggtatcgtgaaaggtaaaatggggatgtgtcaacagaccggcgagattttgctcctttacagcacgcggataatacggaatgaacgcatccacacccacgacttcgtggccgcgcgccagcagcgcctcacagagatgtgagccgacaaaacccgccgcaccggtaaccaaacaacggttcataaactgccctttccggcacagcacaggctcgccgtattcaacagcacgaccacgccaaaaaccaacatcgtcaccccacagagaatattcacccaacgcaaccgctcaggggtcatatgcaagcggactaaaccaacaaaaagactgatggtgccgaaccaagccaccgatccggcaaagatgccactcaccaaggtggccatattgacgaaggtgcgttcctcgttggccggcccccacgccgcaaaaatggcggagagcacaaatatggtgatcgggttggccgcagtcagcaaaaaggtggagatgaagtgactccacaacgtgccctgctgatcaggatcgcttgcatcatgtggccgggtgcgcatcaatttgaggcccaacacgcacaacaccaaaccgccgaacaagcgcaccgaaatcggatgcccgccgagcaagcgggccgcataggtgaaaaaccaggcggcgatgcaggcatacagcagatcggccgtcgcggcgccgacgccggagacaaaaccggcccgccgccgttcggccagcacgcggtgtaccaccagaatgcccaccggccccagcggcgccgccaccagaatgccgatcaaaaatccttttgccaaaaactccaagctcatgacccacaagatataaacggacgcggacgcgctgacaagactttgcgcaccaccggcaatcaagcttgccgccatcaccttcatgccttagattcaagcgcatgttggaggggcgatgaaaatgaaatggttgggaagtttattgctcgccagtgtgttggcgagcgctgtagccggttgccggtggagccgcgacgaggatcacacgccgcccgccggcatgggcagcatcatggtgcgtaacaacaccggtgacgatattgatgtctatctcaatggcaccgccaccagcaaccgcgctgactatagttccacgacaccctatgacctgcaacccggcacctatcgcgtcgccctctccgagcacaacggctatcgcagctatgcaggctttgtggatgtgctggtgggtcggctgaccttcatggatgtgacggtggactttagcgatcgcttcgcctacgacgtggtgattttcttcaattgagatgcgcttgttccaaaccttggaaacgcagaagatcaaatttcccaaggcttggaaatccgccggcgcgcggcgctttgtttaggctgagcggcgctgccgggccttctcgaccatcatacgggcggtggtggcggccacgaaggggatttttacgccgccggtattccaggtgcagtcgtagtccaacggattggtgatgtcgcgattgaaatagtcgcgcaccatttgcgcgcgttcccggtcctgcttttccatttcgcttcgcgcgccggcttcatcggcatccatcaactccatcatctgtttcacgcgcaaggaggccggcgcgaccaaacggagatgcacaccgctacgcagatcgcgcgttaccaaattgcccgcgcggcccacgatgacaacccgaccaatcatcgcgaggatgcggatgacttcaaagatgcgcttttgaactttatgctgttcattttgtcctgtgagaatatcgaacaacgcctgctgaaaactgctttgatattcttcgtgtagcaacgattccagcggaacgttgagttccggatcctgggccaaaagcaggcacaggcggtaatcaaaaacctcccagccgcgcccccattcctccgttgtgctctgttccacctgccggatgatttcccgcgccagcgtatggccgccggcacaagactcgcgcgaaatggtgacgaacgggaaaccggtttgatcggggttcagtttcaaccgctcacgtagatattttttgactagttcaataggattcatagtgcacccaagactctctagcagatcgagggagcgggcgcaagtcgcacgtcgcaacaacacgtgcaggcacgacccgccaagcatgaactacatatttgttgtttttgaataagttttgattacatatttgtcgtcattgttttccataattttattttctcgttcaagatgaatgagttgcgcgcgggacggctacgtgtggaatatttctagctttatctgtatgggctattgccacggcggtttaatggccttaaattacccggcctatgcaacaccagacacatacggtagatcgtccgcgggaacactgcggtttattcgggctgttcgggattccgaaggcggccagcctgatttacaccggattgttttccttgcagcatcgcggtcaggagggtgctggtatcgtggccagcgatggcgagaaggtgcgttccttcaagggccagggtttactgagcgaagtgttcgcgcaccacccgcccaccgagttgcccggacatatcggcatcggtcatgtccgctattccacgaccggctcctcgcgtccgcaaaacgtgcagccgatcgtcttcgaatgtttcgacggcatctgggcgctggcgcacaacgggaacctgaccaacgcccgtaaaatgcggcgcgcctaccaggaagccggcgcgatttttcaaaccagcaccgacagcgaaaccttgatgcatctgatcgccgacccgatgtatcgcacgcgcacgcgccgtgtcgagcgttcgctcaatgaattggaaggcgcctttgcttttctcatcatgacgaaaaacagcatcatggcggcgcgggatcgctacgggttccgtccgctctccatcggccggcttggcgagggctatgtcttcgccagcgagacctgcgcgctcgaccagattggggccacctacgagcgtgacgtgctgcccggtgaactcgtgaccgtggacgaaaagggcattcggagtacaaccttctgcgaaccgatccacgggccactcggccagtgcatttttgaacacgtttatttcgcgcgacccgacagcatggtcttcgggcaaaacgtgcacgaaacgcggctcaaattaggccggcgtttggcggaggaacatccggtcgcggccgacatcgttattcccgtccccgatagcggcaacgacgcggcgctcggcttttcgcgcgccagcggcattccgatggactacggtttcattcgcaaccactacgtgggccgtaccttcatcatgccggaaatggagcaacgccacgacagcattgatctcaagctcgcggttgtgccgggtgtcgtacgggaccgccgcgtggtggttgtggatgattcgattgtacgcggctcgacgtgccgccgccggatcgccgcgctgcatcacgccggcgccaaagaagtccatatgcgcgtctcctgcccgccggtgcggcacccctgctttttcggcattgattttccgaccgccgccgaattgatcgccacgcagcgcaacatcgaagaaatccggcaattcattgaagccaccagcctcggctatctcagcctggagggtatgctcgcggcctttgagcaccccggcgatttttgtgccggctgctatagcgggaaatatccggtggaactgaccgagaccatgaacaaaaaagacctggagaagacctgaaatca

SEQ ID NO: 3578 - DNA, 14723 bp, synthetic construct
  misc_feature 1..14723: note = Synthetic
  variation 6612..6621: note = note, n is a, c, g, or t
  source 1..14723: mol_type = other DNA
cttgggagggcttgaccaaaaaaccgttagcgcccaaacggtaggcggcggcgatatccctgctttcggcggaggcggtcaagagcaccacgaccaacaccctgccggactcctggcggacccatttgaggacgtccagccccatcacgtgcggcaattttaaatccgtcaacatcaggcacggaaacggaaatttctcgcggtcggcgaatttgccggcgccttgcaaatagtcaatcgcctgctgtccatcagtggcaacctgaagggggttcggcacccccgctttcttcatggcgtgtcgcagcaagaacacatcgttaggatcgtcatcgaccagaagaactgttttcatgctcttatcccttcttgagttggatccagaaattgctgcctttgcccagttccgagtcgaagccgacctgtgcgcccatgcgttgaatcgccttgcgcacgatcgttaggccaatgccggtcccctcgaattccgtactgggatgaatccgctcgaacaagcggaagatgcgctcgtgattttcgggggcgataccgatgccgttgtccttgaaccatattcgaaacgaagcgtcctcgaccgcttccgccgaaacctccatgcggggcgtggttccgggcggaacaaattttgtgccgttggtcagcaggttggagatacattgtgctaaaagggcggcgttgccggagacttccggcaacgtgcctttgatttgaatctccggtttgatgggctgcccgttcgggaaggtctcaataatgtcgcgcaccaggcggtccagatccacgcgctccgttggcaattgcgcatgaataactctggtgtagctcaagacatcctggatcagccgatcgagccgaagggcggagcgcataatctggagaagataattgactccttgttcatcgagcttgctgccgtattcatccaccagaaattgggcgaagctttgcatggcccgcagcggcgcgcgcatgtcatgcgatacgctataagagaatccttccagttcaccgatcgtttcgcgaagtgcgctggtccgttcctcgaccactttctccagttccagagcatgctggccgagtttattcttggcggccagcaatgcctcctcggcccgcttgcgctcggtaatgtcgcggatgttgcactggatgacttttcgtccgtcttcgtcgtaaagattgctgacgaactcgacctcgtggtgctggcccattttgttttgcagaggcaggttctcgtagcggatgaaatgttttttttgcaactgccgaaacgccgactggttggctttttcgtccttgagcagtccgatttcccaaagttccttgcccagcaattcctcatgccggtaacccaatagttccgacatgaacggattggcctccgtgatttttcgcgtgctgggatcgagaatcaaaatgccgtcccgggccgcttcaaagaggcggcggtaacgaatctccgaagtccgcatggcagcctgtgatttccgttgttcagtaacgtcttcaatgaccaggaggatcctctgaaggtgatccacctgccggccgctcaagagcatcgtgcgccggccaatgccttcaaactcgtgcgtcacttcgaagtctttgaaataacttttccgaggcagcaccttctccagcaaggtgcgtaacttggggatgttccactggccgttgcccaattcatacacccgccgtttgagcgtctggcgggaggaaattttgaatgctttgcaaaaggaggcattggccgtctgcacgcgcaacctttcgtcaagaaccaacagtggtgggacggcttcgatcacagcctcggcatagtcccgcgtggcgagcaattgaccctggagctgggacgcttcatcgagtttcacccgtccgtttcgacgcgcgctcttcaaattgggcctcaaaagtgcctttttcatctcggtgttcttctctcgacaagaataacaccgaatgcgtgcgctggtattatgggggtgaccctgggggatttccccctccgagtcgcttcccgcgctccaccgctcaacgtgatttcgtcaccgtgttgcattcggttctcatgattatttgcttggtaaaggagaccgctggccctgcccatgaaacgaaaactgcctctcgtaccttgcccctggtcaatcggtcagccttcctggcgccggctccgcggctgtcttctgctcttcgtctcctcaacgcttcccggcaaaccaatagaagcttttcggccatggaattccctggggtcgtgaaaccgctgggtcttcgggcctcttcaaattttttcgccacgccgtttggttctttctgacgagggttgattttcgatcacatcactcaggcgtgtttttacttaccggctggtccgccagcactggcgtcgccggcggatggagtccgtgcctcgattcaatgactccggtagaaacggcgtagcgggtcaactttgcgatgttatgaaggttcaacctatccatgagcgcttgccgatgcttctccaccgtttttagggtcacggatagcagctcggctatttgtttggagcaatatccctccgcgatcaattgaaggtggtccgactgccgcctggaaagggtggcaggcttggttgtagcgctgggaccatccggcggcgctccccacgagtccttaaccaggcggttgaacaggggtgggctaaagcaggcccctccggcgcacgtctcacggacggctgctagcaactcattggccgcggattccttcatcaaatagccggcaacccctgctgcaacggcttgcttcaggtgctgctcgtcactgtaacttgaaagcatcagcacccgggctgtcggcaccgtgcgggtaatccgccgggcggcctcgaccccgttcatccgaggcatggcgacatccagcaggaccacctcgggccggagccgtttcgccgcctccaaagcctgttggccattttccgcttcgccgattacctgcatatcttccgcggactctagcagcgcccgaagtcctgctcgaacaacggcgtgatcgtcaaccagcaacactttaatcgtcttcataaatcgttccgaaagatttttttagttgacccgctcgcaggcaccggttagagacgcgcgccgatgatcggcgaggatctcggggcggcggtaggcccgagactccggccttggctccgccggaggatcgggcgggggcgtgttttgcgtcagccaaaacaggctaatggccctcaccatgtcctcgagtttgctcggctcagccggtttcaccaggtacgcgttggcgcccagcccatacgccgccgcgatgtcctcctcctcccgggaggaactgagaatgaccacgaccggagccaaaccggactcctgtcgaatccatttcaggacatccagccccatcacgaggggcagtttcaaatcgagcaggattaggcccggcggcggaaatttcgcgcgctcgttgaatttgccggcgccccgcaggtagtcgatggcctcttgcccatcgcgggcgacatggacgggccccatcatgcccgccttggacactgcacgttgaaagaaaaacacatcattttcgtcgtcttcgaccaggaggattgggttgtggttgatcatcttttagcctttctgttagcgagccgctccgaacgccctgcggtaacaattctccgaagcctggaaagacacccgtggacttcggcgctcggggggggtcgagcagcgcacgttttctagggcagccccggagtttccttgcgggctacggcctaatttcacgttcgttacggtaatcaccccgtgagaatacgcctggaaggcgcgctggggtatcctggggttaaccgtggggtaactcccccatcgttttgagtgatgacacctttcaggagaactaatcccgcgattcttcgcccttgggcgcagcaccggctggactgggatcgtgcaaaagccgtagcgtcggaggatagggcttaccctggcggaatcatctccacgagctgatgctgcatcgcgtagtacatcagctcggcattgttcctcaggcccatcttctccaggatgcgggtgcggtaggtgctgatggttttgacgctcaaggccagctcgagggcgatttcgctgacgatcctccccgaggcgatcaggcgcagcacttggaattcccggtcggagagcagttcctgcggcggcttgacctcgcggctcgagagatttgtcgccagtgtttccgccagcgaggtgctgacgtagcggcccccggcgagcacctttttgacggcccctaccaattcctcgggggcgctctctttggtcatgtatccggccgcgccgagcttgagcacacgcaccgcaaactggttctccgggtggatactgagcaccaggaccggaaggctggggcgcaaccttttgatctcgcgcagcacctccagaccactccgccccggcatcgtgatgtccaggaccacaatgtcccagtgctccttctcgaccaggtcgagggcttcctgggcgctggccgcctcgccgaaggccgcccgcttaaactcgtccgccaggatctgcttcaacccacggcgcaccacgctgtgatcgtcggctaagagaattctcatgattctctcagagccttcctttggcagggcgtggtcgctttgcccgagacacgccattcatgcgcgacccaggccgccccgcgaagcaggcggtgaatgaagggacatgccgcacgactagttccaagccactttccgatgaagactcctgcggcagcgtgttgtatgtcagccagaaatccctgatggcttcgaccatttcctcaagcttgctcgcctcggacggcttggtcagaaaggcactggcgcccaaccggtaggcttccgcgatgtctgcctctgacccgcaggccgtcagcatgataaccgccaaggccatcccgggctgctggcggatccatctgaggacgtccaatcccctgacgtaggccaaattcaaatccagcaacaccaggcacggaaacggaaatttgacccggtcggcgaatttcccggcgccttgcaaatagtcaatcgcctgctgtccgtcagtcacgacctgaatgggattagcgatgcgcgctcgtctcatggcgtgttgcaggaggaaggcatcgttgggatcgttctcaacctggagaattgttttcacggttttatgccttcggcacttgaatccatacgttcggtggtaatgcggattttcattggatggctttccgttcgccttcatgggaaagaataacctgaaatgcgcgcgttggtagtatgggaataaccggggggtgtttcctcccaattgagggtttttccaccccagaggagctcaaggccgtgcgattaggactgccgcggcgcccgcccattttaatcgcccccgtccggcgggttcgcctcgaccaagccgattctgaatgggcaggagacgcggatgacaccaatcccctccccagtggctcgccagagcacgcggtgctcacccctggcggccgtgtgccctgccgcgtggctcaaggaggtgctgccacagtaggcgggtcagaatgcgccggtgtcaaatcgacgtgctgacgatttcaaaaatttgtccggcgcgcatcagctcgagcagttgctgtacctgcggcgtggggttcaggaggcgaacgactccattccagtcgcgggtgacgttacggatggcgatcaacgcgcccaagccggcgcaatccatggaagttgtccgggagagatcgatctcgatgaccgtgtgtccgttcagggcctcgcgaacctgcttccgaaaccggctgctgtgggcggcagtcaactcggccactcctgcaatccttaagacctcttcgccctcttcgggaccgtccaccaggtggtcggaggcaggcaacccttcggcgctcagttcggggatggagatgtcctcatcgaacaaactgatcggatgggacgggttggcctggccttgagtcggctcgctgaccggctctggcgtttgcaggatttggttattgttcacggtgcaagcatgagctagggaacttgcgtgcgctaggaggggactaaccgtaggctgtttccccccattcttcatcgaggagcggggagggccactggtgccccgtccccgcacccggatgcccgtgccggactcgtcaaaatattaaaatgtcaaagagcaagagcggggccgcccatgatcatgggtggctcgcgtcgaaagctgacgttaatgctgtgtctggctccctccttcacacttttccgtcttctcctggtgttcgtggtccacttgtggcgtgctaggtgacacggtttgcgctgacgccatgcgttggcgctcgagttcgaggcgggcggcggagtggtctccgcgccgcagggctaccaggtcgctgcaaaaggctcggagcgtggcgaagtcgatgctggcgggattgccgttgcctaggttccgggcggcgaccacgtagcgggcggttacccagacggctagcttgtccgccaacgagccaccggcggccaacagctcgccnnnnnnnnnngcagggagttcagccagtccgccaagggcttgccaggctcgccattttggagccggccattgagttgctcccggagttcgtgggggaggcgggcgatctttcctttgcgcgtctcggtcatggctgggctttcaggtcggatgtggtcggatgtactcggatgtggtcggatcacatttcggtgcgcatcttcagtcttgggccgctggcccaacagcctccgctttggggcttgggcggtgtgctgacggcgttctgaagtttcacatactcggtctcaagcgccgtatgttctgcggtgtagcgctccattactttctggagctgttcccgaagtacgtctgtggcgggcgggctggtatgtttgaggatggggtcttcgagttgttggatttcgatggtcatattcataattggtcttccggcgtgttaggtgggatcgaatgcttagccagtcgtcagggggctccctcaatgttgtcgaacgtcccccgcgcttctttagcaaaggcttgaaacgcctccgcggctttggggttgttttttacctggtcaagcatcatttccaggcccagagtgagcttctttttatacctcaggagggagtccttctcctccaacagcagccgctggcgttcgatgctcagccactcggcattctggtcgccccggcgcaacatagagatgtcgctgcagaactcgcgtaagcgctgccaaaaggtttctcgattggcgctgctgtcccggaggcgagggccctgggccgcgtattggacggccacccaggctgccagccgctccgtgagcggttggcttccgggagggctcacggcggccacctcactatccatcgcgcggcaggcggcgacggtctcctgatggcccagccactccggagagccgtgctcgcgccactccgcgaggtcggcctcggtcaagggcgcgggtgcgctcccgttcgcgaggaaggtttgaaactccggcgtggaattcaagtactccaacagtgcggcgccggtctgcctgcagctcaggcaagagctgataatctcccgaatccaccacggcaggcgtgctatcctgccgtttggcggcgccttgctctcggatggcggctcgggtttgttgttcgtctccataggattctcagcgaaagcgaccacgaataaagcgattgtagtacgcccccatcgaggcggcctccatgaggcccgcaaacacggcgtaaggcacgccgtaatggacgtagatgtcgctggtatggaactggacaaacaagtggtggccgtcgtagtccacggcgcggatcgaagacgactcaacaggaatcatgacgttcctttctctgcattggcaaatttcttttgcacacgtaaagcgaaccacctgctcggcctcttgacaaaagcaaaagttcctcaaactggggaatatactggcctcccatgggaaggcattccatgggagggtgtgttattggaaacatcaccgaactgagattgccggtggcggtttgcctgctatctgctcgagcttgttgaagcagtatttttcaagcgcggcacgtttcgccgagtcggtgccgtagtcagaagctttctcgagctcttcccagagcgccggattgcggcacggattcgtcttcatcttgtcgaattcgcgatcaatccgttttttaagctcggccttccaccacgccttcgcattccctttcaggtcgggcaggttgaaccatttggaatccgtacgcccgctttctctggcctccacccgacaggccaccaggagatcgacgatctcagcaaccaactgatgacagagtgccccaattcgggtgcggttgtcatggaggttgctggcgtggtgcttttccgcgaggtggatggcacggatgatggcttcggcatcacaagtgaacgccggattccgtgcacgcaaagagggcatcgtcagcgattgttcggcgtagtcttgaaagtgttgcgggtaggcaatcgccaggcgcgagaatgcgctcgccagcgcttttccgtcacggaaaaccgcctggcaagcccacggcatgccatcctccgcgtgtcgtatgatgtcgtcccggagccgggatgcgaccgctgaaagcagcgacacggtttcgtataatgtcgcatcctctctttcggaaaggttctgcaggcgcttctcgtgaattatggtttccaggatcaccagtccacggttgacggtttcaaaacctttcaccatgagggcttgtggatcgcggagtatcctcctctcgtcagactcgaattctttgagaaaatgccgctccgatttggcgagcctcctctttcgcctcaactgggcggcccgtaggcaacgtaatccgacgaagtcgccccggcttgaaagtttcaaccatttcgcatcttcagcgtttcttggtttccagagatccctctcgtcgggtgctttagctttcctgttcatggttcattctcgtcattctcgtcccagagagcagtattccattgggggcgtggtcatgtggcagcagcagttggcgtacggcattagcggcctttggcgtaaattcggcccccaggaaacgccgcgggcctttcggaagcctggttattcggggcagcggattcgctagattgcttcacaacacggtttgcgcaactattcattttcgacctgaaaaatcggaaggatttcggatctactcaagttgtagttattaaatcttagctacgagttgttcacaaccaatcaaagcccgattcaggcgcggcgcgggcgttccgggccggtgggatggggccatccgccgtgcgggggggcggaccgtcgcggcctcgtgtctcccggactccgggagtcgtgttctgggtggttttgggttacccataatagcgatgtgaattgtaaggccgggcaaaaggcaatgattgcaattggtccttcgcgctcgttctgcctactttgggtgccccacatccctcgacccctctcaaggggtgctccgggcaaggcgcaaggctccagacaagagtaggaaaagccgacgaagttaccctcgccggctttgctcaagaaacgcttttgaaccggtgtatccgctttgcggatagggagcgcggtttgcgttagctaactttgtcttgattccaattaagacggccaacatgatagcaaaccggtcgctggacgcaaatgaaaaatctccaagccaagggaagcgcagggggaaagaaagccaacagccgatttgtaccagccgttccgcagcccccgaggccaaagagcgtagcgacctatgtaaactttggacttgcatcgactttgccttggctcccgctaggcaggagcaacatcctgcctggcctctgtcattatgaatgcaggcattgagatcgcgttagacgttggccacagcagtataggttgggccgtgctgcaaacagacccttccgtcatcctgcacggttgcggcgtggtgacgttccgtgccgatgattgcctcgcgagctcgcgccgggcttatcggcgccagcgccgccacattcgcagcacgcgccagcgcatcgctcgcatgaaggtcgtgctggcgcacctccgcgttctgacgaaagaggagcttgatcgcccgggctgcgcctggccgtggcaactggctgcgcgagttttgagaggcgggaagctactcgcgtggcccgaactctgggacgttgttcgctggtacgcgcacaaccgaggatacgacggaaaccgccggtggagcgccgcagaagcagaggcggctgctgaggacacggagaaagaagaaaacgccaaaacgttgatgcagaaatgtggcgttgccacgatggctgagacgttttgtgcgatctgtgggatcgaccctctggggaaaaagagatcagtcagtcttcctggcaacaaacggcccaagggccagaacgccgcgtttccccgcgccaccgtagagggcgaggtgcggcgcctgctgcgggcgcactttggcaagctgcaaaaactggatgctacgctggagcgcgcccttctcggccgagacacccgggacaaggacgcgtggcaggcagtgccatgcccggagttaaagcttccggcgcgttaccaaggcgggctgttgtttggacagcttgtccccaggtttgataaccgcattatttccgagtgtccagtcagcggggaaaaagttccttcgcggaattgtgcggagttctacaattttcgatgggcgatgcagcttgccaacatccgcgtagtccggctccgggagagggagctgtcgccgctgacggtgcaggagcgacaggagcttgacgcgctaatgcggcaccgagggagcatgggagtcgaggaattcaagaagcaggttcgccagatcgcgggtgcaattcgggataatctcgataccatgcttatggacccggatgccaaagaagcgctgctgctcgatccggtgcaagagttgattcaatccaacgagttgaaagcattttggccggtgctccctgagcgtctgcaaaaacgcgcgcgcggccaatggcggcggggcaagcggatttccatcgccaagctgaggcaacagcttgtggagctaggcggggagactggcacgttcgacgtcgaagtggacaggcaactcaacgccaccaacaccaggggccgcaagcgggacaagcagataacgcgcgaggacttgctaaacagacccttcttcgtaaagcgacttgaccaacgcgctgccttcgggcgggacctgctgaagcaggcgttcgaggaagtaatggcaggcaaacacccaaaggaaccgggcggttgcctgttcatcacccaggagatgcgcgacgcccaattgacacgcaaaatcgcggaacagaccaacaatcacctagtccgccatcggctgctaattctggagcggctgctagttgacatcattaaggcatacgccggcggagacaaggcgcgcatcgcaaagataaccatcgaggtgaatcgggacttgcgtgcaatgtcgggcatgaccgctaaacagaaagcgcaggatcttgggctccgtatcgccaaccatcaccacgttgtcaagaagttggaggaggacgattctctgatgaaggttttagaaaagcgacgcgcgaagataacagcggggttgattcgcaaagcccgtgtggcggatgaccttgattggacttgcccttatacgggccaacgttttgaaccggtggatttaataaccaaaagggtggacaaggaccacatcgttccgcgctcggatcgcacctccgatgccctcgattctttggtgatcacgttttcggccattaacaaatggaagggaaaccgaacggcctggcaattcatcgagcaagaacagggcaaaccggtccccgacctgccgaacctgtcgatcatgagcctgtctcgctacaaaggcttcgtggagggtctggaaagtttccgaggccatgacgacgacaagcgccgcaaaaagaggcgcaaggagttgatgctccttcccacctacgagcaaaaacagttcgttccgcgcgatctcacgcaaacctcgcaactcgttcgcctcggagccgcggccttgaggaaggcctttctcggctgcgaggatcagccgatcgttgtatcgctgccgggcgcggtcactggcgcagtgcggaagtcgtggaaggttctgggctgcttgtgtctcgctgctccggacgtgcttgaggagtgtggagaagtgaaaacgaaaaatgagatccgagacatcacccatttgcatcatgcactcgacgcttgcgtgctcggactggcgtctcacttgatccccaacaacggccgggtctgggaactcattgtgaagcggcggtggaacccgacggaggaacgcgagctcagagctctcaggattttcgacaaggacagcgagggtcggttgcagatacgagacttggacgattcgctcaaagaacaaattcgccaacggttggccgagaagcgggttgtgcagcacgtgcctgcgcgcatggacgggctgcccgttgaccaaaatatgtggcgtttgaaagggtggaccgcggaggggaaagcaatcctggaaaagcactcccgtgacgtggcgactggcagccgcaagctcgacaaggcgaagcccggagccgacaacaaggacagacttgtcggttggcaaccggaggacggctgcggaaaactcaagcggctcaaagccgtgctaatcaccaatgagaattttggagtggctttgacgaagccggaccccgtcgttgttccctttctcaaagtttggaggcacctccaggcgctgaaagcggcaaacggcggcaaaatgccactggttgtccgcgccggatcgatggttgaggttcccagaggaactcacaaaggctcttggcggattttttcgatcaagaacaactctgccggagttgcatttgccttggggctgagagacgcccttacccacgaccggtcaaagcaaaatgttttggttcgtcagcttctgaaagacggaatggaagtagtcaaagctggcttcactggaccaccgtgccctaacacctcgtgagcatcggttcgccatcacgaatcctgccttgggctcccaggggtgggggcagcgcacatcggctctgggctgcaggaattacccggcattagggccgaagactggctggcgcgcgtggtcggttcccggcggctaaatggcacggaactggctacttctggggcatcaggacggctcgatgtcgtaccatatcgtcagcatcgactcgccccaatgctctctgagttgcagggacgggcagttgatttgcaaaacggcggaaggggagaagaagctcccgctggaggatgtggcgtccatcattatcacgagtttttcggcgtccattcacagcgagctctttctccaggcggccaagcacggagtggcgcttatcatttgtgaggcgttcaagcccgtcagcctcgtcctgccggcaaaccggtccaccgacacgcttctttctcgcgctctcctcaacctcacggagaacaccagaaagcagctctggcaaaagacggtcgatgccaaatgccaaaatcagcatgccttggccagtcgcgtcgcgcccgaccatgagcgcctcgcctcgatgcggcaaaacgccttcggcaaaaagctccacaaggaagccatctgtgccaaggccttttggcaggtactcggccaagcgcttaacgacggcgaatttgtccgcgtccgcgctggcggaggcctaaatgacttgctgaactatggttacgccgttcttctttcgacggtgttacagaagctttttggtgtgggcctcgacccgacgttcggcatttcacacgcgccacgcgagcgcagtacacccctggcttatgatctcatggaaccgtttcgcccctgcgtggattggcgtgtgttccagtgggctaaacagcaccccgatggcaaagattggcaggtcacaaaggagttccgcaggtgggtaaccggctttcctcttgagcgcgtggattacctggattttacattggagatccagggttgtatcgaaggcgtggtccgcgggttccggcgcgcagtcatcgagaaacagccgcggttctaccggccatggacaccgagaaattcaaaatgggctggctgattgtagcgtttgatctcccggtcggcacacgaaagcagcgcaagcaggccactgacttccgcaattttctcgtcgatgacggcttccagatgatccagttcagcgtttacgcccgtgcctgcgtttccttcgcgcgccaggaaacccacgtggagcggctcaagaagaacctgccacctgaaggaaacgtccgtgccatcttcgtgacccgcgcccagtgggagcggtcctacgtaattcagggatcccccgcttctgagcaggaagcggaggacctgcctgaacagatacaattgtggtaacccgttgtaacgccaacggattaccgccacctattttgccccccccggatttggaatcaaggcaaagcctcgcaatctgagttattatcttgctttgtatttt

SEQ ID NO: 3579 - DNA, 13775 bp, synthetic construct
  source 1..13775: mol_type = other DNA
  misc_feature 1..13775: note = Synthetic
tttcgtggggactttggaggatcaagctaatctccctcaccctagccctctcccgctgggagagggagtaaggagcttgccaataaatttcaatcgttcggaatcgttcggaattgttttgaaaatcccgaagggcgaatggttgatttcctctcccagcgggagagggctagggtgagggagattagcttgatcctccaaagtccccacgaaaacacatcccagaaatcttggggtctttgtgccttggcggttaatcaaggcggctcaacatagattaccttaaatcaaacgctttgcgttggatgctggcgtggtgggccttgagggttttggcgatggcggggcggttgaggtctttgcggaaggggatggaggattcggattttaggttgctgatgacgtagcagtaggtgttgttggccatcatgccgaggagctcgcctttttggctgaggacgaggtcgcctttggaggggttgaagctgctgctgaagaggccgccgatgaagggtttatccatcttcacgtatcctttgtgggcggggttaaatttgaattccacttcgccgtaggattttccatcgcggctgatgacaaaggcttttgggaattgaaacggtttggcggcaatttgataaggccggatgccgcggctggtggcttcggaaatgttcattagcggcgaggctagcacgcgtggttcgcctttcagaaattgcgcgtacgggaggtagtaaggcacgggcttggctttgccggtttcgggggtgctgagggtggcttccacgcggctgacgccggttgctttggggttgatagcgaagggggtgtagctggtgtgcaacaggccgaatacaaagttgccttgctggatgagaatggtgtcggtggttttggtggtgcggccggacttgagccaaactttgacgccgcgtccgcggaattggcggaagagggtgttcgcgctgacaggggtattgtcgatgatcgcctttgcggagcgtttgatttcggcgacattgccgcccatatctttaacggccccgagcgcgacttcttcagcaacttgcgcggctttgagatcgactttggttttggttaattcggtgttcaccgattccgctttttgttccgcagtttgggcgcgggtggtggcggcggcggcttgttgtttggcggcggcggcggtggcattggcggtggccatattaacctcggcggattgggcgcgggtggtggcgtcgtcggcgcgcttacgttctgtattggcgcgtgtattggcggcggcgattcccatatcggcgcggttgcgttcgttggtggcgcgggcgttggcggcgttgagttcgcgctcggcacgggcttgggcggcggcggcacctgtcttggcggcgttgagattcacctgaagggtcttgacgtcgccctgcaactttgcggcttgcgcttcgagttttttgcgttcggcctcgagtttgttcttttcggcctcgctgaggttggcttgttgggttcggttcttgagttgttcgagggcgatgcggtttgcgttttcggcggcttttttgccggcttcttcttcctgtgctttgcgataccaaccgagtgctttttgctcggcctcatcaattttcttggcgctggcttgttggctttcggtggcggtgttggagaggtttatgtaggcacgcttttgggcgtccaattcggcggcggattgtttgaacttcatccgcaccagctcgaggtcgcgctgggggtcgcccattccggccccggtggattgggagccgccggcgccggggttgtctttggtgtttttctccagctcatcccacgcggtaaagtggatgaggttgagcagcaggaaatcgcagatgatgagcaggagtgttttattcataacgtgaggttagtgggtttgagcgacgggggtggcctcggcttccataatgagctgttggcgtgcgccacggacgtgatggattttcacgagggccacgcacaggataccaaaaatgttcgaggcgtatgcgaccgaaaggttgatgccaaactggggcgcgagcattttgatggcgagcgtgagggcagtgccggcgatgccaatgtagaggcccatatcgaagaggttatcttcgttttcgagaaggcgcagtttcaggatgggatcgcccgcgccgttgcggatttcgtccactttggatttgcaggtgaggtacacaaagatttggatcgcggcgaaggcgacgaacaggatggtgttaagaacgatgttgctggtggcgagcatagcgatgttggattctttggttggggtttggttttcatcctcactgaggacgggtaaattgatggacacagtgtattcggaggattgcgcgggctggagaaaaatcggttcgcccagcgccacgagtgtgaggaagagggcgcaggccatcgcgcggcggcgcataatgaagtcgcggacggcgttgatgccggtggcgctcatagtaaaaaagctgttccacgcgcgcataagaatgacgcagccgaggccgagcaacaggaatttaacaaagagcgcccaactaggatggcgcaggctgaaggcggcggcggaatcgaggcccaatccggcgcgatcgctcacgggcagttgctgggtgagcaccactcgcattgagccgcgcccttgtcgcatcgcgtcctgcagccagcgtgtgccgggccgaccgtggctgcggaggtagcgggtgacggcttcgggttggccgctccaaactgaggcggcgtatacggtggggaattcagtgaactccagcggaatgaagggcagcgcggtccattcttcgcgcgtgagttttccgttgccatcggcgtcccatttgatgggttgatttttggcattgcgattcaccacgcgtccgaagagatgttcgaagggggtgccgattaattcgtctgcggtgatgacatcatcgctttttcctttttcgtctaattcattaaatgtgtcaaagggcggcaccatcgtttgcagcttggcgatcttggctaggtacgtgagggtgagggtgctctcagtgtcgcgcatcaatcggcccagctgcggttcggtgagccgactggccagcagagaaaaggcgtgcaacgtttcgtgcagcgcatcggattttgtctcctgccccaagcggtggagttgcaggtttagatcctggtgaaacttgccgtcggtctgcaattgtgcggccagcgagatggcggcggcgtagtcgtgggccagactttttagggcgagcagccttttcaccagctcgccctggccggattggttttcaatctcgcgttggcgggcggggaggaagtagggatccaaggctggggcgctggccagggtggggagtttttccggcaagagcgcgggttgctccagttgactgacggcgagatcaagcagggaagcggggctcgcgtcgccaggggcgtcgccaagttcattgcggaattcctccagagtttgcgtttcctccaccgaagcctgcgctagcgcgtcggtgtgcagcgtgcggtactgcgcggggaacagccagcccaccatcaaaaacgctatcgccaacaccccgtgaatgatgaggtggtgcaacagatatggtttctccgtatcgtttgactgcaacatgggaactactccttggccgacgcgcgcatcgcgttcgtctgcggccaattttatagacgcaccgctccggtgcaatgttcaacccttgccattgaaggggaattattcaccgatgtgaataaaaaagagcggcctctgagatttaatttgacgactcgcacgcctcacattaggttccccgccctttgcgctctgggaggtgcgcaatttttttaaggtaaagtggtttcaccgcgggaataagggtttccagtaccgccgggcataccagtaaccccgaaagacacaggtgctcattgggagcatgctttctgttaggctcggctttacccgatatttttctaatttttcttttcatacgggcaaaacacgccaaactggcgtccaattctgttatgaaaaagcccctgctactccccgccttggctcttgcgctggcattcaccgccgccgcgcaagagcgtccacgcccgcccgtgcaaatcctccccggcctcgccccgccccccgttcccgggcagatggatccggaagaaatttttcctgatgaaatctttcccggcgaccccggtgaaatatttatgcccgatatgcccgggcgataccaaatcatctccgcccaaatccagcaaaacggcaaagccgtgcccatcgtgctgaagctcgacactcaaaccggccaagtctggcaaatgaaatccatcaccaccaccgtgacccgcaatggcaaaccgcaacccttcacccgcctcacctttgagcccgtggacgaaggcgaccacccacaaccgctgccccaccccgagcccgagcgccgctccaccgacggctgaaccagtcccacccccaacaaccaaaagcaatttatgaaaactattctatccaccctcctctttgcgttcgcgctgcaactacccgccgccgagtccgccaaagtcaccggcaccctcgtcacccccaaagctgtgaaagcttacgatggattgtcattggaaatccggctttacgaatacgatccctttctggccgatgcctccgccgatttggtgggcaaatttttcatcaaaaactacgcccacaaagccggcaccgaaaccaaaacccaattcatcgtgggcgacgccgccaccatcaagccccggcgttcctattacctcacctgcttcgtcctcgacgccaaaggcaaacgcaagctcatgggagaaaaagacggcaagcgcggcctctgcaacgtcctcaccggaggcaacccgaaaaaggtcaccctcattcttcgcgacctgcgaaagtagtcgcaaaacaaagacacggatttcacggattcacacggataaaaaccatctgtggaatccgtgtcaaaaaaagtcgtagcgaggcttgcccgcattaatgcgcttgtttcaaatctttcgcgaacaactgcgttggatccttgaatgatttgaactccagaaaatttccgctggggtcggggaaaaacatcgtggcttgctcgcccacttcgccctcgaaacgtatgtacggctcgatgtgaaaatccaccccgcccgcccgcagtcgatccgccagcgcgtgccattcggcccacggcaacaccacgccgaaatgtttcaccggcacggttttttcatccacgccactgaaggtttttagccccgtttcatccggtgccacgtgcgcgacgatttggtgcccgtacaaatcaaaatcaatccagcattcactttcgcgacccgtcgcgcagccgagcacattcgtgtaaaattcccgcgtggactcaaggtcattcacgggaaaggcaagatgaaatggcgcgtccacgcgcggagagtatcgcgagcccaacgccttggcgaggcttagggcgcgaccggaatgcgcggccgttccacgcgccaaaatgtgggcgcgctcggcagcggtttgccttccgcatcccaccaatgctcatccgaaagctcgccatcggcgtaaatggcctcctgccgtttcgagccatccggatgcaaaaaaatcagcgtgccgttgccgttgagcaccttgccattttctgttccggccaaatcccaagtggtggcgcgcgccagttttgcgtcctgccaaaatgcctcgtgttcggtggagccgtcactgcgccaccaagtggctaagccatcgggttcgccgtcgacgtaatcggactcaaaatgtttctgcccgttgggatgccaccaagtgactttgccaaccggtttgccgcccgcataattttccacgcgcgcaagttgttgcttggctttgtcgtggaatgaaaccagcgcgccatcgtaaggaaaaaacatttccgattgatcaaacaccagccaaccgcgaatttccacttggctaaattcaagatacgtcgcgggcaggtttgggttggttggtagagtaggagatgtgccgccgccgggctcggttgtggttccggtttggtgatcgaccgaagcggtcaacgttccgttggcgtcccattcccgcgtgtgtttgggatagccccgacgatcataatcgattgacgcgcggcgttggccatcaacatcagtgagggtggccgtgttgaccaaacgccctttgaatatgtgggccagcaaacgctcggtgccgttgctgtgcttaagggtgatgcgcccggtgtagggttcatcctcgtacgcacccgccaaaataacggtttgcccgttggcgatttcgtaagtgcttgagttgaaatcatccgcataaagatcgcgcgccgtgggcttgatcgcaaagtacagggccgtgccccattcggcattatccatttccagcggctgccggttgatatccagccgcgccaaatacttcgcctccaacacgcggtcgcccacggactgggacggagagccgcaacccgccaaacacaacaccagcaccgcacccaatccaaactggggcagcttagcaaaacagccaaaattcagcattattttcatttatcagcgccttttgccggaacccaaggtggtcggatcctgacagggcagggttattcacagcaaatcccgtgccgtgaataactttcccagtaaaaaagaaagccggttctctaagggtttcaatgggtcggaggcaatttaccccaatttttcacacagcgcacgcgatttccgggattggctctcggcgtgttgggggctaggctccggcaatggcgcgcacgcgaaaatgccccatctgcaaacgcaccgtccttgccgaccgcgagcaatgcccgcattgcgatgcgccccggccggagccgcagcgctgggcggatcccgatcgcgacaatccctccggcttcaaccgccgccgccttgccctgcgccgaatgcgaaatgggggcgtcgtgatgttcctcttcggcatcgtgctcatggccaacggcgtggcccacgagcccgctccgcacctgaaacccatcggcggcgtgggcgtgctcttcatcatcctcggcaccgtgagctatttgtggagctggaaaatactgcgcaacgaataggagcggtgcacaaaaaaaggcggcggaatcatccgccgcctgttcaaaacaacagagctacttcttcttgccctttggcgccaccgtgatggtgatcttctttgaaaccaccggcgggttgtgcgggatgtgcgcgtaatccgcgaacaccaattgcaacgtgtgcttgcccggcggcaaatccagcgtcacctccgtttggccgccaccgaaatgcttgagcgtatccgaagccaccaagggcaggcccatcgccggcatcttctccgtgtcgatcaacaaatgatgatgccccgtgttaggcatcggctttccatcgggcagcaccaagcccgccgggcatacgcccatgcccttgaggccgaagagcacgcgcaccggccccttcacggttttgccgtcacgcggggaaatgatcgtcacctttgcgcccttgggcgaaggctggcgcgggattttatcttcggccacggccggcaacagaaggctacaggtgagaattgaaaagaggatttttttcataagaatacagattccttgtgtgagggttgtgaggttcaaaaacggttcgccgctattgtgcccaaggccaagcccggcgcaagccaaagtttgtgaaaaagcttggtgaaaagtttgagagggccgcgcgggttatgcctccgcgtctggctccggagtgtcgcccgcttccgcatttgcctcgggcgtaggttgttgcgcggcggtttgttgctcgtacaagctcaagtgcaattccgtgaacaccccccgcatgaaccaacgcgccaccatcgcaaacgccagcgccgccacgcagccgcgcatgattgaggtgccccaatcattgcccgccaagtggttaagcgccagcaccagcaaaaagcccgcgccgccagaatgaatcaagaaatgcgacatagtgtccgcccccaataaaccacgaaaatcacctccgcgcaatagggtgagtgattttcgattgaagttttttgagtgacgaatgggtggggatcttcccatttttaggggctcaacatccaattcggctatgtggcctgaaaataaatgcagaattttgaaagatttcgggcgcgaaacgcgaattatatagtaggaacccaaaacaaaaaccggcccgaaggccggtttaagaaacgctttcaatcatggtgtgtccgcataacggacagggagccagactgcgttatctaactttgtcttgattccgcgaacagcatagagagccaaatcatgaatgacaacccaaaaaacaacggaaattccaacggcgcaagtcacccctcacacgcctcacacgaccccaacgccaacctccacctcgccttcgacgtcggccacagctccatcggttgggcggtgctcgatgctcccgccgatgcggaggtgctcggctgtggctcggtgatctttcgcgcggatgattgtcttgcgagtgaccgccgtggctttcggcggcaacggcggcacatccgcagcacgcgccaacggattgcgcgtttgaaagttttattgcggcacttgggcgtgttgactgaggcggaattgaatgtgcccggctgtgcttggccgtggatgttggcggcgcgggtgttgcggggcggcaaggcgctttcgtggacggagctgtgggatgtgctgcgctggtacgcgcacaatcgcggctacgatggcaaccggcgctggagccgcgtggagagtgaaaatgcggaggataccgagaaagtgcaaaacgccaacgcattgatggaggaacacggaaccgaatcgatggcggaaacgatttgtgcggtgagcgggattgatccgctgggcaaaaaacgttcggccgcggtggcgccgaaggatcggttcaagagccaaaacgctgcgtttgatcgcgacgtggtgcgcggtgaaatgcagcgcgtgctggcggcgcacgcgggccagttggacaagcttgatgccgacgtcatccgctgcctcatcggcaacgacccgtgggatgacgacgcgtggcaagtcgtgcccgtgccgggtctcaagctgcccaagcggtatttcggcagcttgctctttggccagctcgtgccgcgctttgacaatcgcatcatcagcacgtgccccatttctggtggcaaagtccccacgcggcacgcgccggagtttcttgcgtttcgctgggcaatgcaactggccaatgtgcgcgtggccggtgcgggcgaaaaggagctgcgtccgctcaccgcacccgagcgcaagcaagtggatgaggcgatgcacgcggagggctttctgaccaagggcaatttcaaaaaagccgtgcgcgaaatcatcggcagcgaccgcgacaacctcgacacgatgctgctgcatcccgatgccgagcgcgcactggtgctcgaccccgtgcgcaagtttgctcacggcggaatcttgggcacgctgttcctcaccctgccggagaacattcggcgcttggcattgaatagttggcggcgcggcaaacgccaaacgctggcggatctactggcgctcgcagaaaaacacggcgcggatacgggcgattttgaaaccgcgctggaggattacctcgccaacccgcccaaggcgcgcggcaaaaagaagccgcccgcgcccacgcgtgaaagtgtgctggggcaatcccacgcttacgaccgaggctcgcccgggcgaggtccatacacccgcacggtgatggcccaagcggcggccgaggcgatggccggcagcgatccgcgcgaggaaggcggttgcctttatgtgactgatgaattgcggcacgcgcagctcaaccgtccgttggcggagcaaaccaacaaccatctcgtccgccatcggctgctgatgctcgggcgagtgctcgaggatgtggtggcggaatacgccgatggcgacaaatgcaaaatcgcccgcgccgtcattgaagtaaaccgcgacgtgcgcgatatgtccggcaaaagcgccaaacaagttgcgcaggatctcggcctgcgccttgccaatcacaaagccgtttccaaaaaactggaggaagaaatggccgcgctcggcaagcccatcaccgccagcctcatccgcaaggcccgcgtggcggatgacctcgactggacctgccccttcaccggcaagcgttttgatgtgccgcagctcgtgcacggcgtcgtggatcgcgagcacatcatcccgcgctcgctgcgccccaccgatgcgctcgatgcgttggtaatgaccttctccgccgtgaaccatatgaaaggcaaacgcaccgcgttgcagtttatcgaggaagaaggcggcaacaccgtgcaaggcgcgcccaatctcacgttgtttacgccgacacagtacaaaaagtttgtggacaaactcgagaccttcaaaggccacgacgacgataaaaaacgcaagcgtcgccgcaaggattggctgttgctcgccgactacgaggaaaaggaattcacccccggcgacctcacgcaaaccagccaaatcgtgcggctcggcgcgcaagtcatccagcggcattttcaggaatgcgagaaaccgccgcgcgtcatttcattgcccggcagcgtcaccggcgcggtgcgcaagagttggcggctcaccggcacccttgccgtggccaacccgcaagtactcaacgaagacggcagtaccaaaaccaaaaccgagatccgcggcatcacccacctgcatcacgcgctggatgcctgcgtgctcggcctcgccgcgaagttcatccccaacaacggccgcgtgtggcagctcatcgtcaagcgccgcctcaatcccgccgagcaaaacgagctgttgaaactcggcgtgtacagccgcgacgccgatggacgcgtgcatctgcgcgacctcgccgatcatcgcaaagaacaaatcacccactgcctcgccgaacgccgcgtggtgcagcacctccccgcccggatgaccggcctgcgcgtggagcaaaatacctggcgcgtggagcaagtggaagacggcgtggccacccttagccagcgcatccgtggcgaggacggcaccctgcccgccaccaaacaaaccaccgagaaagccatcaaactcctcggccccgcccccgtcggtgaaggccaaggcaagctcgccgccctgaagggcgccctcgtcatccccgacaacttcggggtcgccctcgaccccgaacccaccatcatccccttccacaaagtctggccaaggctcaacgagttaaaacaaaaaaacgccggcaaatggccgagggtgttgaggaatgggatgatcattaaaatcgaaaccggaacctacaaaggagtttggcggattctttctatcaacaacaatgtagcgggactcaagttggatcttggccaaccggatactgtgcgacctcggtacgatgcttttgaccctgaaacaggaaaaaagaaaagcaagaccactcccggttgcaaattgatggccagcttggagaccgccatcaaaggaggtctgaacattttgaataacagcctaattggaactgcagcaccaaagcccaaatccaaataaccatcgtgccctacgaaatccaatacagcccttccgcccagaaggatttggacaagctgcccaagcgtgcggcgcagcaatgcctgcgcaaaattgagcggctggaggctggcttgcagggcaacctcaagcgcctgcaccagcacgaggccgcgtggcggttgcgtatgggcgactatcgaatcttgtttgatgttaccggcgatgttatcgtgatccgacgaattggccaccgaaagcacatctatgaccaaagttgaccaacaacagatcgacagcacgattagccggaaacgaaagcagatcgccgacctgcgtgaggaactggaggacttgaatgattatctcgacctcctcgaggcccgcgctcaggacaacggaaaaccgacgatcagccatcaggaaatgaaaacgcgcttgggcgttaaatagccgcaccgttttgcgactgagcccaagcgccgcgccccggcgaaaggctatgtcgtatcacattgtaaacatagacagccccaagtgctcgctcagctgccgcgatggccagctcacttgtcgcagcgatgatggcgaggtgcggatgttgccgttggaggacatcgcctccattatcatcaccagtttctccgcgcacctccacagccatctgttgctcgaagccgccaagcacggcgtggccctcatcatctgcgaatccttcaaacccgttagcatcttgcttcccgccaatcgcgccaccgataccctcctcacccgtgcccaggtggatttagaagaacccctgcgccgcgagctgtggcagcgcaccgtggatgctaagtgcgccaatcaactttccctcgccactgaactcgcgcccgaagatccccgcctcggcgcgctcgcgcattgggccgccgcacgccatcccacacaggaagccaccagtgcaaaatacttctgggccatcctcgccagttcattaaacgagccgagctttgagcgcgcccgcgataagggcggcctcaataatttgctcaactatggctacgccgtgctcctctccaccgtccttcaaaaatgctttggcgtgggcctcgaccccaccttcggcatccaccacgccatccgcgaacgcgccaccccgctggcctacgacctgatggaaccctttcgcccccgcgtggattggcgcgtcgcccaatgggtccgccaaaaccccgacgcagaaagctgggaagtcacccccgaataccgccaatggatcaccgcgttgccggtagaaaaaatttcgcatcacggccgccagctgcaactgcagggcgttctggaaaacaccacccgcggctttcgccgcgccgtgctcgaacaaaccccaaacgattacgaaccatggacacaaggaaattcaaaatgggctggctaatggtcgcatacgatctccccgtcggcaccgacgaacagcgcaagaccgccagcggcttccgcaagtttctcctcaaggacggtttccaaatgatgcagttcagcgtgtacgtgcgcccttgcgtcacctttgcccgccagaaaacccacatcgatcacgtgaaagctcacttgccgcctgaaggcagcgtgcgcgccatcttcatcacccgcgcccaatgggaacgctcctacgtcctccacggcgcccccgccaaggaagagccccctgagcaaatgcccgaacaaatccagctttggtgaaacagatgccccctgtaaaacaggggggaagagctaggaatttgccggccgttcgttagaatggccggcaaattcctattgtgccctcatctgatttggaatcaaggcaaagcgcagaggcagaggcggggcaatttgaagagattgtgccctcatctgatttggaatcaaggcaaagcataactccgacactatcgagagctacttcgattgtgccctcatctgatttggaatcaaggcaaagcaacggtttcccgtccttggacttggcgatgattgtgccctcatctgatttggaatcaa

SEQ ID NO: 3580 - DNA, 11849 bp, synthetic construct
  source 1..11849: mol_type = other DNA
  misc_feature 1..11849: note = Synthetic
gacggcggcaaagaaagttttgcggagcttgtcgtagcgggtggcgatacgacggaagtttttgattttgttgaagaagcgctcgatccggttccgctcacggtaacgctctttgtcgtagtgaagcttttggctgcgtgtgctgatcggtggaatcaccggctcaatcccgtccaaagccaagcgttcacgaatgcggtcggcatcatagcctctatcgagcgcggccgattcgagcacgttgtcggcatcaagactttcgtagaggctctcaaattggcgaccgtcgtgagcttggcccggcgtcaaatggagcgccaccgcgcagttttcatcgatggtggcggcgtggatcttggtgctcaaccctccccgagagcggcccagagcttggtcgaggccgttttttttgcgctcccgccgcgtgctgatgggctcgcaccgtggttgaatccatgaataactcacgagcttgagcgaagctctcggcttgaagactcttccataagcgctgccagattccacgcgcctcccatcggcgaaatcgcatgtaaatagcaatccagcgccccagtgcaggtggcaggtcgcgccaaggacaaccggtccgattaaggtagagcaacgcttccagaaaatctctgtcgctcatcttgcctggcgctccggcctgggaatgtttggctgcttccactgccggttgcaggacattccacatcttgtcgctgatcatttttcgggatgttgcttctttcatcccttccttaaatcatccctttttacatcgtacaagtaaaattcgttaacagctcctagagcgtttttgggttattttgtcgcaatgatctgagagcgccgagggttgatgcggggctttttgagcgcagcggctgtatttgtaaatacagcccaagcgcaaaaagacgcacagcgactctcgccgccgaagagcatacgacaaaataaaccgaaaccgctctaatcgtgtttcgcggtcgctgatctctggtgtctttggcttcatccctaccttattgcgacttttttgcaatcgtaccagcactttctcaaactttttcgtacgccaactttaattgcacccgatggccggactcgaaccggcacgggccgttaagcccaacggattttaaggtcgggctacaaaactatttttagggaatttactctgaagtcgctttttccagtgccacctggtgccaccttttcgagatctgcccgtataaaccattcccgccgcaagcggacggggtatttcagtgcccccccgctcaatcttacgccgcaagcggcggggaattgaacccgaaggagattcaagtgggtgatcgagaacccttataaaaaacaaaaaagcggagacaatgtccccgcttttttgttaagaaatgctcttggacacggtgtatccgcatcagcggatagattgaacggtctgcattatctaactttgtcttgattccaacggaatgaatacgcgcccctccccctcttcggcaagcccaaaaacaggcgacttgcacctcgccttcgatgtcggccatagctccattggttgggcgctgcttcacgccaccccggaactgctcgggtgcggctccgtcatctttcccgccgacgattgcctggcctcccagcgtcgcgccttccgccgtcaacgccgccacatccgttccacccgtctgcgcattgcccgcatcgaacggctgctaacgcatctaggggcgctctcgagcgaggatctggcggcaaaacaccaggcaggcggcgggcattccgctccgtggctgctggcggcccgcgttctgcgggggtgcaagctgctttcgtggccggaactgtgggatgtgattcgatggtatgctcacaaccgcggctacgatggcaacaaggcgtggagcgcgcaggaatccgaggcggagcaagaggacacgcagaaggtcgaaaacgcacgcgggctttacgcaaaacacgggacacacaccgtggcggagacgttctgcgccatcagcggcctggaccctctcggctcaaaaatctcctgcaatcttcgcggagaccaacggcccaaacacctcaacgccgcgttcccccgcgaggacgttgaaaaggaagtcctccaaatccttcaagcccattgcggcgtgctcccaggggttgattccgccttcctcgccgcgctgatgcaggactggcgggccattccggctcctgccatccggctgccgaatcgctaccacggcggcttgctctttggtcagcttgttccgcgtttcgagaaccgcatcatcgccgcctgccccatcacctacgagcaggtttaccaaagcgttctggcggaaaccggccacgaagtaaaggcccgacacgaagcggaaaaatgttccaaggttccctcgaaggactgcccagagttcctccgctatcgatgggccatgcaggtggctaatatccagatcgccacgggcgagggccgcgcaacgcgctccttgacggtcgaagaacgccgtcgccttgatgccaaaatgggcgagaacggttattttacagccggtgagttcaaaaaatccgtgcgtgaaatcaccgacggcgcacccgacaacctcgagcaaatgctgacccaccccgacgcggaaaaggcgctcattctcgacccggcacgcaaagccattgccgccaaagccgcttggaaaggtatcttttccctactcccagagccgctgcaaaagcgcgccttggggcaactccggcgaggcaagccagttcgcctacgtgacctgctagcgcgttcccaagagccgttaccagaagtgaacgccgccattgaccgacaggtggacaccctcaataccaagaaaaagcaggggcaccctcccctcacccgcgcagagttgctcgcggatccggtgcagatggaacggctttccggccgcgccccctatgctcgcaacctcatggaccatgtggcggaatttgttttcagcaccgagcggcaccccacggaggaaggcggcccgctctaccgcagcgaagccatccgcaatgcgcagcttcagcgcgccctcgacgaacagaccaacaaccacctcgtccgccaccggctccttatcctcgaccgactgcaccgcgacatcgtgaaagaatacgcgggcagcgacctggcgcgcatcggacggatcaccatcgaagtcaaccgcgacctgcgcgagctttccggcaaaaccgccaaacaagtcgcccaggatctgggccaacggctagccaactttaaaagcgtcaccgcccggcttgaaaaagccttcgagggaaaagacacccgcatcacccccggattgatccgcaaagcccgcatcgccgaagacctcggctggaaatgcctctatactgacaaggattacgacgagttcgacctcctccaccgcaaagtggacaaggaccacatcatccctcgcgccgatcgcgccagcgacagtctcgattccctcgtgatcaccttcgcagaggtaaaccggatgaaaggcaaacgcaccgccttgcgcttcattgaagaggagcaagggaaggttgtgcccggacaccctgaactcacgatcaagcccctttccaaatacctcgccgatgtcgccgcgcttgaaacttacaagggacacgacgacgacaagcgccgcaaaaagcaccgcaaagaacggctcattctccgcgactacgtcgaaaaagacttcacccccggcgatctgacccaaacctcccagcttgtccggctgggctcacaactccttgagcgcgcctaccttgcccaaaagaaaaggcccgtcatcacgccactgccgggcagcatcacggggacgatccgcaaagcgtggaacctgctcggctgcctgagtgccgccaacccgcaagtgatcgacccggagagcggagaagttcgcaacaaaaccgaaattcgcggcatcacccatctgcatcacgccctggacgcctgcgtgctcggcttcgcctcgtgcttcttcccgcgcgatggtggcgtctgggaactgcttatccaacgccgcctcgataaggcccagcaagcgaccttgaaagagcggctgcgcacctatgtcgagttcactcaggagggacaaccgaaactgatcgacctgcccgtgccattcaaagagcaaatccgccaacggctcgcggaacggcgagtcgtccaacacatcccggcggaaatgacaggcctacgcgtcgagcaaaacgcatggcgcgtggtttccatcgaaaacggcgaagccctcctgcgccagcgcatccggcaacccgacggccagcgccccctcaaggaaaccaaagaaaagctgggaaaactcctggggctgcaacccaaaggcggcatcggcaaactccaacgcaacaaagcagccctggtcattcccgacaacttcggcctcgcccttgaccccgagccacaaatcatcccctttcacaaagtcgccgtgcggctgcgcgaactgcgaacccaaaacggaggccgaaccgtgcgggttctgcgcaacgggatgttaatccaagtccccaaaggcaaattccaaggaacctggaaagtcttctccgtcaaaaacaacgccaccggcatcgccgtggacatcggacgaaccgacgtcgtccgcctacaaaacaagaccgaagggcacaagatcaacgtccggctgtcaacgttgctcaaagacggcatgcagatcgaaaaaacgcggctcaccggcttaacaagcgcataaaagcacaacgccccgtgtaaaaacacagggcgttgtgggaatcattaggcaaagctaacgtaatttccttttaacctttctggttgaaagagactgcgtttttgaacatccgtgtcgattgccgtccatccttggaactttaatgatgacacttaaaaatattcataatcgtaatttagagtcaaaagaaatcgcttttctgccaaaatttaccgcccggcacctcaaagccgcacgtttcccctctgtccatgtccttccacatcgtcaacatcgactccccgcaatgttctctctcgtgcagagatgggcagtttgtctgcaaaacggcggaaggcgaaagaaagctgcccctggaggacatcgcatccatccttattaccagcttctcggccagcatccacagtcacctcattctggaagcggccaaacacggcgtagcgctcatcttctgcgaagcctttaagcccgtctcgctggtccttccggccaaccgctccacagacaccctgctcacccgcgctttgctccggcttccagacaaaacacgcgaccaactttgggccaaaaccgtggattcgaaatgccagaaccagtggacgctggcccagcacatcgccccggacaatgcaggacttcctgcacttcgggccgccgcattgggcctcaatccgcacaaggaagctatgtgcgccaaatcgttctggcaaatcctcagccgcagccttggcgaagaagacttcgtgcgagaacgcaccgcaggcgggctcaacaacctgctcaactacggctacgccgtgctcctttccaccacactccagaaactttttgccgtggggctggatcccacctttggcatctcccacgtcacccgcgaacgctccaccccgctcgcctacgacatcatggaaccattccgcccctgcgtggactggcgcgtctaccaatgggccaagcaacaacccaagccatgggtagtcaccaaggaattccgccaatgggtcacgggatttccacaagaacgggtaggctggctcgattgcacattggaaatccaaggggtgatcgaaggcgtggtgcgaggattgcgccgggcggtgttagaaaaacaaccgcgctattacaaaccatggataccgagaaattcaaaatgggctggcttgtagtggcatttgatctgccggtgggcaccagggaacagcggaaacgggcaaacgacttccgggggtttctcttggacgatggcttccagatggttcaattcagcgtgtatgcgcgggcctgcgtttcgtttgcccggcaagagacgcacgttgagcaggtgaagaaaaacctgccgccagaaggaagcgtccgggcgattttcgtcacgcgagcgcaatgggaacgatcttttatcatccacggttcccccgcaaccccggtcaacccggaaacgatgcccgagcaaattcagctttggtagaggcgctcctccgggaatacccggaggagcaaccgtctggccccaaggctcttaggcagagcgattgtgctccacccgtttttggaatcaaggcaaagccttagttgcgggcaacatgccggttgccttattgtgctccacccgtttttggaatcaaggcaaagctcgaagtgcatgatgcggcggtggcgggaattgtgctccacccgtttttggaatcaaggcaaagcaacggcctcccgtttgttatcgcggagaaaattgtgctccacccgtttttggaatcaaggcaaagccgggcgcgggatgaacaatgttgttcttggattgtgctccacccgtttttggaatcaaggcaaagctggagtttcaagcgaccctttgcggaacatattgtgctccacccgtttttggaatcaaggcaaagctatgttggctaatatggccattatggcaatattgtgctccacccgtttttggaatcaaggcaaagccgcagtggcggagaatgatttcgccgtgcaattgtgcttcacccgtttttggaatcaaggcaaagctaacatcatgaaatcacttttccttttcatattgtgctccacccgtttttggaatcaaggcaaagctttcataatcttcgggttcgggtggttgatattgtgctccacccgtttttggaatcaaggcaaagctggctttggctcaccgtgccgcccggggtcattgtgctccacccgtttttggaatcaaggcaaagcccagccgtacacggtccacgcgaccaagaaattgtgctccacccgtttttggaatcaaggcaaagcgggacggggcgaggatttgcacggaaaccaattgtgctccacccgtttttggaatcaaggcaaagcgagttttgcctcttccttttcgtcctctttattgtgctccacccgtttttggaatcaaggcaaagcagccagttgccgggcaaactgccagcggcaattgtgctccacccgtttttggaatcaaggcaaagcccggtgacgcagcttagtttttcatgcggaattgtgctccacccgtttttggaatcaaggcaaagcctcgcgctgccgcgcattctccgaatagatattgtgctccacccgtttttggaatcaaggcaaagctataacggtcccgtggtttgtggggactggattgtgctccacccgtttttggaatcaaggcaaagcctcctcgcgttccgcctccttgacggcttattgtgctccacccgtttttggaatcaaggcaaagctgggtcggacgcgcaggcgcgtcacaggaaattgtgctccacccgtttttggaatcaaggcaaagctggggtttacgcctcctaccaaaggaacagattgtgctccacccgtttttggaatcaaggcaaagcacggcggatgatgcagaccagcttgcggtcattgtgctccacccgtttttggaatcaaggcaaagcttatgggctctattgcaataacaggtaagcattgtgctccacccgtttttggaatcaaggcaaagcgtaggagagcgcctcgtcgctcagcccgttattgtgctccacccgtttttggaatcaaggcaaagccccaccgacgcggacaagcaggctaagacctacacccacaacacctagtgagagcgcacagtgaatcttgccgaaggtgaaaatggcaatcgtttcatgcccccaagagtaaacgctgacaagacttacggcatcgccttcacaatcttcatcgtctctacacttactgtgcagacgcgggcaaggagggcaatcacatcctccttttgatcagcgaagcggtaggtattaaatttctccgccaccgtcggatcgctaatcttgtgttccttccactggtccaacacccattccatggcactgcgatttccgagtttgtactcccacgcttcagcgggaatacctcgaagcgcagtcgtcgagtcgatctcgattgctccggcgcactttaatgctttcagtttcggcttgagttggggcttgtcgtccagcaggcacttcgatcgtaggcgatcattggatagcagggcgatttgtttacttgatggcttgtttctggaatcgtgacgcttcaaagggaacggtgcagcatcttcgtagcaaaggtgcagacccatcagcgctcggccccacgcagtccactggcggaagtcctcgtaaaatggcagtcggggacattcgcgtgtgaggttgatttcgtatttagcgcgataagccgggtgatggagcacggcgtaagtgtagtgaaaaatgtcacgtttggtgattttcgaatcgtcgtagtgctgctggaattgccgtagtccccaatcggtcaggttgtcgtgtcgcttaccgtctctgtcgtagcggtagaggggaagcacacaagtgccggaggcagcccctacgaaatgtagatcaggaacctgcttcacagccaaaaccatgaagggcttttgcgatgccgtgtcagtatggcaaatggccacgttttcgagcttcccggagtcgccaaagatttggggaatttggtaaagacgatgaacaatgtccttatcaaaataaaggagcctgcttgtgaatggacgatagttcgcagaaattatctgggtgctgccgaattttagcgcaggaccgcgagcggcttgagattccagctctgatgtccattttatcttgcggcttacaaaatcgttaattttaaccttcttatttgaactcgcccatcgggtcttttcttcattaaacgaagcaacaaaatagcgaatcttcgctttaagattggatcgatcgacatcgtatgcccatgcatctcgcgcggtcactacccctagcgaatagagatgacaaactgctttatcgcttcgcgcgagctttacctgcttactcatcaaagggagcaagtttttgaaatcattctcctcagtgttaagccagttcccatcggcatccggctcaatcctttccatgtcaagcaactcgatctttgctgcactgaggaattccaatttctcctcctttggcaactcgtcagccatggacgtgtagaagatgcgacagggatgctgtggaggactgctcttatctttgacgaaaaaggcaatggcgacaccggtttgaatgccaaagacgttgttttttgtgccggagatttttgggttcgcccgcacatcgctcttcgtatccacgatgtaaatgtggtcgaactcttgggccacaacctttcggaatccgtcgaaggtgcattggtcgatgaatgaacgattgcagataaaggcgactataccttgctccgacagtcggtcgcttgcccaacggatgaagcgggcatacatgtcataaacctttgtcttctgtgccgtactagctgcgatgtaggttgtcttgattctttgatcgatgtgctggtaggagcggttcttattgttgtcattttcgttctgctggttggcattgtatggcggattgccaatgatgacgctgatcttgcgtttattctgctgtttaatccgccttacgttttctgagctgagtgagccgagttctaattggaattggttttcaccgctcaatgcctctgtgttgtcgagcgtatcgacaaagcagatgtttccgaacggagcataggatcccatcttggctgcgtaagcggtttcgatgttcaaatttgcgatatagtaaggaaggatggcgacctcattagcgtgcagctcatctttatatttacgagggaggacttgtcgcggaaggtattctataatgtcgcagatgtagctaccagtgcccgtcgctggatctagaatttccacgcctttgtcttcaagtccgcgctcaaaatgacggtggagggcgtatcagtagagcggatcatgaaattgatgatctcgcccggcgtatagacgatgccgagccggtcagcgcctttcggattatatgctttgtagaagttttcgtagatgaccttgaggaatgtttgcttttcccgatggtggacaatgctggttgcctgcgccttgatgcactcgtagtaatgtttgatctggccaagggtgtcgtgcttagtcttgccggtaaagaatgtggcttcgacctgcttcaactcgcgggcaatgttgttctcatcgagaagttgggtgtcgctaaagatggaaaggaagatttcctcggtaagaatgtgctggatgagcatctcgtcgacgtcgcccggggtaacagtaggattgattgcgctacggcacagagcaacgaacgcgttgcgacaaaggcgaaaacggcgattgatcgctccctgctcttgaatcatctcgcgcagagttcttacgatgctaggaatgtcctgtttgaaacgctcgacggctttttggaattcccgcacctccggatgctcgaatgagacataggcggtgaggagttcgtcaagggcttcgacgtttgaaaaacacgcggttaaaagatgctgaccgccttggtagagcacggcagtctgggagtcttcgaaaaggatgtttgagtccgggtaacctctatcgaatttctttgcgatttcttgatcgagattgtcatcggagtccttgctctcccaaaatccatagtcgagtcgcaggatgttcttcagcgttccgtcaggagtgacgcgttttttcctgcgcggattgaaatagccgatttcctctacaagtatgagttcgtggggacgagcgtaagcgttgatgagattggaaacggcccgcctgatggatgtctccttagtgctgccgccatagcggataatctgatccacctcgcaacggtacgtatggatggagccgagattaggcatggcttagggagggggcgcacgaaatctatgcagacgatgacacttgacatatcgtggcgactgaaattccgggtgtctatcaaccgactattcggggtttatccggcccgtggatcgggtttatttgctgtataaaccgtactggcgctgcccgttttccagtgacgacgtgcgtgatttgtttgaaagtcgttaagcatctgcggatcgtaattgcggctaatccccagaggtaaaagttaccgtctcctactctcgcgactgatcctccaccagtgcgaggaatatcacggcagatgccgtccttagcgcaccggatatcatctttagggacagcggatccgggatcctgcgctgcgtgcaagcaatccgataataccatatttcaacaccggactgtttttccggtgtcttttggacgatttgtttgtcattcacgcaaaaaacgacggcgaccgaagcattggcctcacagagaataccggatgccggaaccgttgctggtgcagtgccacctggtgccaccaaaaccgcaaaaaaggccatttttagccccaaaatagggattttgcctctaaattccactttgctcacaaaacacataagcagctataaataaacaacttatggtgccgatggccggactcgaaccggcacgggaggtgaatcccaacggattttaagtccggtgcgtctgccatttcgccacatcggcgtgaaaccacaccaggttctataggggtggatcac

SEQ ID NO: 3581 - DNA, 10119 bp, synthetic construct
  misc_feature 1..10119: note = Synthetic
  source 1..10119: mol_type = other DNA
cgtgttcggcgaggcttccaaaagttccgcaatttcctcaaacgtgtagtggtgccagaatttcagcacgatcacttcccgttggtccaccggcagttcggccaggcagcgcatcgctgccagttccgccgggctttcgccgggggatttttcaaaccaccggatggcttccagttcccgggtgagccgccgccacaagctccggcggtaattcagcgcctggttccggtagcttcgcacgcagtaatgctccggccgggcggggggcaggggcttctccatcagggtcaaaaatatctcctgcagcacatcctccgcctcgcagtggctcaggcccagggcccgcccatagagcagcaattccgccgctttcacgtcgtaaatcgcctcgcaccaatggttgggaccggccggtttcatggtttcactagatagacaccacgctccacgaatttgtataaattatttttttgtgaccacagtttgaacttggccgcggatttaagcagaattgcccgcaaatgtatctcggaaaaaaaatcgtggtcgtcatgcccgcctacaatgcggcccggaccgtccggaaaacgtacgaggaagttctggcccaagggatcgtggaccagattatcttggtggatgaccggagtcgcgatgaaaccgtggccgtggccaaatcactgccgggggtgatcgtggaagcccatgagcaaaaccgcggttatggggggaaccagaaaacgtgctaccggctcgccctcgccgccggggccgatatcgtcatcatggtgcatccggattaccagtacacccccaaactcattcccgccatggcctccatcattgccaatggcctccacccctgcgtgctggccagccggattttggggggatatgccctggccgggggaatgccgccgtggaagtacgtggccaaccggtttttgacctttacggaaaatctgctcctcggggcgaagctctcggagtaccacaccggttaccgggcgttttcccgggaaatcttggaaaagctggatttgaatggcaattccgatgacttcatcttcgacaatcagatgctcgcccagattttatggcacgggttcactattgccgaggtgagttgcccgaccaaatacttcaaggaagcctcgtctattaactttagacgaagcgtgaaatacggctttggctgtctgtccgtcggggcccagtttcgcctggcgaaatggggtctgggacgcccgcggctgttcagttcaacgaagcggccagacgggacttcttgcgattgaccgtcggacgggggaccacgccggatttcacggccttgtccagggtggagtgcacgctgggcagcagcttggcggcttcgtccttcttgcctgcggcaacgagggtgcgaaaattcttttccacgcggcgcaagttggacttgatgctgcggttgtgctgctctttgcgggcactgccccgcatgcgacgttcggctgacttcgtattcggcataattaatttaagtaaaagggtgataactctacccgaaccccggggggtgtcaatcttaaatccagcgcaaattttctgcgcctaatcccgcaaatggcattgcctcccgccgcccggatgcccaaattaccctcatgaaattgattcgtgcctgcgccctccggttaaccgtgctcgccgctttactggccggcctcacccgcgcctccgccgacgccccccgcgagcatctttcgctggatgccaattggaaatttcacctcggcgatgactggcccaatgccctgcatctggacaaagccggctccagcgacggccccgccggcgaaaaattcagcgactcctcctggcgcggcctcaatctgccccacgactgggccatcgaactgcccttcgattcttccgccgacggcagccacggtttcaaacccgtcggccccggcttcgccaaaaacaatgtcggctggtaccgtcgcacctttgatctccccgccacggatgccggcaagcgcatctggctgcaatttgacggcgcctttcgcgacaccaccgtctgggttaatggctggatcgtggcccgcaatgaaagcggctactaccccttccgcgccgatattaccgacatcgcccattttggcggccataacaccgtgagcgtgaaagtggacgccagcaaatttgagggctggttttacgagggcgccggcatttaccgccatgtgtggctggataaaaccgcgcccgtggccatcgcccccgatggcgtgttcgcttacagccagttcaacgacaatgtgcccaccggccccgccaccattcatgtttcggccgacctcgtcaatgccagcgccaccaccgccgatgccgtcgtcagctaccagctcgtttctccccggggcgagaccaatgccgtggagaatgctttccagggagtgaatcacctccccgtgccttcgactttggataaaggtaatttggccccggtcacggccgctggcacgtttgccgtggccgcccccgaactctggtcgcccgaatccccgaaactctatcaactcatcaccaccgtcacggtcgatggccaggtggtggaccggcagaccaccgagttcggcatccgcacttttgcctttgatgccaccaacggctttctgctgaatggccggcattacgtcttgcaaggcacctgcaaccaccaggacatggccggtgtcggggccgcgctgccggatgcactccaatatttccgcgtggccaaattaaaagagttcgggtgcaatgccatccgcacctcgcacaatccgcccacccccgaactcctcactgcctgcgaccacctcggcatgctcatcatggatgagagccgcctgctcggcagcgaccccgaaaatctccgccgctgggaattgcaaatccgccgcgaccgcaaccatgccagcgtggccatctggagcattgccaatgaggagttttacacgcaggacaccccgcagggcgccaatgtggccaccaccatgcaacgcctcgtccgccagttggaccccacccggcccatgacctacgccgcccccgaaggcgacacgtttgccggcgtcaatggcgtcattcaagtccgcggctggaattaccacgtcggcggcgacatggaccgctaccatgccgggcatcccggccagcccaatgtcggcaccgaacaggccagcaccgtttgcacccgcggcatttatgccaacgatcccgagcgcggttacgtcagcgcttacgacgacaacgccccctcctgggccaccaccaccgagcgttggtggagttattttgccgaccgcccctggctgagcggcgggtttgtctggaccggtttcgattatcgcggcgaacccaccccctataactggccctgcatcaactcccacttcggcgtccttgatgtctgcggcttccccaaggacaacttctattattaccaagcctggtggaccaccaataccgtcctccatctgctgccccattggaactggcccggcaaaaccggccagacagtccgggtggacgccctcagcaattgcgaggaagtcgaactcttcctgaatggcgcatcgcagggccggcagtcgttgaaacccaattccaaattgacctggcaggtcaaatacgcccccgggaccctgagtgccaggggctaccgccacggccaggtggtcactgagtccaaggtggaaaccaccggcgaacccgccgtggtgcaactcgtgccggaccgttccacgctcaatgccgatggcgaggatgtcagcgtcttcaccgtctccgtcaccgatgcccagggccgcgtcgttcccacggcgggcaaccccgtgcacttcgaggtcaccggcgccggtgccatcctcggcgtgggcaatggcgatcccagctgccacgaacccgacacctacgtggcccagaccccctgccaaaccatcgccgtcagcgactggcgctggaaactcgccgccgtgccggcaaaaggggagcttgcccccgaatacggcaacgacgtggacgattccgcctggaaccatatcaagcccaagaccgatggcgacaccggcagccaggtcttgcgcgaggggcagaccgccatctaccgcgcccacgtcaccgtcaccgccgccgacctcgccggcaccagcctgcaactcgtgtttggcggcatcgacgaccacggctggatcttcgtgaaccagcaattggtcggtgaatccacggactgggccgcgcagcccgcctatgaagtcaaatccgccctgcacgtgggcgataacctgatcaccgtcggcgtgtccaacgccggcggctccggcggcctcaaccccaatgtcaccctggaactcaccggccagcccgtcaaactcgcctggtcccgcagcaccttcaatgggctggcccaggtcatcgtgcaatccacccggaccgccggcgaaatcaaactcaccgccagcgtcgatggcctgaccccggccaccgccaccatcaccacccagcccgccaccgcccgccccagcgtgccctaactcgtccgcccccgtggttttgccgtgaccccccaagtggcgggtgagatctcctcacccgccacttttgccattggctactccggcctgcctggcttccaaataaccggcgccgccatgacttggggagactcagcaccggcatggttttaagtcatggctttcattgtgaggaggtgaaagtgcaaaatcattaattagcattaaagattattaaataggccgtttattgagggtgatactaccctgccaaccctggccagggggtatgggggggcggaatgagggggtttagcccaatggcactggtggccccagggacatggccggttagctaggattattagtttttaaatttagttaattggttctattcagtttgattaatgtttgcgccggcctttctcataactgccggagtaccgctggggtacagtaaaagggtcaaagcggagaggatatccaagcaccacatttcaattggcgagtcattaccaactgccgggggcaaggggccagtctgcaaagaggggatccatttactaaacaaaacgcccggccaggtttgaccctgaccgggagattaagaaacgctttttaacgcggcgtgtacgcatggcgcacagaggcacggtttgcgttatctaactttgtcttgattccaatttagacttgtgagacatatcatcttaattctatgagtggcaaggataaaattctcacgcaaacacaactgacccccgcagatttgcaattcgcctttgacgtcggccacagttccatcgggtgggcggttttgcaaacggccatcccgggtgcctccccttcaggaaatctttcgatcaacatccttggctgcggggtggtgacatttcgggcggatgattgtctggccagtgcgcggcgcgggtaccggcgccagcggcggcacattcgcagcacccggcagcgcatcgcccgtatgaaaactttgctggcacatctgggcgtcttgaggcagcaagaactggatttgcccggctgtgcctggccctggttactggccgcccgggtgttgcgtggcggcaagttgctggcctggcgggaactctgggatgtgttgcgctggtatgcccataatcgcggttatgatggtaatcgccgctggagcgcggtggaggccgaagccgaggcggaggataccgaaaagctggagaatgcccgcaatttgatgaaccagtatcgcgtggccacgatggcggaaactttttgcgccatttccgggctggatccgctaggcagcaagaaatcctgccacctgccgggcgacaagcgccccaagggtcaaaatgccgcatttccaagggcggcggtggaaaacgaagttcggcgtatcctccgcgcgcactttggcaagctagctcaggtggatgaattgctggaacgcatcttgattgggcgcgacaatcaggatgccactgcctggcaggccataccttgtcccggtttgaaattgcccaggcgttatcaaggtgctttgctgtttggccaattggtgccacgatttgacaaccgcattatttccaagtgcccgatcagtggagaaaaagtaccatcgcgaaattgtccggaattccttaatttccgatggggaatgcaactggcaaacatccgggtggcccggttcggggaaaaggacttatccccattgaccgcccaagaaaggcaacagctcgaccaactcatgcgacagcaaggcggcatgggagcgggggaatttaaaaagcaagtgcgccagattacgagtgccattcgggacaatttggaaaccatgctcctgcatcccgatgcgcaagaggcactattgcttgatccggtccaaaagctggcaatgtccgccgatttgaaatccttctggccgttgctgcccgaaccagtgaagcagcgaacccggggccagtggcggcgcggcaagagcattaccctcgccaaatggcgcggccagcttggcacagagaccacggcattcgatgccgaagtgacgcggcaactggacctagtaaataccaagggacgcaagaaggacaagcaaagctcccgcgaggacttactcaacaagccgtattttattcgtaaattaccccagcgcgcggcctacgcccggcacatcctcaaaactgcctttgaagaagtcatggcgggcaagcatcccaaggaagagggcggcgttctgtttatcaccgaccaaatgcggcaggcccagttgcagaaagatattgcccagcaaaccaacaatcatttggtgcggcatcgcctgttgattctggaacgtttgttgcgcgacatgatcaaggaatatgccgacggggataaatcccggattgcccggctcaccattgaggtgaatcgcgatttgcgcgatatgtcgggaaaaactgccaaggaaaaggcccaagatatggggttgcgcattgccaaccatcaccatgtggaggcggccttggaaaaggacgaatccttgatgaaggttcttcggcaacagggaacccatatctcagccggattaattcgtaaagcgcgggtggcggacgaccttggctggatgtgcccttatacgagtcagcgatttgaacccatagacctggtaaccaggcacgttgataaagaccatattgtcccccgttccgaaagggcatccgatgcattggattcattggtgataactttttcggccgtaaacaaatggaaaggcaagcgcacggcatggcaatttgtgagcgacgagcaaggcaagccggttcctgatttgcccaatctctcaattctgagcattacgcgctacaaacaattggtcgaaggcttggaatctttcaaagggcatgatgatgacaagcgccgtaaaaaaaagcggaaagacttgctgctgttgcccaattacgaagagaaagactttacgccgcgtgatttgaccaccacatcgcaactcgtgcgactgggggccctggccttacgtaaggaatttatcggtctcgaaaaccaaccagtcatcgtctcgctaccaggctcggttacggggacggttcgcaaagcgtggaaattgctgggctgcctcagcctggccaatccgcaagtgcttaatgagcagggggaggttaaaaccaaaaccgaaattcgggacatcactcatttgcaccatgccctggatgcctgcgtgctgggactcgcctcacattttataccgaattacggccgggcatgggaactcatcgtgaagcgcaatccgaatgaaggcgaaaagcgcgaattaatggccttgggtatttttggttttggattggaaaaccgatttgaaatgcgcgacttggacaaccggctaaaagaacaaatccgccaacgactggcagaaaaaagggttgtccagcatatcccggccaaaatggaaggcttgcgcgtggagcaaaatagctggcgggtggtggagatccaaaatgataaagtgatattgcggcaacgcatccgccaggctgataattcccggccggtaaaaataactggggaaaagcccgggaaagttttaggcctgcacccggttggaggattaggcaagctctcaataaataaaagtgcgctaataattcctgataattttggggtggcacttgatccgcaacctaccataataccatttcacaaggtttggccgaagttacaggaacttaaaaagttaaaccaaaataaaaaaccacgagtattacgcaatggccagttagtccgggtgccaaatggttcgcgtgcgggtatctggaaagtgctttccacaaagagcaccgaagcctatgggctggcactggatttagcattgcctgatcggatcaagctggaccgtggcaatgcacccattgcaaaattacttgaagatggccttgaaattcttggctccagtttggtgggaataaattccagtggaattgcaattgccgaatcaaaaaagcggcctcgtaagttgaaaattgccgcgacagatgaatcatgtcctaccacatcgtcagcatagattcgccacaatgctcgttgagttgcaaagacggccagttgacctgcaaaacggcggaaggcgaaaggaagctgccgctggaggacgtcgcttccattattatcaccagtttctcggcttccatccatagcaacttgtttttggaggcggccaagcatggggtggcgctgatcatttgcgaatctttcaagccggtcagcctggtgctgccggccaaccggtccaccgacaccctgctctcgcgggccatgctgagcatctcgccccgcgtccgtgcgcacttgtggcaaaagacgattgatgccaaatgcgccaaccaactggcgctggccgagcacattgccccggatgaccgcacggtggcggaattgcggatcaccgcgctgggccgcaagccgcacaaggaggcgatctgcgccaagcttttctggcaaatattcagccgcaccctcaaggacgatgagtttacccgggaccgggccaagggcggtttgaatgattttctcaattacggctatgcggtgctgctctccaccatcctgcaaaagctctttggcatcgggttggaccccacctttggcattggccacgtggcccgggagcgcagcacaccgctggcctatgatttgatggagccattccgcccgtgtgtggactggcgggtggtgcagtgggtgcggcagcatccggaccggaaagactgggaaatttccaaggaattccggaaatgggtcaccgggtttccgctggagcatgtggattacctggatttgtcgctggaaattcaaggggtgattgagggcgtggtacggggttttcgccgggcggtggtggaaaaccagccgcgctattacaaaccatggacaccgaaaaatacaaaatgggctggctcgtggtgacatttgatctgccggtgggcacgaagaagcagcgcaaagcggcgacggacttccgcaattatttgctggatgacggctatcaaatgatccaattcagcgtttatgcccgggcctgtgtcacctttgcccggcaggaaacgcacattgaccggctcaaaaagcatctcgccccggagggcagcatccgcgccattttcgtgacgcgggcgcaatgggagcgctcctttgtcatccaaggcaccccggccacggaggcggaagccgaggatatgcccgagcaaatccagctctggtgaccctgctttttgcccacaaagggcgcaaaatcagcggcttacgccctccgagtttgcaccccccgtatttggaatcaaggcaaagccgcaccatcaccatcacgcccgacgtggtcagtttgcaccccccgtatttggaatcaaggcaaagcaacagcttcaaacgatgggtgattaattccagtttgcaccccccgtatttggaatcaaggcaaagcattgcggtgcgtttggtaatcaagcaatcgagcttgcaccccccgtatttggaatcaaggcaaagcatccaccgtgcgatggtccgtggtgccattagtttgcacccc

SEQ ID NO: 3582 - DNA, 10062 bp, synthetic construct
  misc_feature 1..10062: note = Synthetic
  source 1..10062: mol_type = other DNA
cagtgcgcccagcttgttggaaagcgccatgagcatcaccccgcgcatccgcgcctgaagattctcctcggtcacatcctcgggccttccggcgaacaccggccgcagttgtgcgttgaccgactcgacgggttcctcgatgggaatgacctcgtgacggatgcccagattctgcgccaaggcacgggcgtcttcaatgctgcccggcgaggaaaacttcgagggcagcaaaacgcccagcacgttctcacgccccaacgcctcaacggccagcacggcggtgagcgcggaatcgatgccgccactcaggcccagcaccgccgagccaaacccacacttgtgcaggtagtcgcgcaggcccagcacgagcgcacgaaaaagctgctcctcgtcgcaggattcctctgcagaaatccccgctggcgagtcggtctccacgacgagaaagtcctcggcaaacgacttgccctgcgccacgaggccgccgctggcattgaacatcaggctggtgccgtcaaacaccagctcgtcgttgccacccaccagattgcaatagagcagaggacgggcagccttcgccgccatgctggagagcatttgctcacgcgtcctctccttgcccaaatgccagggcgatgcagaaatgttcagcagcaggtctgcaccagcctgcaccagttcagcggcgggattgcggcgatagcgccggtcgcgccagaagccttcgtcgttccagaagtcctcacaaattcccagccccagcttgcgcccgccaaattccacgggcgcgttggactcggccggctcgaagtaccgatcctcgtcgaacacatcgtaggtgggcaggagcgatttggtccgcgtggcctgcacacggcccgattgcagcagtgccagggcattggtgacagcgcggccgggcccacggtcggcacggcccacgaaacccacgaccagcccggttgcgcccgtggcgcaagccagcctgtccctcgcggccagattggcatccacaaacccgcgactcagcagcaaatcgcggggcggatagccggtgatggccagctcgggcaccagcaccagctgcgcgccctctgccgctccgcgccggtaggcctccagaaccttggcctcattgccggccacgtcacccaccgtggtgttgatctgggccagggcaatcctcattccttgccaaagaacacgtcgtccagcgcgccaccttcggcgcgaaggacatcgccgacttgaatgttctggttgcgaaaccagccctggggcacctccagcgcgtatttcacgaggtcggtggaagactccacgggtttctcgttgagcggctccagatcgtgaatgtcaagaatccggccgctgctgccgacgtaggcgatggacagcggcacggtggtgttcttcatgtaaaacccctgcttgctgggtttgagaaagacaaagagcatcccctcgcctgcggggagctccttgcgaaacatcatgccgcagcgtcgctggtgctcgcgcacggcgatttcggccatgacgaacttcgtgcccgacttgccgatgaagagtttcatcaccggcaggcgggcctgcgcggcggtgatgtcatcggctcccgccccctcctccggctccacggcatgtgccgggagggtgccgttggcattgcctgtgggaggggccgccggcttgcgcggcagcggctggttgccacacgccagcagatggagcgccacaactgacgccatgagcccgtcccatttcatgggggcaagtttgcggcaaggccctggccttggcaaacattcccatgctgcgaacaacttcccaatggctgtggacttcattcactcgacgcaggggggcccccacttagactgccatcgtgattgccgcttctcgccgccagttcctggcccgctcggcggcggtgggtgccgccgccgcatggtcgctgggcgcagaggagttgccgctgctgcaccatctggtgcgccgcggcgaaaccctctcgggcattgcgcgcatgtacggcgcctccatccgggaactgaaggtttggaacgggctggtgggcgatctcattcttcccggacaacggctggagttgcggccgcaataccggctgctgcccctcgcggacattgttccaccgaagtttgaagccgacagatggcgccatctcatcctccatcacagcgccacgaccgcgggttccgcgagggttttccatgatttccatctcgcccgggggatggagaacgggctggcctatcactttgtcgtgggcaacggcagccactccagggacggcgaggtggaggtgggccggcgctggacgctccagttaaacggcggccatgtcggcaacgacgcctacaacgccaactccatcggcatctgtctggtgggcaactttgaaaggacgcacccttcggacaagcagcttggcgcgctcgtggagcttctggactacctcaagaacaagacgctgcgcggccgcgcccggctgctcttgcaccgcgatcttgaacagacgctctgccccggcaggcacttccccgccgggcgctttcgcgaattgttcggctgagaaaaagggggcgtcctttcccccgggggcttcagggcgtctttgagggtgccgtctggagcgccgatttggtgctaatggtgaggtcgagcttgccgggcagttcattccccgcgacttcgaatgtcatgtcgcctgtgatgcgcacgctggattcaatctcaagaaacacgcccagttcgcggtcaaagagcagcttggtttttgagccggccactttgagttcgctgttcttgagcttcagcggcaggggcgagtttgcgtccaattcataatccacgctcgtcgccttggcctcgatgacatccaactcccggccctccctgcgcaccgcgcccttgtattcgtactccatctggaagcgcatcatctgcccgccgcccaagtccatcgcttccttgcgcacccacgtatcgcccttgttcatggccttgtcggggaggatgcgcgcgatttgttcgacgtcgcgcttggccttggcgggcgacaagtcgggcttcactttggggtccaatccctcaaaggcgcggcggtcagattccacctctttgagcgcaccgtccttgtcatacacccgcgtggtggacgccttgagcgtggcccgcatgacatccaacaggggctccaactcgggcatcggcgccttggtgttggggttggctgagtcgaactcaacttggattccgccggggaggctgatcctggcgttgagcttcttcacctcgtcgcggatgcgaagcgaaccgtcattctcgcgcttgccggcggacgactgcgtcagcctcgactgcaccgacttggtgtcgatggccatgcccgcgagggtgagcgtctgctgcacggtgatttccgtggctaccgcgtgggtggtttccgggggatgcttgagttccagcgtgacctggccgcgcgccagagtcaggccgcacacgagcgccaacaacgccaggaaccgggcatgggtcttcatgtgtgcagcctacacccccggcgcgacgccgcgcaagcccatgtgctggctccacaagaaacaaacccggccgggtctgctaagaaaacccggccgggttttttaaaagaaacgcttttgaaccggtgtccgcgcatggcgcggagagagaacggtctgcgcctctaactttgtcttgattccaagggcgatgttgccacatcttgtttaatccaatcaagggaaattatttatggcccaaactccgcccattgccgatctgcagctcgccttcgacgtcggccacagctcgcttggctgggccgtgctccaaacctccgctccagatcgcggattgctgccccgcgcccccgacttgctcggctgcggtgccgtcaccttcggcgccgatgactgtctcgccagcaagcgccgcctctaccgccgccagcgccgccacgcccgcgccacccggcaacgcatcgagcgtctggagaaactcctcgcgcacctcggcgtcctctccgccgatcaacttaccgctaaacaccaacaagccggcggccacgccgccccgtggttcctcgccgcccgcgtgctggccagcaatggcgaggcgaagcacctgctcacctggcccgaactctgggacgtgctccgctggtatgcccacaaccgcggttacgacggcaacaaacgctggagcgccgccgaggccgacagcgaggctgcgaaggaggattccgagaaggaacagaacgcgcgcggcctcatggagaagttcgccacgaactcgatggccgagaccttctgcaaacacctcggcctcgaccccttgggcggcaggcaagcctcggcgattcgttttaagaatctcaacgccgcctttccccgcgaaggcgtggaggcggaggtgcgccgccttctgcacgcccacttcggcaaactgcccaaggtggaccgccagttcgagcaggcgctctttgacaagtgggaggccatcccctgccccgccatcaagctcccgaagcgtttccaaggcggcctgctcttcggccagctcgtcccgcgctttgataaccgcatcatttccaagtgcgtcgtctccgggcagaaagtcccctcgcgcaactgcggggagttcttccgcttccgctgggcgatgcagctcgcgaacatccgcgtgggccaaatgggcaaccgcgaccttcgtcccttgaatgtcgaggagcgcgcaaagctcgacgccctcatgcgcgcccaaggctccctcactcccggtgaacttaaaaaagccgtccgcgacctcaccggttccgcgcgggacaatctcgacaccatgctcatgcacccggacgccaaggaggccctgctgcttgaccccgcgcaaaagctcgtcacctccgacaagctcaagacgctctggcccctgcttccgctgcgcatccagaagcgcgcccgtggccaatggcggcgatacaagaccctcacgctggagaagctccgcgcccaagccgctcagctcggcgagtcagtggacgccttcgacgccgaggtgcaacgcctgctcgattcgggcaacaccaagaaaagccgcaagcaaggccaacccacccgcgagtctttgctcaaagagccgctgaagattgagcgcctttccggtcgcgccgcgtttgcccggcacctcttgcagcaagcccatgtcgaagtcatggccggcaaacatcccaaggaggaaggcggctgcctcttcatcaccgaacagatgcgcgccaagcaactgctccgcagccttgatgatcaaacgaacaaccacctcgtccgccaccgcctgctcattctccaaagacttcttcgcgacctcgtggcagaccccgccttcgccaacggggacaaggcccgcgtcgcccaagtcaccatcgaggtcaaccgcgacctgcgcgagatgtccggcaagaccgccaaggccattgcgcaggacctcggcctgcgcctgagcaatcacaagcacgtctccgccaagctcgaagaagccttcgagggcaggaacgtccccatgaccgccggcctcatccgcaaggcgcgcatcgccgacgacctcggctggacctgcccctacaccggccagtcctacgacgccttcgacctcatcacgcgcaaggtggacaaggaccacgtcatcccgcgctcgcagcgtcccgccgacggattggattcactcgtcatcaccttctcggaagtcaaccggatgaaaggccagcgcacggcctttcagttcatccaggagttcgagggccagccggtcgagggattggcgaacctctccctcgtcacgctcaagcgcttcaaagaaggcgtggaagccctggagtcatggaagggccacgacgacgacaagcggcgcaagaaaaagcgcaaggaactcctgctcctgcccagctatgaggaaaagggcttcaccccgcgcgacctcaccgtcacctcgcagttggtccgcctcggcgcgcaggtgatccggggatacttcacggatggagcgcgggttaacaacccgcgggaggcaaccgccagcctcaccgacagcgggctaagtaaccctgactccgggccgcgcatcatctcgctgcccggtgccgtcaccggcgcggtgcgcaagggctggcgcgtcctgggctgcctcgcgcaggccgccccgcagattctcgacgagaacggcgaccccaaaaccaagaccgacatccgcagcctcacgcatctgcaccacgcgctggatgcctgcgtgctcggcctcgccgcgcactacctgcccaacaacggcgcgctctgggaggcaatggtggtgcgcaaccccagcctccagcagaagcagctcctttacgccaccggcttctatgagttcgacaaggacgacaagccgcagttcaaggagctgccgggcgaactcaagaaccagattgccgcccgcctcgccgagaaacgcgtggtgcagcacatccccgcggacatgagcgggatgaaggcggaggagaacacgcgcggcgtggtgaaggtggagaagggccgcgtctacctgcgccagcgcacgcgcgacgccaagaccggcaaactctccgtcaaggaaacggacgaagtcatcggcaaagtggtcggtttggagccacgcaacagctccggcaagctcacgccgatgaagggcgtgcgtgtcatcgcggacaacttcggcgtcgccatcctcgaccatgccgcgaacccggacgacaagttcatcatcctcccgtggcacaaggtctggcatcgcatctcggagctgaaggagaagaacggcgggcagcggccacgcgtgctgcgcatcggcaatgtcatccgcgtgccgaacaagtcagggcgcagcgactatcgcggcttgtggatggtgcgaggagtgaagaatgttcaactagccggtttgcaattggacatcagcggagccgacgtgattgattactcaccggcgggccgccctgattgcaaacgcaacgtcagcctcaaatccctcgtcgaaggcggtctcgaaatcctcaagcccaccctctgcggcgtggctcagaccgccccggtggcggggccggcatgacttttccgtgattgcgttttgttcttccaaggattggttgccgccaagtccggttccgatgacttcctgactgaatccaaacagttttagggcgttacccaagacttatagggcgttaccaaagacttcttggacgccacctaacggtgcctggccgttacccagcctgggtaacgcccgcgacttgaacagaaccgcgcaaggattgaaccaaatcgggcaagacttgaaccaaaccactcaggatgctacccgaacggcgcgtcgccttgtcaggttgcgcttgcggacaggccggaacagtcacggtttttataggaacgcaaaaaaagtgtagtggcgcaagattcccccttgcggaatcgccaaacgggcgttccttgtccactaacaagccacgaaagctttccatgcgccctcctggacgcgcctttttcgcgtttgcaagacatcggcgtggacggattccaggggtggggccggccgccttgggtgaggcggcctgagaagggatgccatgcgtggcggattcagcaacgcaaccaaacctatgagtgaatactgggaggaaatctatcatcgcggccagcaatccatcggcgtctggaacacgttcgcgcccgcgttcgtttttggcgaggtgacgccggccagccacaccacggatgtgaacggcctgcaaaccaaggccaacgaacgggatgtgcagcaggatgtgctggacgtggcgcgcctgaaccgggacgcaaacctcaagttcatggaggacttgtgcgtgcgtttcccgcgcaagctggagggggaactcgcggccgccgacccgctgcatgccgagatcaccgacctgcgggccatcatccccgacacgtcggacaagatcgtgcagcgcacccggcggacggtctccctgtggaaccgcatcaacgcgcaacgcgcggcggccctcccgcccctgccggagtttcaggtgggcaccggcgtcgtcgcgcaactggacacggcgttgagcggccagaacacgctcatgcagggtgtggagaacgagcggggcaaatacacccagaagagcgaggcactgcgcacgctggccaccaaggtgggcgtgaacaacaagcgctggttcgccgcttgggagggcgagttcgcgcccggctcgccggagcgcgccgccctctcgcagattgacacgggttcgtccacgccgctgccgaccgcgctggagattgccacggccacggtggtcccgcccgacggtgtcgcggtggtgtatctgcccggcggcggcaaccacgccacgagcttcaggctgctgtggaagatcgagggcgtggacgcggacttcgtccatgaggccgtgctgaacctcgcgggccagacggtcactgtggcgggcgccgccgggaagaccgtgagcttcaaggcccgcgccaccaacagcgccggcagcgtggacggcgcggtgaaggcggtggtgatgccctgaaaatccggcgcgaaggggggcgcgcgccactcgccacccttcacgccttccggcatgagctaccacatcgtcaacattgattcgccggactgctttttgagctgccgcgacggccagctcacctgcaggacggcggcaggggagaaaaagctgccgctggaggacgtggcgagcatcctcatcacgagctggtcggcttgcgtgcattcgagcctgctggtgcaggcggcacggcacggggtggcgctcatcctctgcgaggcgttcaagcccgtgtcgctcatgctgccggccatgcgctccaccgacacgctgctctcccgcgcccagctcaggctctccaagcggctgcgcgacgccctttggcagaagaccgtggacgccaaatgcgccaatcaatgccaggtggccgggcgcatggcgccgggccatccgggccttgcggcgctggaggccgccgcggcgggatcccaccccgccagggaggccgccacggccagggccttctggcgcgtcatggccggcgcgctgggccagcaatccttcacccgcacgcgcgggggcggaggcttgaacgacctgctcaactatggctacgcggtgctgctctcttgcgtcctgcagaaactctacgccctgggcatggaccccacctggggcattgcgcacgcgccccgcgagcgcgccgcgccgctggcctatgacctcatggagcccttccgcccgtgcgtggactggcgcgtgtaccagtgggtgcgcgagcaccccggggagctcgccgtcacggcggagtaccggcggtggatcacgggcctgaccacccaacgggtgccatacgcgccgcgcgcgatgcaggcccagctcgtcatcgaggcggtgctgcgcagtttccgccgggcgttgatggaggccagcgcgcccgcctacaggccatggacactgaaaggtacaaaatgggctggctgatggtggccttcgacctgccggtgggcaccaaaatgcagcgcaaggcggcgcatgatttccgtgggttcctgctggacgacggctaccggatgatccagtacagcgtctatgcccggccttgtgtgagctttgcgcgccagcagacccacctggagcgcgtcaaggcaatggtcccggcggaaggcagtgtgcgcgccatctttgtcacgcgcgcccagtgggagcgcagctacgtgatccatggcgtcccggcctgccaggttgatgcccagacaatgcccgatcagttgcagttctggtagggcacgaggcatagaggcctcaggatcaaaaaaaaagtaacggcggatcacccaccctattgggtgagtgattccgccgatccaatcttgccctaggcgctcacttgcagccgcttgcggcctgctattgtgcccgcccctgttttggaatca

SEQ ID NO: 3583 - DNA, 9088 bp, synthetic construct
  source 1..9088: mol_type = other DNA
  misc_feature 1..9088: note = Synthetic
ttcccacggcctgttgattgacattcaacgggccatgatgcgcgcggcggcccgggtcatcatgtgcctggaccataccaagtttggccggcgttcggtgtcgcctttgtgcgacctcgcctccattcataccatcgtgaccgatgatcaatccccgccggaattggtcgcgcaactccgcgcccgtgggctcgaagtgatcattgcgcccccggcggcttcggattaaagcgcagcccgaaatcatgccggcgctgagctgaatcggcggaggggaaatcaaccggattggcccggccctaaaccggcgtttcagaaagcgaacaaatccaatcgccttgacgactcccctcccgctccggagaaaagcctgtgcgggggctgatcgtcagtcgaagctcaacccgagggtttgtcccacagtccggagatgttgggcagcggcggcgtattcctcggcggttgacagatgttcgagcatgagcggcgggttttgcggcagttgcgcgagccggcgcaggaacgttgcgtaatccagcgagcccaatcccggccgcacctcgcggaaatgcacgttcatttcaatctcccaccgcaggtctttcgcatgacaactcacgatccactggcccagtttgtcgaagcactcgttcagcaggtccgtgttgcgataaaacttctcgggagaattgatgagattgcagggatccagatgcacggcaaacgccttgcggtccacggcgcgcaacagcttgagataattatccggggtgtgcggcatggcccagcccatcatctcgtaacaaaacttcgcccgccgcggctggacagcgtcaatgatcttccgcgcgttctccaccgcggcgtcaaagaatttcggcgtgaaattatccggatgcggaccgaaccacgaggtgggatgaaatgaacccgcgatgtccacgcaacaacacgcgccaatggcctctgccaacgccaggccttcggtaacggtttgccggttttgccggcgcttctccggatcggcatcgagcaaattcacccagcgcccaacttcagcgataaccacctcgtgccgggtaaaagccgcggcatacgccgcaatgcggtcggtatcgtgcagcggcacattcgggcaatacgccgcccgatagccgagctgccgatgcgcgcgggccaatgcctccggatcttccgtcttaagaaaacaggggcctccgagacgcaatgcctgggacgggcttgattgcggagcggacggaagccggtgggtcgcggaccacaccgaaccagcaacggccagacccgcggaccggcgcagaaaatcacggcgcgaggtttgcatgaccgggttgtcgcatcctccggcgccgctggcaatgccgaaatagccgcgcggcctcgtggcgccgggcgatccctcaatccccgcaaccgcgcggcttgagaaatttttgtgtccgccgactgcgcgcggtcttatggcaatccgcgcaacgccagcgtgcgccagatcaatccgggattgttggtgatgatcccatccacccccatgtcgagcagggcgttggccgtctcggcatcgtcaatcgtataaacccagaccttcatgccgcgctgatgcgccagggccacggcggctttggagacattgcggttccagccggccaccttggctccggttttctccagttcatccagccacgtcgcgttgagccccttgtccttgatggtcggctggctgccgtccgccaggcgacccggcgcgcccaacccgcccaggacctgttcgggcgctagttcatggagttgacggaggaactgccagtcaaacgcctgcaccaccacctgattgatcaaccggcgcgcgcgtaactgcttgaccagcgtggcaggatcgccctctttccgctcaatgagcgtcatgccaccgccgccttgaatcacgtccagcgattcctccaaggacggcaaccgggtgcccgcgtagatcgggctgaaccatttgccggcatccagactcaacaactccgccgccgtgtgcgcgtgcggccgctggcctttgccccagcgggcaaccgcgtcggtcgtgcgatccaacgtcgaatcatggagaatcacgggcaccccgtcctggctgtggtagtaatccagttcgatcaaatccgccccggtcgtgagggccagtcgaaacgccggcaccgtgttttcgggcgcggcaattgaatagccccggtgggcgataaccagcggacgcgggctttggacccggtcaaccgcggattccttgacagattgagcggcccctgacatgcagaaaaattggctgtaaccgaccagcaacacaatcggaagaataacacgtttcataccggccaaactggcgtcatcgaaaaacgcgggcaagcccaaacctgaaataattgatccgctgcacattttctttcgatgacgaatcgcaccgccgacagccttctctcccgcggcgtacggcggccaccgagttctccgcgcgtggcataccgatctatgaatattacaaaaaacagtctggtttttcggccaaacatttgataaacagcccgagcagcgaaccgctggagacaacacaatgaatcggatcgaccaaggcaaagccatccgggttgaaatcgcgaacggtatcaccgccagactgcaacttctgcccgacaagccgggaaaacgtgggctcgcccccacactatctccaagcgacggaaacaccagatttgccccccggcggctattgatcaaaggcaacatcgagagatcccgacatatcatcgcagtgagtgagtgcgcatcccgctggcctcagccacctcaaggcaagccgtttgtagtttgggaatcattcctccaccgcagccaaaaccgatacatccgagctcgctcaaccgcaccccgcgccattatgaaaccccgcataatccgaaatacgagccaccttctgaaccgcgcaaccgggaatttaaggcatccggaaaaaatcttgggggcagccgtcgcctcagatttttcaaccaaaaaaccaacccggcgaagcggggctccgccgggttgtattaaaaaacgcttttataccggtgtatccgcttggcggatagggagacggtctgcgttatctaactttgtcttgattccaattaagacctcgacattcaaccaaaccacgccatgaaagacaagcaaaaaaatacgctttcccaaaccgccgatttggaactcgctttcgatgtcggccatagctccatcggctgggcagtgctgcagtccgtgtcaccggcacccgcacaaacggaaacaccatccgtcaatcttctcggctgcggcgttgtgacctttggcgcaaatgactgtctcgcctcgcaccggcgggcctttcggcggcaacgccggcacatccgctcaaccaggcaacgcatcgcccgaataaaaatcctactcaaacaacttggcgtcttggatgaagcgaccttgaaccagccggggtgtgcttggccttggcggttggccgctcaggttttacagggcgggaagcggctcacttgggcggagctttgggatgtgctgcgctggtatgcgcataatcgtggctatgatgcgaaccgacgctggagcgccgccgaagcacaggcgcaacaggaagattccgaaaaagaggccaacgcacgaacgcttatggacaagcaccgcactaaaagcatggcggaaactttttgccgggagcttggcattgatttatccgggaagaaaaaatcttccacgaaacggttcaaaggtttgaaggcggctttcccgcgagaaattgtcgaaaacgaggttcggaagattttacaggcacaccacgacatactgcccggggtggacgggcgtctcgaagaagctctgtttaccaactggcaggccattccctgcccgaatttgaagttgcccaatcgttttcaaggcggcctgcttttcggtcaactcgttccccgttttgacaaccgcattatttcccaatgcccgatcagtggccagaaagtgccctcccggaattctaatgaattcctgaatttccgctgggccatgcaactggccaacgtgcggatcgcccgcttcggggaattaaagctttctcccctcagccctggcgagcgcagagaattggaccagcagatgcgccgcgttggcgccatgactgcggaacaattcaaaaaaacggtccgtaacgtctccaacgcaattcaggacaacctcgatacgatgttgatgcatccagacgccaaggaagccctgacattggatccggtgcaaaaactcgttcgctccacggaactcgcgcccttctgggagttgttgccggaacgtttgcaaagccggctgcgcggtcaatggcggcgtggaaaagtattttccctggcacaaatccgcacccaactggccgggtatggcgatgtcgccgccttcgacactgcggtgcaaaaacaactggaggcccggcatgtaaaatcgaggaaaaaagacaaaccgttaacccgtgaagatttgctcgaacgccaatttccgccccaaccgatcaaactggcgggccgggcggcgttcgcgcgccccctactccaacaggcttacgcagaggttatggatggccagcatccgaaagaaccgggaggctgccttttcctcagtgaagaaatccggcagcggcagttggctcgcgagatcgccgcgcaaaccaacaaccatctggttcgccatcggcttttgattctggagcgcttgctgaacggcatcatcaatgaatatgccggcaaggacaaaacccgtatcggtaaaattaccatcgaagtaaatcgagatctgcgggaaatgtccggtaaaacggcgaaggaaaaagcccaagatttgaaccggcggatcgacaatcatcatgccgttgccgccaaattggagaaagcgtttgctgaggagaatacgcggattcccattaccgccggactcatccgcaaggcgcggattgccgaagatctgggctggaaatgcccctacaccgggcaggattacgaacccagacaattggtcagccgctacgtggataaagatcacattgtcccgcgctcccatcgggcgtcggatgcgttggattcattggtcataactttcagcgcgattaacaagtggaaaagcaatcgtaccgcatgggaattcgtcgaacaggaacagggcaaacccgttcctgatttgccccatctttcgatcatgagcctctctcgctaccggcaattcgtcgaaagcctggaaacctataaaggacgacatgacgacgacaaaaagcgtaagaaacgccgtaaagagctgttgttgttacccaagtatgaggacaaagaattcaccccacgcgacctgacacaaacctcgcaactcgttcgcctgggcgcgcaagtgttaaaacgggcctttgccggacacgaacaaccacccatcattgtttcgttgcccggctcggttaccgccgcagtgcgcaaagcctggaaaatcctcggttgcctcagcctggccaatccacaggtgctggatgaaaacggcgaggtaaaaaacaaaaccgatattcgcggtatcacccacctgcatcatgctctggatgcctgtgcgctcggtctggcctcacattttattcccaatcatgggcgcgtttgggaattgatcgtgaagcgcactgtcaacgatgcggaaaaggaagaattgatggctttgggcatcttcactttcagcgctaatcaccgcttcgaaatgcgcgatctggataaccggctcaaggagcaaatccgccagcgccttgcggaaaagcgcgtcgttcaacacgtcccggcaagaatgggagggctgcgggtggagcaaaatacttggcgggtagtggaagtaaaagcaggcaaggccaggatccaacaacggatccgccaagctgacgagtctcggccgcttaaacaaaccgaagaaaagacaagtaaacttctcggtcttcaacccgggaagctgtccgttaacaaaggcgtcctgatcatccctgacaactacggcgtggcactcgaccccgaaccaacaattatcccttttcacaaagtctgggagcgcctgcgggaattgaaaaaagccaatgggggaaaaaggccaagggtgttgcgaaatgggcaactcgtgaaagtacctcaaggaaaatttatgggaatatggcgggttttttcagtaaaaaacaacacctccggaatagctgttgatttgggttttcccgatgttgtccggttgaaaaacaagatggccggccacaagataaatgtcctgttggcaagcttgcttaagaatggaatgcgggttgttaagccacctcttacgggcgtccccacatggcctaccacctcgtcagcatagactcgccgcaatgcgcagtaggttgcaaagacggccagttgatttgtaaaacggcggaaggcgaacgaaaacttccgctggaagacgtggcttccattatcatcaccagtttctcggcttcgattcacagcgagttatttctgcaagctgccaaacagggcgtggccttgattatttgcgaatcattcaaaccgatcagcctcgtcctccccgcgaatcgttccaccgacacccttctttcccgcgccctgctccgcctcacgccgcgcatccgggcgcatttgtggaaaaaaaccattgacgccaaatgccaaaatcaatttgcgctggccgaacacatcgctccccaagacaaattattgaccaacctccgcgacaccgctttcggaagaaagccgcacaaggaatccctctgcgccaagacgttctggcagatttttggtcgcagcttgaaggacgaaagttttgtccgcgaccgggcgcgtggcgggttgaaccatctgttgaattatgggtatgcggtcttgctctccaccgtactgcaaaaactgctcggggtcggcctggaccccacgtttggcatcgctcacgtcccgcgtgagcgcagcacccctttggcttacgacctcatggaaccattccgcccgtgcgtggaatggcgcgtggtacaatgggtccaacagcatcccgaaaccccaacatgggaggtcaccaaagaatatcgtaaatgggtgactggctttccgctggagcgggtggattacttggatttaacgctggaaatccggggcgtgattgaaggcgtagtgcgtagttttcgcaaagccgtgaccgaaaaccagccacgccattacaaaccgtggacacccaaaaatataaaatgggctggctaatcgtcgcgttcgatctgccggtgggcaccaggaaacagcgcaaggctgccacggacttccgcaatttcttgattgatgacggttatcaaatgatccagttcagcgtatatgcgcgggcgtgcgtctccttcgcgcgccaagaaacgcatatcggacggctcaaaaaaaatcttccgtccgaaggcagcgtacgggcgctactggtgacgcgggctcagtgggagcgctctcatgttattcaaggcgcaccggctgttgaaatgaaacccgaggatttgcccgagcaaatccagctttggtaacaagatgcttcgatcaaccggcgcccgggattcagttgccaaacactgcatccaaatccattgtccggccatttaaggcatcagttcgcggggttgccaacaaggctaaccccggcaaactcagtggtttacgcccactgagtttgccgccctcgtttttggaatcaaggcaaagctggagggtgtcgggccataagttcgcaccgagtttgccgccctcgtttttggaatcaaggcaaagctgttacgattcccgtcccaccacgccttgcagtttgccgccctcgtttttggaatcaaggcaaagccgcgcacgggagcgtccattgaggacttaagtttgccgccctcgtttttggaatcaaggcaaagcgcatcgcgcgacatccgacgcgaggaagaagtttgccgccctcgtttttggaatcaaggcaaagcgtcaaagtcaacaccaacaccatcgccacgagtttgccgccctcgtttttggaatcaaggcaaagccccgcaccttgccgcgacaggcggcggcgagtttgccgccctcgtttttggaatcaaggcaaagcgtggggtggatgctaacgacattgcggttagtttgccgccctcgtttttggaatcaaggcaaagcatgccattcacctttggaaaattgataccaagtttgccgccctcgtttttggaatcaaggcaaagcactcaaattaccattcaatttacaattcctagtttgccgccctcgtttttggaatcaaggcaaagcaaaaaagaccttgaattgaccgcagaacttagtttgccgccctcgtttttggaatcaaggcaaagcaccagcgccggcacggcccaatggcgtcagagtttgccgccctcgtttttggaatcaaggcaaagcaagatagtatatttttgttcataattcatcagtttgccgccctcgtttttggaatcaaggcaaagccgttgcccaaaaaatgcgattggcaggtttagtttgccgccctcgtttttggaatcaaggcaaagcatcaagctcgtcgcgcatgagttcccaaatagtttgccgccctcgtttttggaatcaaggcaaagcccgcgaccttagcggacgcggtgcggcgacagtttgccgccctcgtttttggaatcaaggcaaagctacaccggaatggcgacggcaaccggactgagtttgccgccctcgtttttggaatcaaggcaaagcaaccgggggcgaaccgacaacgcccccacagtttgccgccctcgtttttggaatcaaggcaaagcacctctgctcctccttttcttagccgttacagtttgccgccctcgtttttggaatcaaggcaaagcagggatgaaaaagtcgaagctccattccggagtttgccgccctcgtttttggaatcaaggcaaagccgtcgcccaaaaaatgagactggcaggtttagtttgccg

SEQ ID NO: 3584 - DNA, 8922 bp, synthetic construct
  source 1..8922: mol_type = other DNA
  misc_feature 1..8922: note = Synthetic
  variation 8475..8476: note = note, n is a, c, g, or t
gggattcgaacccccgatacggcttttgaccgtataccggtttagcaaaccagcgccttcagccactcggccatctctccaactgtttattataaacaacttacgttgtttatgaagttcgtgaattgacaatctgatactgatatatgatactgctcgcatgaaagagagacaagcagagcaaaccgccgcaaagcccggcaaggcttggcagcgaacgcagtattcaaatttaatccgttacgttgcatcagacacatatttcgcaagattgcgggtcgctggcaagctcattcgtaaaagtctcgacaccgatgtcatatccgttgccaagctccggctggccgacttggaaaaaacggaacgcgaagcggcggcgtcaaacagccgtggcagccgtggacgaatgacatttggcgactgcgcgaagctttttttggaacaaacggaagccagtaatttgataaaaccaaacagcaagacctaccgcaaagaagcggttgaaagcatccataaatcttggccgggaattgaaacccgcgacgtgcggcaaatcagcgcggcggagtgcgagacttgggcggccaaattaagcggcaattactccccttcccgctataacggcattcttggtgttttccgcaaggtgtttgaaatcgccatccagtccggcgcgctttaccgcaatccggcggagaaagtcaaacgcgcaaaaatccggctgccgcatcttgaattgccggacgccgcaaagttcgatctgtttctaaaggaaattgaaagcgccaacggacgggattcaaaaaaatgcgctgacatggttcgctttttggcctatggcggattccgtctttcagaagcgcaaaacataacgtggaatgattgcgacttcaaaaatgaagaaattgtggttcgcggcgatgccgaaacaggaacaaaaaattggagtgtccgacgtgtgccaatgatactggaaatgcagcagcttttggagcgtttgcagagacagcatccagcggaaaaaaccgattccgttttgcgtgtgaaggaatgtttgcaggcgatgacgcgcgccgccaaagttgtcggcatggcgcggatcactcatcaccatttgcggcatttgttcgccacacgttgcattgaaactggcgtggacattccgactgtctcgcgctggcttggacacaaggacggcggcgcgctcgccatgcgggtttatggtcacttgcgccagcaacattccgtcgcaatggcaaaaaaagttttcttttcaaaaaccgcaacgcaaatatcaaatgaaaaacaagttgctcacgcttgaagaactgaaaaatggcgtgtggtggtggcggcagaagcaattccgaaaagcaaaaactggacgcggcgtgccgggcttaccatttgattattcagatgcaagcggcaaacgtgtcgcccgaaattacgaacttatgcggcgtgatccaaatgggaaaaaattcacaggaaacaaaaactacttggaaataacccgcgacgagcgaacggtggcttatgtcatttggggcacgccgccggaaactgcctatcggtttgctcttgggtcacaaatggcaaatgaacgcggctggacggaaacagacgcccgcatacaatggaatttgaggctcacggatggagcattaacggcacagtttattgaatacataaatgggtggcgtcgcagtcaaaaaattcggccaaaacgttttctaaaggggaaaaagaatcgcggcgtctcttggcgaagcgttgagattttagatcgtcaaataaatggccttggaaagctaaatgcaagtgagcggcacacggcaagcgaagcgcgaaaatctgcggccatcttctttgacgaattccggcgtcagtgtaaaaaatacgccaaaaatgcaaaactagaatctgaatatggaacgatagctaattttggcgatccgcttgattttcttccttgaagacgccattcagtttgagttttttaattaaaattaaatgactcgtggcattaagttaaatgggggtataaatggataggcatgataaacgaaatcatgcccgatcaaaagtcagtcaatgccagccaaaccttgccaaggctggcctatacaatgcaggaaaccgccgacattctcggcgtgtcttacatcacggttcatcggctgcttaaacgcggccttttgaaaagctgctcggcgttacgccacaaacttattccaatgaccgaaatccaaaggtttctgcgcgaaacaatgggcaactaaaaatgcgggattttccacaagtaataatctcaaaccgttatgtcattagaatttagaccagtgaaagaaggccgcgccgtcgccgcatgggtgaaggaattgaagggcaaatccggcgtgtatgtcatccgcgaaccgggcttctttggtgaggtgttgtattgcggcgaatcgcacacgggcagacttaacacaaccttgctccgccactttcaacattggacgggcaaaacagcgggcgcaactttcgccgcaacaaaagtggaagttgcggttgtgcgctgccctgccaaccgcgctcttgatctgcaaaatgccatgatcgcggaatatcgcccaaaacttaacgtcgcagaaaagcccaaaggtttttgggaaagtatttttggcggctgattttcccatctgtggaaaactataaaatatgaatccaaaacaaaccattcccttgatcgcaacaattgcgccggtcgcgccagcaatcgctccttttattccggccttgctggtcggcggcgcaatttttttggtgctaaattttattttttccgacgacgaaaaagaaaataagccggaaaccttggaaacttacgcggaaaatcagcggaaagaaacgcaagccgcacaaaaaattccggccaagcctccaattacttccgttcgttccactccaaaaccatttattccgccggtttccgctgcgcctgtgcctaacattccagtaacgcaagctccgccgcagccggtcaaaaagaaacttgttacgcgggaagacttggcaacggttttccaacgcggcgcaatgacccggacagcggcggttgcggctttgaaaaaaattggtttcggcaaaacggcggcttatgcggcattaacgccggacggaaaattttccgcttggctgcaattcgcaccagacggaataatcacttggacggaatgagccggaaaatcggaaagcagggagtggtcaaaacggtctgatactgctagattggcaacattatgaaacatctgacgcgcgaagaattgttgaaacgcatctggattgacccggaacggtgcggcggcaagccgtgcatccggggacatcgcatctgggtatcgctcattcttgatctgctcgcggcgggcgaatcggcggcggagattcttgaaaattatcccggactggtggaaaatgacattcttgcctgcatcgcttacggctcggaaatgtcgcgcgaacggtatgtggatattccattggaagcgcacgcgtgaaactcaagctggacgaaaacctcggcgagcgcggtcgaaagatgcttgtcgccgccggtcacgacgtttccaccgtgacgttgcaacgtatggagtccgagccggatataacggtgattgaaacttgccgccgcgaaggacgcgcactggtaacgctggatttggattttgcaaatacgctcgattatcgtcccagcgaatacgcgggcatcgccgttttgcgcctgcccaaaaaaaccacggcggaagattttgctcaaactatccagacatttgccaaaggactggagcaaaatccgctcgccggaaaattgtggattgtcgaaaaaggacgcatccgcctttatcagcaaaacgacgaaccttaatgcttttcgcttgattccgccggaatttgccggaataaaatgatttccgccaatttccggcggctaaaatatacaaaattacttgcctgcatttttatgccttgaaataaaaaaaccggctgaattaaattcagccggtttatagacacgctttttaacaggtgtattcgcatggcggatagtgaaccagtttgcgttatctaactttgtcttgattccaatttagacaacctttatttatcaaatccacaccatgagcatcaagggtaaaatttcaaacggcgcagatgccaatctgcaaataagttttgatgtcggccacagctctattggctgggcggttttggaaaaaaccggccagcaggtttccgacataaaaattaacggttgcggcagcgtcgttttccgcgcggatgattgccttgccagttcacgccgcgcgtatcgccgccagcgtcggcatatccgctcgacaaggcagcggatcgcgcggatgaaaattcttttgaagcatcttggcgttttgaccgaaaaagaattggacaagcccggctgcgcgtggccgtggaaattggcggcgcagattttacaaggcggcaaattgctcacatggccggaactttgggacgtgctgcgctggtatgcccataatcgcggttatgatggaaaccgacgctggagcgcagccgaaaatgacgcgcaaagtgaagattccgaaaaagaagaaaatgcgcgctcgctcatgggcaagtatgggacaaaaagcatggcagaaacattttgcgccatttctggaattaaccctctgggcgaaaaaaaatctgcaaatctttccggcgataaacgacccaaaggacaaaacgccgcttttccccgcgaaattgtcgaacttgaagtgcggcaaattttgcaaaagcatttcggcaaattgaaaaatgcggacgagaatcttgagaaagttttgttcaccgattggcaaaccatctcctgccctgatttgaaattgccgaaacgctatgaaggtggattgcttttcggccagcttgttccgcgttttgataatcgcatcatctccacttgcccgattagcggccaaaaagttcctacgcggaattgcacggaatttctgaatttccgctgggcgatgcaattagcgaacatccgcattgcttgcgcgggtgaaaaagaactgcgcccgctcacggcggcggagcggaaaataattgaccaagcggtgagcgaaaaaggcggcgtgactccgtttcaacttaaattgattgtgcgcgagaaaacaaaatgcgtgcgcgatgacttggaacaaatgctgatgctgccagattttgaaaaggctttgctgctcaatccgattcaaaaaatgatttcggcggacgattttcagccatattggaaattattgccagaccgcttgcaaaaacgcctgcgcggaaaatggcggcgcggaaaagttttttcgctggcgcaaatccgcacgcaattggaatcacttggcgatgccagcgcgtttgacgcggaattgcaaagacaactagacgcgcacaacagcaatgcgaaaaagaaagataagcaaataactcgcgagaatttgctacaaaaacattttccgtccaaaccgcttaaattggatgggcgcgcggcgtttgcacggcatttgctcaaacaggcttacgatgaagtcttggcgggcaaagacccgaatggaaaaggcggttgccttttcaggagtgaagaaatccggcagaaagaattgaatcgcgaaatttcggatcaaaccaataatcatcttgtgcgtcatcggctgctgattttggaacgggtgctgaatgacatcatcaaggaatatgcaggcggcaaaaaagatcggatcggcaaaatcacgattgaagtgaaccgcgacttgcgcgagatgtctggcaagacggcaaaagaaaaggcgcaagatttaggattgcgaattgccaatcatcataacgtcgccgaaaaattggaaaaagcatttgcagaagaaggcatcaaacaaacgattacagccggactgattcgcaaagcgcgcatcgcagaagatttaggctggcactgtccttacaccggcatccaatacgaaccaaaagatttaataacgcggcgcgtggacaaagatcacattgtgccgcgttcggaacgcgcttccgattcacttgattctttggttgtcacattttcggcaatcaataaatggaaaaacaaacgcacggcttggcaatttgtcacagacgaacaaggcaagaccgttcctgatttgccgaatctttcgataatgagcctggcgcgctacaaacaatttgtcgaaagtctggaatcttacaaaggccacgatgacgacaaacgccggaagaaaaagcgcaaggaattgatgttgcttccgaaatacgaagaaaaagaattcatgccgcgtgacttgacgcagacttcgcagcttgtgcggcttggcgcgcaagttttgaaaaaaaatctgccgcacttgacgacgggcgacgttacttccctgcccggctctgtcaccggcacggttcgcaagggctggaaattagaagcctgtcttggccttgccaatccacaggtgtttgacggaaacggcggcgcaaaaactaaaactgaaatccgtgacatcacccatttgcatcatgcgcttgatgcttgtgtgcttggcatcgcagcaaattattttcagaatcaaaaactcggcgcgtcgagtctttgggaattgcttattaagcgaaaatacaatgagcaggagaaaactattttacgcgcacttggcatattccaattcgacaaagaaggaaacagccagatcaaagagttgccaaaagagattagagaacaaattcgtcaacggcttgctgaaaaaagagtcgtgcaacatattccggcgcgaatggacggcttgcgcgtggagcaaaacacttggcgcgtcgtggcagtgaaggacggtgaagtaattttgaagcaacgcatccggcagccagacggcacgcgcccggaaaaaattgccgaggaaaagccggggaaacttttgggattaaacccgacaaacggcaatggcaaactcgccgcgaacaaaggcgcgctggtgattcccgataatttcggcgtggcacttgatccacagccaatcgttattccgtttcacaaagtctggacgcgattgcaggaattaaaaaaggcgaacgctggcaaactgccgcgcgtattgcgtaacggacaattgattcgcgtcaaagacggaacttacaaaggcgtttggcgtgtgttctccgcaaaaaacaatgcgactggcatggcattggacatcggttcacctgatgttgtgcggctaaaaaataaaaccgaaggccacaaaattaacgtgcttctttcttcactgattaagggcggacttgagccaattcagtcgtcttttactggaattacttcaaaataaagcggagggtgcaaacgcactctccgcttttggaatcaggcaaagctcaaatacgttcattgcttaaacagccatgagccaatttgatcgcttgacacttactgctcaaatactataattttcacatgaaagcaatagttttcggcttccaagcgcagaaaacactctctgcatttggtttagattgccgcgtcatggacagctttgagcaatttgtgactgcattagaatatatttctcgcacatcgtcaaaacactttgaaattctcgcgcttcaaattgaagccttgcaaattgtttttgatttggagattgattcaacgaaaatcctagtttctcaagttcgggtcattggcgatggttgctgattgcattttttgattgatttgccaggaataacaatccttcatttactttccaacatgagggcaaaactgtgtcctaccacattgtttccatagactcgccgcaatgctcgttgagttgcaaagacggccagttgacttgtaaaacagcggaaggcgaacgcaaacttccgctggaagatgtcgcatccattatcatcaccagtttttcggcgtccattcacagcgaactttttttggaagcggccaaacacggcgtcgcgctcatcatttgtgaatcgttcaagccggtcagccttgtgcttccggcaaatcggtctacggacacgattctttcccgcgcgatgctcaatctcacgccacgcgcccgcgcgcacttgtggcaaaagacggttgacgccaagtgtcaaaaccagttcgcgctcgcggagcatatagcgccgcaagacaaagggctggcggctttgcgggaatcggcttttgggaaaaagccgcacaaggaagcgatttgcgccaaaatgttctggcagattttcggcaggacgttgaacgatgaagattttatccgcgaacgcggacgcggcggcttgaatcattttttgaattatggctacgcggttttgctttcaaccgtcctgcaaaaactttttggcgtcggccttgatccgactttcggaatttcgcacgtcgagcgcgaacgcagcacgccgctnnacgtggactggcgcattgtccaatgggtgaaacaaaatcctgacccgaacaaatgggaagtcacgaaagaatatcgcaaatgggtaactggctttccattggagcgcgtggactatcttgatttgactttggaaattcaaggcgtgattgaaggcgttgtgcgcggctttcgcaaagccgtgattgaaaaccagccgcgccattacaaaccgtggacaccgaaaaatacaaaatgggctggctagtcgtcgcatttgacctgcccgtcggcacgaagaaacagcgcaaggccgcgtctgatttccgcaactatctcattgatgacggctatcagatgatgcaattcagcgtttatgcgcgggcttgtgtttcctttgcacgtcaggaaacgcacattgaccggctcaaaaaacacctgccgccggaaggcagcgtgcgcggcattt

SEQ ID NO: 3585 - DNA, 7838 bp, synthetic construct
  source 1..7838: mol_type = other DNA
  misc_feature 1..7838: note = Synthetic
tacttcactacaatatcctcggacatataccctcaactcaatgagcactacgagcacgtgtttgatgaatgggtcgagggggaggaagtcgactgacaagtggggtgttttcgatttgtttgaagttttgatcattaatcacaacctcaagtgtgaatgaggctgaatcttggaatcttactcgagtcatggattgccaaagttaaagcagtgagggattcagttggtcattgtggccgtatttaattgcaccacaataactacttacaaaattattcccaaattgtagtagacattcgaacgagaaatgaactagcaattaatttctagtgagcgccatggtcttgatccaatgctcaatcttgtaggtcaggatgattgtctcacaaaaaaaaaaccgaccccaaggggccggctttaaaaaacgcttttgttactggtgtatccgcataacggatagggaaacagattgcgtaaactaactttgtcttgattccgggttcagattacaaaaaaaaatatgaacggcaacacaaaaaatactgcgattggttccattaatctatcgttcgatgttggccatgactccattggttgggctgttattgatgtgagtaaagaaacaaagatcctaggctgcgggtcagtgatttttcaggcggatgattgcatggccagccagcggagagattttagacgtgctcgacgaaatatccgcgcgaggcgaaagcgaatagagcggctaaaaatgctgtttgaatttactagccccctcagcaaaaccgaactggacgctagggggagctcatccccttggaagcaagcggctgcagtattgaatgacggtcaacctctatcgtggttcgaactttggaatgtcatcaggtggtatgcacacaaccgaggttatgatggtaatcgcaattgggcgaatgatgaagggggtggtgatgatgatgataccgaaaaactccagaatgcttcagctttgatggagaaatacaagacctcttccatggctgaaactgtttgtgctgtgtccggtatcgatccacttggagcaaaaagctctgcggccatagctcctaaatctcgattcaaaagtttaaacgcagcctttgatcgcaacgtagtccggaatgaggttgagaaaatactgaggtcacacgtgaatattctagagggcctctcggtagaatttattcgttgcttgattggtaatgaccacaaagacgagaacgcttggaaagctatcaaactaccggatttgaagcttcccaaacgctaccatggaagtcttctttttgggcaactgattcctcgcttcgataaccgaatcattactaagtgtccgttgtcaggtgaaaaagtacccacacgacgttcgccggaatttctcaaatacagatgggccatgcaattggcaaatgtgcgcgttcgtgaggctggcgagacttcctttagagcgctcaagactgaggaacgcttggaaatagatagtcaaatgacccaaacgggcttttttaccaagcaaaaatttaagcagttggttaggagcgtttctaactgtgtggatgataatcttgaggcaatgttactgcatcctgacgcggccgaggcactcgtcttggaccccgtaaaaaagtatgccaattcccgcgtccttaaggaactaatccccttactgcctgaaagaaatcagaaattagttttaaaccgctggcgcaaaggcaaggcccagaccatatcgacttggttactcgaactagataaaagcagtaaagaacgggctcttttggaacaagctatttccaaggcggcagagtctgctgataaacgacgagaactaatagataaggaataccattttccacaaaacgctccgggaagagccccatatgcgagaaaaatgctcctcaaagctgcggaggaagtgatgaaaggaatccatcctctagaaaaagaggggtgtctatttgtttccgatgaaatacggcaacgtcaactgaatcttccgcttgcagaaaggacaaataatcacctcattcgacatcgattacttcttttaaagcgacttctccaggatgttgtcgatgagtatgcgaatggcgatagagagcaagtgggcaaggtcaccattgaagtcaatagggagttacgggaattttctggtaagagcgcacaagccatcaagatggacctcgggcttaggttgtccaatcaccgtaagattgcagagaagctaaagaatggattaggccaaacaccaaatgccagtctcatacgcaaggccagagtagctgaagatttgggttgggagtgtccatatactgggcataaatttgacatgcaaactttgacccaaggcggtgtggatcgcgaacacataatcccaaggtctctacgaccaacagatgccctcgacgctctggtcatgacatttcctgaagtcaatagaatgaaggggagacagacggctatgagattcattgaagagcacggaggagaggttgttgagggtgcacctaatttgactattcgcacaccagccgagtttagagcgttcgtcgaaggcttgaagactcgcggaggtcacgccgatgaccaacgccgcaagaaacgccgaagggactggcttttgttgctggactacacagagaaagaatttacgccgggcgatcttaccagaacaagtcagcttgtgcgcttgggggcgagtgttatttcccaatattttgaagagagtaaattacctcctcaaattgtttcaatgcccggatcagttacagggactgtgagaaaaaactggcggttaatagggtgtctatcaaaagccaacaaaggcgtaatcaacgaagatggaagcacgaaaacgaagacggatattcgaaaagtgactcatttgcatcatgctctggacgcctgcgtattggggctctctagccacttcattccaaacaatggtagaatttgggagcttatcgttaaacgcaatcatacgccaattgagaggaaggaactgaccacacttgagatgtttgagtgtgattcctccaatagaattcagatgcgcgatcttccgcttgaattaaaggcgcaattaactaaaaggctagctgaatgtcgagtgaagatgcatataccgtccaaaatgcaaggtatggtagtggagcagaacacttggcgggtgttgaatgtggcaaacggtgaagctaaacttcagcagcgactgcgcaatgatgatggttcattgcccgacaccaaagtaaatatcaaaaaaacgatcaagctgctgggcgtcgaacctgataatggggggaaattaaaaaagttaaaaggtgcacttgtaatcaatgaaaattatggagtcgcgctagatccagagccaagcattatttcttatcataaagtgtggccaaagattgctgagctaaaaagagctaaccagggtcgatatgttcgtgttgtccgaaaaggagttctcataagaattccgagaggtaataacaagggagtatggagggttgtttccataaaaaacacaacccaagctggaattactttggagcttgccaaaccagatggaatcaaaagcgatcgacgcaatagattgacgagccttatcgcctctggactcgagttggtaaactgctccttaacctcggtggatgtttctaatgaagaacattaggtgaatttcatcgggtaaatcgaaagcgcccaaggaaaatgtcctatcatattgtcagcatagatagcccaaaatgttctctgagctgccgtgacggtcaattgatttgtcgctcagagggtggggaggagcgcaagctgccgatggaagacatagcctccattgtgatcaccagcttctctgcaaatatgcattccaacctattgctcgaggctgcgaggttgggtgtttctttagtgatttgcaaggaattcaaacctacaagtctgttactgcccgccaatcggtcgacggataccttactcactcgtgcacaagtagctttacccgaaaagatccgtagcgatttatggaagaaaacggtggatgcaaaatgtcaaaaccaacttgctttggctcgcaaaatagccaccgaaaagcaaagtttgcagaggcttcaagaggttgctgatggaataagccgttccaaggaatcaacggctgcacgtttgttttggggtatttttggccgctccattgggtccccatcattcaggcgccgtaggaatgaagaggggttaaacagtctgctcaattatggatatgcagtattactgagttcagtgttacaaaagattttcggtcttggtatagatccaacatttggcgtggcccattctattcgagagcggtcaacaccgttggcgtatgatttaatggagccatttcgaccttgcgtggactggcgggtttttcaatgggtaaagcagcacaaaccagatccggggcaatgggtggtggatagggattttcgccaatggataagcctcttcatgtcggatgttgtgtcccatatgaatataaaacttgaggtccagaactgcatcgagagtagtattcgaactttccgcaaagctgccatcggccaaaaggcaaatttatacaaaccgtggacactcaaaaattcaagatgggctggttaatggtagcttttgatttgcctgttagtagcaaagatcaaaggaaaacagcctctggattccggaagtttctcctggatgatggatttcaaatgatgcaattcagtgtctacatccgatcatgtgttactttcgcaaggcaacaaacgcacataaacagggttaaagctcacttgccggaagagggtagtgtcagggttatctatatcactcgagcccaatgggaacgatcgcatgtcatccacggtaaaccttcatcggagaaaaaccctgaaagtattccggaacaaattcaattatggtgattaaatattccgtaagtaactttcaatgagttgcctacggatatctatattgctttaaccagttttggaatcaaggcaaagcgtcattgtttgtcgcgcccgtgctacgtgcatattgctttaaccagttttggaatcaaggcaaagctaactttgcaaccgcggcagtgacctttaaatattgctttaaccagttttggaatcaaggcaaagctcctcgcattctggtcctgtaactagtgcatattgctttaaccagttttggaatcaaggcaaagcgatgacttcgcaaaccgcctggatgcgttatattgctttaaccagttttggaatcaaggcaaagcacagttctggtagtgtgaaaacccagcgttatattgctttaaccagttttggaatcaaggcaaagctgcaaacagtgataaatcacctgccctgtaaatattgctttaaccagttttggaatcaaggcaaagcgtctggggatgggtaattgctcgcggtattatattgctttaaccagttttggaatcaaggcaaagcctttagaggataaataaacgaatccctggaatattgctttaaccagttttggaatcaaggcaaagcttgaaaatactccatctgctctgaaccttatattgctttaactagttttggaatcaaggcaaagcttcttgcagcgcccaaccggtcgctttttatattgctttaactagttttggaatcaaggcaaagcagagagtcaggagcagtagaacaggatgcaatattgctttaactagttttggaatcaaggcaaagcctgtgtgtcggatcctttggacattcgcacatattgctttaactagttttggaatcaaggcaaagcaggcgaatggagagcgaacggcgaaagtatatattgctttaaccagttttggaatcaaggcgaatagtggaacactctagctggtcaaactaattcaaaaaccctccatcaaaacaacgaattatagtgggcctcaggatgtgttctaagatggagtaaacttgtccaagcgtagtgcctatccgttgttgttatccgaataaaaccttcgactaagcgccaatcaaggaggctctagaagtaaccttgaggcacaggaggattgtcggagctaataggctggatgtcgcaataaaaccagatatagcccttaaaaccgggtatggtgcgacaaccactcgcgcgcgcggaaataaatttaaaatcatataaaggatggataattttcaataatgtatttggctattttgacagatttttttgcgtctattttaatgtttctgactttgtctgcatgaacagagccgtctctgtaggtaggataatctaaattagcttgccaaaaatcccagatttccacacgcctccaacatgggccctgatttttcgttgacctagaaattgttttaacgcccttttggttcttacttgccatgaaaacaggctttattgcttttttcaattgcttccaagaaacttccagattccatgcaaatatcggacaccgctcccatatttgttcctccaatgagggacgtatcggcatcatatccaaggagcttatttcaaaataactatcgcaatagattgcatcgtctacgtaactctccacatgaacttcaaacagtgcgtgctcaagagtagatgccttgctgggatctcttttgaagagagcttccagggaagggaaagtagactgagattctttttcaactaggatcaaatatcttctggccagctcataatgataggcaaccatggataagtaaaactccccggcaagcttgcgtgcgaattcgcttttttgagttcgccaccaccaaggaaaaagcctcttctcacccaacggccttgtatcttttaccatttcaattgcagagttgttactagatttacgagcgtttgctgaagccatatcatcacagataaagcaccaagcattttaaacaatcctcaagtgtgtcataaatgcgtccctccaaaagttactggaacgttggcgccattactctctgtgcgggagagaattaattactcatgcaaggtggggttaaagcacggcaaaccacttttttgcctctttttgtgacacaacttcgcggtaatttttgtagatcatttccgggctatttcccgcttcccttgaggtggtgttctcgtctgatgtaagagccagccgataggagataaagctatgccgaaaagcattgtcctttttattgacccccgcgcgcaaaaataagctgcgcatctgtttgccaaattcagtcgggctccatggccatatcagaccctctttagggatggggtgggggagcatgcgacgcagggtcggtgtgatatcaatgagacgtcttgaacgtgtttttgccttgtcccttgcgacttccaaatgttcctcggtgacgtcgctccactccaatctctgcagttcagctgcccttattccggtgagcccactcaacgccacacaaactctcaaatcgcctgaggattggtctagaagacgctggaaatcctccggcgaatagattgcgatgctcgtattgttgagatctttttctgacttgaggatgggaaagatgttgctttcggattccaggtaatcatttctgacgcaccattcaaggaaggttctcaagctgccccggtaatggttgcgagtctttgggcctaccttgcgtttggtcgtggggttcctcagggtatcgacccactcacgaagggcagcgcgcgagagctggctgatgttgcactcaaaagcctcgcagattcttcttagcttgagtttctcctggctaaaggctgtctcttatacacatctccgagcccacgagaccgaggctgatctc

SEQ ID NO: 3586 - DNA, 5482 bp, synthetic construct
  misc_feature 1..5482: note = Synthetic
  source 1..5482: mol_type = other DNA
ccagcgtgccctaacccggctgaccctgcggctttggccagattctcccagtggcgggtgagccctcctcacccgccacttttgtcattggctactccggcctgcctggctgccaaatcactggcggcaccatgactgggggcgactcagcaccggcatggtttaaagtcagggctctggctgtgaaggggtaaaagggcaaaatcattaattagcattaaagattattaaataggccgttttttgagggtgatactaccctgccgaccctggccagggggggatgggggggcggaatgagggggtttagcccaatggcactggtggccccagggacatggccggttagctaagattattagtttttaaacttagttaattggttatatccagtttaattaatgttttcgccggcctttctcataactgccggagtaccgctggggtagagtcaaagcgccaaagcggagaggatatccaagcaccacatttcaatcggtgagtcatttccaactgcccgggggcaagggggacagtctgcaaagaggggagccatttactaaacaaaacgcccggccaggtttgaccctgaccgggagattaagaaacgctttttaacgcggcgtgtacgcatggcgcacagaggcacggtctgcgttatctaactttgtcttgattccaatttagacttgtgagacatatcattttaatactatgaatggcaaggataaaaatctggcacaaacacccgaagcccccgcctcctccgccgatttgcaattcgcctttgacgtcggccacagttccatcgggtgggcggttttgcaaacggccatcccgggtgcctccccttcaggaaatctttcgatcaacatccttggctgcggagcggtgacgtttcgggcggatgattgtctggccagtgcgcggcgcgggtaccggcgccagcggcggcacattcgcagtacccggcagcgcatcgcccgtatgaaaactttgctggcacatctgggcgtattgaaacaggaggaactcgacttgcccggttgcgcctggccctggttgctggctgcccgagtgctacggggcggcaagttgctggcctggcaggagctatgggatgtgttgcgctggtatgcccacaatcgcggatatgatggtaatcgccgctggagtgcggtagaggcagaagccgaggcggaagacaccgaaaaactggagaatgcccgaaacttgatgaaccagtatcgggtggccacgatggcggaaactttttgcgccatttccgggctggatccgctaggcagcaagaagtcctgccacctgcccggcgacaaacggcccaaaggacaaaatgccgcctttccccgggcggccgtggaaaacgaagtccgacgcattctccgcgcgcattttggcaagctgccccacgttgatgaattgctagaacgcagcttgattgggcgcgacaatcaggacgccacggcctggcaggccatgccttgtcccggtttgaaattgcccaggcgttatcaaggtgctttgctgtttggccagttggtaccgcgctttgacaaccgcattatttccaagtgcccgatcagtggagaaaaagtgccgtcgcgtaattgcccggaattcctgaatttccgatggggaatgcaactggccaacatccgggtggcgaggtttggggaaaaggatttgtccccattgaccgcccaagaacggcagcaactcgaccaactcatgcgacagcaaggcggcatgggagcgggggaatttaaaaagcaagtgcgccagattacgagtgccattcgggacaatctggaaaccatgctcatgcatcccgatgcgcaagaagcacttttgcttgatccggtccaaaaacttgctttatccgctgatttgaaatccttctggccattgctgccggaggccgtaaggcagcgaacccggggacagtggcggcggggcaaaagcattaccctggccaagtggcgcgagcaactgggtaccgacgtcacggcatttgatgccgaagtgacgcggcaactcgacttggtgaacaccaaggggcgcaaaaaggacaaacaaatatcccgcgagaatttgctcaacaaaccgtattttattcggaaattgccccagcgcgcggcctatgcccggcacattctcaaaaaagcgtttgaagaagtcatggcgggcaagcatcccaaggaagagggcggcgctttgtttatcaccgaccaaatgcggcaggcacagttgcagaaagatattgcccagcaaaccaacaatcatttagtccggcatcgcttattgattctggaacgtttgttgcgagacatgattaaagaatacgctggcggggataaaactcggattgcccggctcaccatcgaggtaaatcgcgacttgcgggagatgtctggaaaaaccgccaaggaaaaggcgatggaacttggttcgcgcattgccaaccaccaccacgtggaggcggccctggagaaggacgagtcattgatgaatgtgctaaggcagcaagggacacacatttctgcgggattaatccgtaaagcgcgggtggcggatgaccttggctggatgtgcccttataccagccagcgattcgaaccgatagacctggttacccggcgcgttgacaaagaccatattgtcccccgttccgaacgcgcatccgattctctggattccctggtcattaccttttcagccgtgaacaaatggaaaggcaagcgcaccgcctggcaatttgtgaccgacgagcaaggcaaaccagttcccgatttgcccaatctctcaattgtgagcatttcgcgctacaaacaactggtcgaaggcttggaaactttcaaagggcatgatgatgacaagcgccgcaaaaaaaagcggaaagacttgctgctgttgcccacttacgaagagaaagactttacgccgcgcgatttgaccacgacatcgcaactggtgcgactgggggccctggccttacgcaaggaatttagcggcctcgaaaaccaaccaatcatcgtctcgctaccaggctcggttacggggacggttcgcaaagcgtggaaattgctgggctgcctcagcctggccaatccgcaggtgctgaatgagcagggggaggttaaaaccaaaaccgaaattcgcgacatcactcatttgcaccatgccctggatgcttgcgtgctgggactcgcctcacattttataccgaataatggccgggcatgggaactcatcgtgaagcgcaatccgaatgaaggcgaaaagcgcgaattaatggccttgggtatttttggttttggattggaaaaccgatttgaaatgcgcgacttggacaaccggctaaaagaacaaatccgccaacgactggcagaaaaaagggttgtccagcatatcccggccaaaatggaaggcttgcgcgtggagcaaaatagctggcgggttgtggcggtccaaaatgataaagtgatattgcggcaacgcatccgtcaggcggataattctcggccggtaaaaacaacggaggaaaagcccgggaaactattggggataaacccagccaatggggatgggaaacttttgaaaaataaagcagcgctggtaatcccagataattacgggatcgcacttgatcctcaaccaacgattattccgtttcataaagtttggccacgtttgcaagaacttaagaaggcaaattttgaaaaatttccacgtgttttgagaaatggccaattgattcttgtaaaagaagggaattataaaggagtttggcgggttttttccgcaaagaacaacgctgcgggaatggccatagatatcggcagacctgatgttgtgcgcttaaaaaataaaactgaagggcataaaattaatgtgctgcttggctccttgcttaaagcgggtatggagcccctaaacccagcactgactggattttttaaaaaatgacatggctctcaaattcaatccagatggttatggcttttgataatcatattaattttgtggtaaaatagtaaatcgccgcttcgtgatactgcttaaataatatttatttgtgtcttaccacatcgtgagcattgatgcgccacaatgctcgttgagttgcaaagacggccagttgacctgcaaaacggcagagggcgaaaagaagctgccgctggaggacgttgcttcgattattatcaccagcttctcggcgtccatccatagcaacttgtttttggaggcggccaagcacggggtggcgctcattatttgtgagtcattcaagccggtgagcctggtgctgccggccaaccgctccacggacaccctgctctcccgggccatgctgagcatcaccccccgggtgcgggcgcacttgtggcaaaagacgattgatgccaagtgcgccaatcaactggcactggccgagcatattgcccccgatgaccggtcggtggcggatttgcggaccaccgcgctgggccgcaagccgcacaaggaggcgatttgcgccaagctgttctggcaaattttcagcaggaccctcaaggacgaggagtttacccgggaccgggcgaaggggggcttgaatgatttcctcaactacggctatgccgtgctgctctccacgatcctgcaaaagctctttggcagcggactagaccccacctatgggattggccatgtggcccgggagcgcagcacaccgctggcgtatgacttgatggaaccgtttcgcccgtgcgtggactggcgggtggtgcagtgggtccggcagcacccggaccgaaaggattgggagatttccaaggaattccgaagatgggtcacgggttttccgctggagcgggtagattatctggacttgtcgctggaaattcagggcgtgattgagggggtggtgcggggttttcgccgggcggtggtggaaaatcaaccgcgccattacaaaccatggacaccgaaaaatacaaaatgggctggctcgttgtgacatttgatttgccggtgggcacgaagaagcagcgtaaagcggcgacggacttccgcaattatttgctggatgatggctaccaaatgatccagttcagtgtttatgcccgggcgtgtgtcaccttcgcccggcaggaaacgcacattgaccggctcaaaaagcatctcgccccggagggcagcatccgcgccatttttgtgacgcgggcacaatgggagcgctcctttgtgatccaaggcaccccggcaacggaggcggaagccgaggatatgcccgagcagatccagctctggtgaaccccgttttgcccacaaggggcacaaaatcaggggcttacgcccaccgagtttgcacccgccgtatttggaatcaaggcaaagcctccaacacacacacaaacaacaacaaacaagtttgcacccgccgtatttggaatcaaggcaaagccatgattcaacattg

SEQ ID NO: 3587 - DNA, 23159 bp, synthetic construct
  variation 15343: note = note, n is a, c, g, or t
  source 1..23159: mol_type = other DNA
  misc_feature 1..23159: note = Synthetic
gtggtatggtctggtcggctggcctatggggtgaagggcggtggaaagcgatgggggcgttaagacgccccctcgtttcctaaggcaatggcatcttcaagggttcgtagtcctgaagttttagcagaaaccaataccgccatattgccagggagatgctcgttattcatcattttggtatgcgcccggggtatatccgcccaacttaggacttctgacatacaagggtcgatccgccgttcgatcatcatgttattggcctgagaggcctgtttcagatgggcaaaatggctaccctgaatacgtttttggcgcatccagacaaaacgggcatcaaaagtaaggttgaaaccggttgtgcccgcgcagaaaacgaccataccaccacgtttcacaacaaagcaggaaacagggaaagtttgctcaccggggtgttcaaacacaaagtcaacatctttgccgcccgtaatttcccaaatggctttcccgaatttacgggtgcgtttcatgtaatcgcggaattcgtccgaattgactttcgggagctgcccccaacaatcaaaatctttacggttcaggacgccccgcgccccaagtgacataacaaagtcacgtttggattcatcagaaatgatcccaatggcattggccccggctgcggcaatcaattggatcgccatggacccaagccccccggaggccccccagaccaaaacattatgacctggacgcaggatatgcgggcgatggccaaacaacatacggtaggctgtggccagtgttagggtgtaacaggcactttcttcccaagtcaggtgttttggccgcggcattaattggcgggactgtacccgacaaaactgtgcgaaggaaccatccggtgtttcataaccccagatccgttgtgatggcgacaacataggatcaccgccattacattcttcgtcatcaccttcatcctgattacagtgaaccacaacttcgtcaccgaccttgaagcgggtgacgcggctaccgactttgtagacgatgccggacgcatcggagccagcgatatggtattcggctttatggacatcaaaaggcgagataggttcccccaatcctgcccaaatgccgttatagttgacacctgcggccataactaacaccaacacttcatcagaatcgatatcaggtgtatcgacaacttcgagctgcatagacttttccggaggtccatggcgttcacggcgaatcgcccatgcatacatttgttttggtacatgtcccaatggggggatctgaccaacctcataaagatctttgtagccaatagtctcagccaaggtttcctgcggtttttcgactgtattttgggtcatgtttgatccttacatacctattcgttctttcgcggcgtccatatttttcggacagggataaatgtgaatgtgctgttgttacgggtagttttttataaaattactcatctaaaactatagtttaagcctttgattttgcggcgcaatatataaattagtctataattgcgtctaatcccttgttctttgcgggttaccattatagcctataaatatattgcatcgcaaaataagttatataatttctttattaatcaatatgacgaaattatataacacttttataaaaatatttgatataaaaaaacaataataatggcaagctgtttttaggtccgatggctttaagtcgacttgtggtttaaaaaagatgcctatgcgctatggagaaggatatgcaggaacgtgatcgcccttggttgtttcggacgtattcggggcattcgtccgccgcggcttccaatagattgtatcgtgccaatctggaaaaaggacaaacgggcttatccgtagcgttcgatctgccaacgcagacgggttatgacagcgatcatgagttaagccggggggaagtcggtaaggtgggtgtgcccatcgcgcatttgggagatatgcgcacgctgtttgaccgtattccattggcagagatgaatacgtctatgacgattaatgccaccgcaccctggttattggctctttatgttgccgccgccgaagaacaaggcgtttcgcgcgaggtattgcagggaaccgtgcaaaatgacctgattaaagaataccttagccgtggtacgtatatttttccgccggaaccaagcctaaagatgattaacgatatcatcagctttacgtatcgtgaaattcctaaatggaatccaaccaatgtgtgctcttatcatctgcaagaggccggggcgacaccggtgcaggaattatcttatgcgttggcgacggctatttctgtattggatgcagtacgggatggcggacaagtccctgcagaagatttccccaaagttgtagggcgtataagtttctttgttaatgcgggtgtccgttttgtgacagaaatttgtaaaatgcgggcttttgttgatctttgggatgaaattacccgcgaacgttacggggtagaaaatcccaaattccgacggttccgttatggggttcaggtaaatagtttaggcctgacggagcagcaaccggaaaataatgtgtaccggatcttaattgaaatgttggccgtggtgttatccaaaaaagcgcgtgcacgtgcagtgcaattgcccgcgtggaatgaagcattaggattgccgcggccgtgggatcagcaatggagtttgcggctgcagcaaatcatggcctatgagacagacttgctggaatatggagatatttttgatggatctatagcgattgaggcgcaggtcgaggccctgaaagcagaggcgagagcagagctggcccatatagatgaaatggggggagctgtggccgctgtggaaaatagctatatgaagcagaaactggttgcgtccaataatcaacgtctacaggcgatcgaagctggtgaacaggtggtgatcggggtgaataaatatacggagacagaaccgtcccccttattgtcggccaacgatgggggcattatgacagtggatcccgccgcagaggcagagcaaatcgaacgattgcagacctggcgcgcagaccgtgatgataaggccgtgcagcaagccattgcaaagctgaaagaggctgctacggaaggacagaatataatggaaccatccatcgcggcagcgaaagcaggggtgacgacaggggaatggggccgtgtcatgcgggatgtctatggtgagtatcgtgcgcctacaggtgtcagcagggcagcaaatatcacaggccgggatcatctaacggcagtgcgtgagcgggttgatcatctttccgccaagctgggccgccgattaaagtttttggtgggtaagccgggcctggacgggcattcgaacggggcggagcaaatcgcggtcacggcccgtgatgcgggcatggaagttgtttacgaaggcattcgtcttaccccggcgcagattgcaaacgcggccctggaggagggggtgcattgtgtgggcctgtcaatattgtcagggtcgcatgtgccgttggtggccgagtttatgtccctgatgaatgaacagggattaagcagcgtgcctgtagttgttgggggtattattccaccagaggatgaaaaattattgctggccgccggggtggcgcgcatctatacgccaaagaatttcgaaatggctaaaattatggatgatatcgtcacgattgttgctgatgcggaagcctgattgtgtccgggcaaaatgcggtgatggagatggcggctacggaaaacgccagtagaattagagccagtgaaacgtcaggcgagatgtcagccggttaatgatttttcgacagcatcatgaaggcgggcggttaggcggcgtcctgtaaggccaccgtgtccttgcatgttttgttcgcggacaaagcgtaaggcccggatgtgggcggcaattatttctatattgtcaaagtcaaattgtgttgtgttgcagctgtaatgatgcaggctatcggcaatcgttgtgattaacgcatacccaaaaccatgtcctgtgctactcagtcctttggcaatgtcggctatactatcaagcgcgtaagcactgcttcgggggttattgtgtgcggcattgagtttgtcggaaataccatccacattattttgcacccagtgcaaatattcatcagccagcttattgatcgttttttccgcttcggcaagagcatccggatagggccgtaaagccgtttttgcaagtccctgactgaactcttcggatgtcgcctcaacatgggtatcagccagttgatcgtttgacttaccagggcggtcatgtgacgtatgatctgtcatatcgtctctctgttgggcgcaattacggtatgtgcaggtgcctttgtcgtttattatcgcagcgtgaagctaacaattacttaagggggggctttatggatattcatcattaccggggcttttgcgtgctgcagctataagggcctgaatatctttaggggtgtgtcccttttcacgtaaagactgtaatgtgatgcccttgtcgcgtttggcgtaacgcttaccctgttcattcaataacaggcggtgatgataataaagcggcgttttcagccctaataaatgctgcagcaggcggtgtaaatgtgcggcatgaaataaatcatcgccccgcacgacatgagtaatattctgttggtggtcgtctacggtgcaggatagatggtagctggtcggtgtctctttgcgggccagtacgacatcgcccattatcgcgggttgggccttgatgtctccttgttcgtagtcttgccaaaataatgttgtccctacctgggctaatgcttcgtccatatgcagtcgccatgcgggacggtatccttctgctattttctgtttttgtgcggcgggggacaaggtgcgacatgtcccgggatatagatacccttccggaccgtgcggtgcgtgtgcggcgcgtctgatttcgtcctgtatttctttgcgggtacaaaaacacggatagataaggccgcggtgccgcaggacctccagggcatcgcgataatctgccatgtgatccgactgacgacgaggtgggtcagaccagtcgatgcctaaccacttgagatcgcgtatgatatgctgttcgtaattggggtggcaacggctgctgtcaatattttccagccgcagcagaaagtccccgttgaggtcccgggccagatgatatgcggtaagggcggaataggcatgacctagatgtaataaacccgtggggcttggggcaaaacgggtaatcaccgggatcaccggggctgtattctgtttaaaggacgtggacgacatggatatgtcatagcatgactggcggttaatgagaatgaattgttcgcctcactgtggtggccggtgacaggttaaagctatgcagaataatattatactgccgtcatggggatttccgccatggaatttccgctatggaatttccgcgggcgggcagacgacaagagatgcggggtaaacgtgcagggggtttgggctatttcattgttgtgttaagataagcttcgattgtcatgaagtcgtcatctgtctgttgcttaatacccttgtttattgcaacattgaccttgtacaggacgatgtgcagacaggcggtgcaggaggaaaatgtgttatccgacattgatttgaccgatgatagccataggcctagccttagccagtcttatgatacctggacctcgccagaaaaatgtcctgctcttgtcttaaatgcagattatcaaccgcttagctattttcctttatctgtatggtcctggcaatccgcactgaaggccgtgtttttagaacgtgtgcaggtggtcagtgaatatgacagagtcattcgttctcccagttgtgaattgaggctgccaagcgttatcgccctaaaagaatatgttacccctaaactattcccaacatttacccggtttaatttattcttgcgcgatcggtttagctgccaatattgcggacaacagacacgtctggttcgtgatttgactttcgatcatgtgatcccgcgccgtgcagggggaaaaacaacatgggaaaatgtaacgacgtcctgttccccctgtaatttaaggaagggggggcggaccccgaaagaggcagtgatgccccttctgagcaagccagagcaaccaacaattcatcagctgcagaaaaacgggcgggcgtttccgcccaattatttacatgaaagctggcgtgattatctgtattgggatgcggaactggagccttaaggcaaaggcggtttgtctttgtgatgcggtcttatatggcggttatcataaagcgggacaatgttctttgtctttttaagtctctgttagagaatatgtgtcagtattttttacaattttgagtcattccatttcggaaatggccctagtttatcgtaatgtattgattattatagaaaaataattttggtatgatgcttgcttgatagtagggcatgttcatttctggaagggatttgtaatgttgagaaagttttcttctgtggctttggctggtgccgcggctcttactttatcatttggtgtggcggatacggcggaagcgattagcattaaaccgacggcaacggcgacaattcagctattggggtcgggacaggtctcaaattctgcttcggttggatatgatccggtggccgggctatattatgcgtctcgtgcgggtagcagcagctacacagcaaatgtctgggataacagcggtacattgcagcagagtttgtcgccgatgaatgcggatgcgcgcggctggaactataatgcgaacaccgggcagatggaattggtgacgtttacgagcgatcttctgaccgtagggcgtactgcggcgggattgttgacagggacgtatacgacacaactgaataatatggcaggatcgcccagcagtcaggccatgttgacttatgattccggccgggatcggttttatggttatggcagtacaggtaattcagtatctgtcatcagccacacaaccggcgcactgcaatcgaccattactctggatttcttgagtgctggaattaccgatttggttgaccattttatcggctatgatgccgtggaagatgtgctggtcggtgtgagcggtgctgccgcctacgtctttgatttaacggggtcttatctggggtcctccagcctgggcatgacagcggacagcaattttgacatgggttatgccaacggtcaggttttcctgctgtctaatcaattgggcggttaccaaggttatgacatttttaacagcacggttccgccacgtccaaatggcgtttctgaaccagcggctgcagtattgatgttagcgggcatggggctgctggtgttgcgccgtcgtaatgcctgatggttttagggctgtgtccctaaaagcttattagctctgaaaaagccgggatgaattcccggcttttttacatgtaatgtggttatcggctgttccgatggccacggattgttttttaagtcgcctgacatcctgggtttgatatcctgggcctggcatgttggacctgacatcctgggcctgatatgtcggatgaggagggggattatattttttcggcgaccttgattgccaaacggcatccccctttgattaggccggacagtaattcatagccaggtgtgtctgcggctcccaaatccagggcggtgtcgtggtgttccagttcttcttggcggaatttttcaatagtttccgccaattcttgttcatcactgcccagactatcgagctgctcacggtaatgttcatcaatcacgtcctcaacagcggcggtgcaggccagggccgccttttctcccatgagggcggttgcggcgccgagagcaaacccggcaacatgccaaaaaggtgtcaaggccgtgggccttaccccgcgttgggtaatgaggtgattgaagtggtccagatggacgtcttcctgcgcggccatatggcggatggtgggacagagagggtggttttcccccaaaacggctaattgtccggcataaatacgcgttgcgccgtattcgcccgcatgatctacacgaataaaacggtccaccagttctttggcggtggggtcggcggcgatgcgccccgcggcggttttttgttttgccgtctttcgtgtttttttagccatttttttctttcgtggttcttttttcatcggctttggtgccaacttaactatgccgtcagtatactatttccttgcgattgttgcgaggccgctgaggaaaataagcccgagtgataatagaaaattataacccgccattgaaatgccgaataacgaccatgcgatttcatcacatttcacaatgggtgcagccataatactgtctaacaccgcatttagatcatctgattttacgattggggcgctgcagctgtccagcccttgccaccattgttgttccaccccgacatgaaaggcggcaatgcccgcgccggtgataaaagccagacaacaaatggcagacagtgcgcggcttgtggggcttggggcgtagccctcattaacttccagcaataagatgagcgcggacagggccatcgtcagcatatagggataacgttgataccagcatagttcacacgggggatagccgcctatgtattcgaagccgaatacaatcgctaacgtcagcaggctgataataaaaatcagctgaacaccgttgcggtgggggtggggcaggtgatttaggatattatgcatcttaactctgattatatgtattttaaggcaataaagccaccaaacaggcagacgaaaaataacaaggtgagtaaccccagacgtttttcaataaagtcacgcatggggtccccaaatttccacagcaagaaggcctccagataaaaacgtgccccgcgggaaagcaggctggcaataagaaatgtcggcaggtccagggcggtgacgccgctggcaatggtgatcaccttataaggaaaaggtgtcaggccgaaaaaggccactatccacgccccccattcattataatagccctgaaaatggctgaatttttccatatagccatagaattccagcattggttggccaatcaggtcgaaaaggtaaaagccaactgcatagcccagaagcccgccaagaactgaactaatagtgcatagtccggcgattttccaggcattgcccggggccgctaaaatcatggggattaacatcacatcagggggaataggaaagacggaactttcgatgaaggcaatgatcgccagatagatcatggcatggggatgggttgccagtgtcatgatgcggctatagagacgattaagcataagctgtcgactttcctgattgacatgtttatacgtgaccgtatgcgccagtagagcgttcggtgatgaaaccttaagggcgcatatagcagggaacggggaaaatataaacgctaagatgccgatgggtataaaactttcatcgggaagcgatgtttttattgacccgtgtagcggtatgggtaatatgcgctgcactgcttcttagcagttccagcccagagcccctgtggtggaattggtagacacgccagactcaaaatctggtggccgcaaggccgtgtccgttcgagtcggaccgggggcaccatacacaaagttaccaaaaacattaagtacgattgaatgcatctatgctcatgggaagtccctatttgtcggggcccattctgacgcaaatgcgcaaatcgtatttgtttgcggaatatggatagttgcgggacaaaaataaaaaagaccgggcggacccggtcttttaattttatgacattcgtcttgttaacgaattgccagattttctgagtagctacactcataagtagattgcatttttaaaatacgcccgtcaatataaaaacgtcataaatttaaatgggggaatgtaatgtggcgactagctttggatatggggaccaattcactggggtgggctgtgtttgccttaaatgccgcaggtcaggtggaaggattgaaggacgccggggtgcgcatcttcccagacgggcgcgagccttccagtaaagatcgtgtcggtgatagtttggcagtggagcggcgtttggcccgtggggcacgccgtaatcgcagacgacagttatcacgtaagcagaggctcactgacagattggtgcagtttgatttgctgccgcaagatgcagctgctcgcgcagaaattatcaagctggacccttatgccttaagagctaccggcgtggagcgtgtgctgaccccccatgaattggggcgggttttgttccatatggggcaacgccggggttttctgtccaatcgtaaaagtgatggcaatgatgaagaaacaggtaaaatcaaacctagaatttcagaattgcgcaggctgttggacaagaaaacgctggggcagtggcttcatgagcaaaaagaacaggggaagccaattcgtttccgcggggaagaaggtgacttttttgcagaccgggctatgtatctccatgaatttgatgccattagagccaaacagcaaccacatcatagtctgtcggctcaggattgggataatatccgcaatggcaaccgtgatcagcaatttgacgggctgttttttcaacgaaaattaaaacctgttgaacggggccgttgtgaattctttattgatgaatatcgtgcccacaaagacctgcccattgcccatgaattccgtattctccaggaagtgggcaacctgcaatattatgatgagaatcagcaaaaacatgcgttggatgaacagcagcgtaacattgtcattgatctgttaaatcagcaaaagacagtatcctttggggcattgcggaagctgaaacatgcggatggccgttttgtatttccacggggatgcctatttaatctggaaagtggcccccgcgataaactgaatggcaatgccaccgcatgtgatatgcgcaaggctgaactgttgggggatcattgggatgctctgacagcagatgatcagaatgatctgttggaaatgctgcatgaggcggaagatgatcaccaactgatcgaagatctggtggaccgcttcggtatttcagcagagcaggcggaagcggtcagcaaattcaaattgtcttcggcgacaacgcatttatcgcgaaaatttatgacacgctgcgccgcgatcatgcgtgaagaccatctgggctatgatgcggcggtgcgtgaagtctatgacgatgatggtgtgttctttcaccatagtcgctacgtggtggaccagttgttgccgaagcttccgtattatggtgaggtcctaaagggcagcatgattggcgggcagccggataaacatgatccaaagaaaaatccagaacaacatttcggtaaaatcaataaccccacggtgcatgtggcgttaaatcagctgcgtaaactggtgaactgtttgatagaacgttttgggccaccggcagaaattcatgtggagctggtgcgggatttgaagaaaagtaccaaggcccgcgatgatatcgccaaacagaacaagaaatttgccaaggccaatgaaaagcgcgcggacctgttccaggggttgcatggtggccaggcaccttcgggtctggatctgaaaaagatgcgtttgtgggaggaattgggaccggaccaattgacacgccattgtccgttttcaggtcggatcatttctgcacagatgctctttaatggtgaggcggagattgaacatatattaccgttttcgcggacgctggataacagtacagctaatctgacggtggctgttcggcaggccaaccggttaaagggcaaccggactccgtatgaggcgtttgcccatgggcagcatgaggggcaagggatggtctggcaggacattgccgcgcgggcaaagctgttgccccagaataaacgctggcgttttgatgctgatgccatggaccgctttgaacgggaagggggatttctggcccggcaattaaccgataatgcctatatttcccggctgacaaaacgttatctgagccatgtttgcgaccagaataaaattgccactatccctggtggcctgacggcgatgatgcgcggtaaatggtatctcaacagtttattgggggaccacaattttaaggaacgtaatgatcaccgccatcatgcggtggatgcctttgtggtgggactgacggatcggtccatgctgcaacgggtatccagccaggcgaaccgcagggcggatgaccgggtgcagattgatctgcccgatattacgcccttgcgtaaccagttaaaggcgcgtctggataatatgattatttcctataagcccgatcatgggaccaacggcaaaatgtataaggaaacggcttacggcattgtgccgccggaacagcaagatccagaattgaagggatacggtctggtcacgcgaaaaaaactggccagcctgacagataaagaaattctggctattcgtaatccgggttggcgggaacgtatttttgagcacgtggccggggccaaagccaatggcgtgaagctggataaagcgttggcggattttggacaggacaataacatcaaaaccatacggattttggtgtcgaaccagtccgccgtgccgatcccgtcagcgccgtacaaggcttatgccccggattcatttgtctgcgtggatatctggcaggtgcccaagggccgccaggggaaatggaaaaaaggcgaatttgactggaagggggccttttggtcctatgcagattgtaagggccaaagccccgataaaaatcaggggcagattgacgggaagcccatccatccagccgcaaaatttatcacgcgcctgtttaagaacgatatgattgaaattgaagaaaatggtgtgcagcagattatgcgggtggccggtttcagtacgacagacaatagaatcgatctgcgcccacaatatgaaacgcaagaggcgaggaagtattattctattaatgtattaaagactctttccttacataaattgtctatccgtgaagatggcacaatgggggtgcgtcatggtcacacaggttgttgaagtcgccgaagacggtcatcatttgtccaaatatcgtggttttatgcaggtaaaacgcgatggcgtggaagtggggcgtgtgccgctggatgatattaccgcgttaattttatctgctcatcaaattaccttgtcgaaaacgttgataatggaattggcggaacgtaacgcgccggtgatgacctgtggcaagaattatcacccgcaggccttttccctgccttacgcgagtcattttgatcaggtgggtgttttatgggcgcagattgactgtagccagccattggccaagcggatatggcaggccgtggtgcgtgagaaaatcaccaatcagaaaattatattggaacatttcgccgtaccggatcagccagtacaggaactgggcttgttgatccggcgggtgaaatccggcgatccggaaaatatggaagcccaggccgcgcggctttattggaaatatttgctgggggatgatttccggcgggaccgggaaacgggattagaaaattccctgctgaattacgggtacagtatcctgcgggcggccgcggcacgggccgtttgtggggcgggcctgacacctgcactgggtattcatcaccgcaatcgcaagaaccccttcgcattggtggatgactttatggaacctttccgtccattggtggatatggttgtgcgccagattatggatgacgggggtggggatgaagatggcctaacaccggaaacaaaacggcaattggcccgcatactggatatggatgtgcagacggcaaaggggatgtccacggtaatgaatgccctgcatcgtgtggcgcagacctttgtcagcagtttgcaggaaaaagataacagggtggaatttcccggtctgatcccggcggggaatttattttaatgatgttgcgggaacaggaacattggttaagcgggtatagtattttgtggatgttggtgatgtttgatctgccggtggtggaaaagtcggaccgtaaggcggcaacggcgtttcgtaattttctgttggatcagggcttcaccatggcacagttttccgtgtattatcggatgttatcgggtaaggataccgcgcagaccatggaaaaaaagattcaggcgaatctgccagaatatgggtcggttcatattgtcgctattaccgacaaacaatatgaaaatattcgtttttttaagggaaaacagcgtgaagaggcggaaaaaagggatcagctgcagctgttttgatgggacagtagagcgtttccaaaaatggaaagggctaacccatcagttttttcaacaggttagccctcatccagtgtagctattcagaaaatctggtcaatccgcaactatgtggctccgccgcgcgtggtgaggcccagtgtagctattcagaaaatctggtcaatccgcaacaggcccacgaactgccagaagacgaccggaagtgtagctattcagaaaatctggtcaatccgcaacggcgacattggagggctggttaatggatatagtgtagctattcagaaaatctggtcaatccgcaacacaaacattcatcgcaacacagccgagctgagtgtagctattcagaaaatctggtcaatccgcaacttacaacacggggatgaacattacgaacagagtgtagctattcagaaaatctggtcaatccgcaactattcagcagcgtctaatacaggagactatagtgtagctattcagaaaatctggtcaatccgcaacagcccaacagagggtgtgcctgaattctctagtgtagctattcagaaaatctggtcaatccgcaactgatagacctcattgccttcacaggctaccagtgtagctattcagaaaatctggtcaatccgcaactttcatcaaacggcacaatatccgcccccaagtgtagctattcagaaaatctggtcaatccgcaacttgaacaggacttaaagccatcggccaaggagtgtagctattcagaaaatctggtcaatccgcaacacacgatgcattagcccacgacttagccgaagtgtagctattcagaaaatctggtcaatccgcaactggggcttctgttccccgtcccacgctgtcagtgtagctattcagaaaatctggtcaatccgcaacaagccctcctctaataggtgatgttgtgccagtgtngctattcagaaaatctggtcaatccgcaacaacggtattcgtgggggcaatcagtcctgaagtgtagctattcagaaaatctggtcaatccgcaacgatcattgtcataggcaggtcagcgatgcttgtgaaaacatgctgacgccggcctttgggtaatatctacaattttatctagtctttaagggctcttttacgtccctgtgatttaatcacaacattccagaagggcatgaatgaaacgacatgccggaaaagatgatagggatcaggcttagaaaggacaatgagatggcttccgttaacccgccgaagaaactagaccagaaaatcaaacaccgcgaagaattagcgcagcaattgatccgccgtttgggctttgccggggcacgccagacatgcgtagaaaatcattgggaaggcgttttggaagctattaatacggtgggcgcgcgttagccgctgttggtggggtgccgctgccttcaccgtcagtgctatataggtaaagaccgcccgtcaattaccgtaacaaagaattagatgacatacgacccgctggtgatgccggcgggttgtgtcgttttggagtcttttcttaaaaagatgaacccttaaaaacttaaaaatatggggctgtgaattttccatttttcgtcgcattgaagcgtaaataattaagtttatattttgcatttctctggaatgtaatttttcgtgtgtggcgggttgattcctttacgagaaaaaagaggtatgacttttgtccagtacctgtcctatcgggtgctttaggccatatttgcgattaagaatgcacccgaattgcgccaaaggcagggtgatatggcttggaaacacagattttttgtaaaaaatgcgttttttctggaaagtcgtgaacccgccccttgaaattcgcgatggttttaggatagagtgcacgacagtcagcaacgcgattgcaaggaggcggtcgggttggcagatgcaaaataaaaagttcggtgaacgaacctgtctgcaattgacgaggcataaagtctcttatgatccagccaagctgtgctgaaaacagtacggttggaaagtaaggctcacgaattattttggtatcggggagtatcagtacagtgcaacaaaaacgcgatattctttccgcaggccgtaacgggttctgggggaaggtttcatttgtttttactgtgcctcggtatgcatattgccttttggcatctttagtcattcataaatcatcaataacacctgtaggaagacgcatgaacaagcatcgagtaagaacagttgttctttctgctgttgcagccgggtctctgctatttgcagtgtccggtgcgcaggctgctgagctggccgatgtccagaaaactggggtcgagatccataaaatggctcaagcttctcaagctaaaattgacaagctggcagaagccactaacaaacttacgagcaagtataaatctgtcctgaaagagattgacggtctgcgcgtgtataacgcacagatggaacgccagatttcagcgcaggttagcgcgatgaaagacttggaagagtctatcgagaaagtgacatatgttgaacgtcagatcacaccgttgatgtggcggatgattgatgcgcttgaccgcttcatcgaactggacgttcctttcgaagccgacattcgtaaagagagtgttgaagagctacgcgagatgatggatcgtgccggtgtggacgcttctgaaaagttccgtggtattctggaaatttatcaaattgaaagtgattatggccgtgcggtgaaagcctcgcaagcgacactggaaattgatggtaaagaacgtgaagttgatatgcttcagttaggccgtgttgctttgatctatatgacacgtgatggtgaagccgttggtgcatggaacaacaaaacccgcgagtgggaacgtttgccaaattcatataaaggtcaggtcgcgttagggttgcgtattgcgcgcaaacaagccgctgctgaccgtcttctgcaactgccgatcctggcaccggaggctgcacaatgaacaagtttttaaaaacaattgctgcgattgcagtaagcgggatggcttttgcctctgtggcgcaggcgcaatcctctgaagttgttaataccgccaaaagcctggatgagcttctggagctggtacgcgcaggtaaggttgcggaaagcaaagacaaccgtcgtcgcgagcaggaattcattaataacaaagcggctcaacagaaattgttaggcgatgcagtttcaacacgtaaaagtgaagagcgtcgctccagcaaactggaggcagattatcaggctaatgaagtcaagctaggtaatctggaagaagccttgcaaaagcgcatgggttctttgaaagaactatttggtgttcttcagcaggtttctggtgatgcccgcggtattttccagaattctattatttctgcggaattcccaaatcgtgaagctttcttgagcgagctgattgagaaaacagcttcaagctcgaaattgccgaccattgaagaaattgagcgtttgtggtttgaaatccagcgcgaaatgacggaatccggcaaggttacacgctttgatgcaacgatcattaagccaaatggtgataaggatcagcgtgaggttgtgcgtgttggtacatttaacctgattgctgatggcaagtatctggaattccagggcggcggtgatgagccaaaacttctggagctggtgcgtcagccacagggacgtttcctggagacagcgtctaatctgcagtctgccaatgccggctttaccgctttcgggcttgacccgtcacggggtgctattctgtctctgatggttcaggcacctgatctggcagagcgtatcgaccagggtggtttcgttggttacttcattctggccgttggtgtggtcggtatgctgttcattcttgagcgcttcatctatctgtacctggttaaccgtaaggttaaagcccaggttcgcagtgacgtcgtcagccaaaataacccactgggccgtgttctgagcgtttacgatgccaataagggtgttgatacagaaaccctggagctgaaactggatgaagcgattctgaaagaaacgccagcgctggaacgtttcctgacactgattaaaatcatttccgctgtggcaccattgttgggtctgctggggacagtgacaggtatgatcaataccttccaggcgatgaccctgtttggtacgggtgatccgaagttgatggcaggtggtatttcacaggctctggtaacaacggttcttggtcttgttgtggcactgccaaccttgttcttccacgcgattgttgcgggttggtccaagggtgttattcacacgctggaagagcagtccgcagggattattgctgtccacgctgaacaacaagggaagtaagccatgatgggcctactcgaagcctttgaagctgttcgggacttcatggagaaaggtggagatgttcttcaggtgattttcatcgccatctttctgatctgggcattggtcttggagcgggtgatctatatgctcacccgccacaagaaacaagtgaacgaagttatggcaacctgggaggctcgcagtgagcggacttcctggcacgcccataaaattcggacagcaatgatttcccaggttaccatggatctcaatagtaccattccgctcattaaaacattggttgctgtctgcccgcttttgggtctgatgggaactgtgaccggaatgattgaggtgtttgatgtaatggctctgatgggaaccggtaatgcacgtgcgatggcgggaggtgtgtcaaaagcgaccattcctaccatggctgggatggtaggggccttatccggcctgttcgctgccgcctatctggaacgtcgtgcagataaagaagccgagctcctcgaagaccatctgacaatggatcattaagagattagccatgcgtaaacatgcacatactgaggaagaagcagaaatcaacatgacaccgatgctcgacatcgtgtttatcatgctgatcttcttcatcgttaccgcctccttcgttaaggaagccggtgtcgagattaaccgccctgatgcctctacggcagtaaagcaggacaaagccaacattatgattgctgtgacacagaaaaatgaagtctggatccagcgtcgtcgtgtggatgttcgtgcggtacgggctaacgttgaacgtctgcgggccgaaaatccacaaggttctgtcgttattcaggccgacaaggattccaagtccggtctggtgatggaagttgttgatgctgttcgtcaggcaaacgtattagattacgtggttgcaacgaaaggcgcacaatgatcattagatattgcacatctacagtcgttgctctgctgattacattgggattgtttttcctgatgcaggttcttatcgctacaggtaagagcgctgttgagggatctatccgtggtcacagagtggaaatcggcgaggtgcgatctaagaccgacgtgcaacaggcagaccgtaaaccacaaaaaccgaaggagcctgaggctccaccggaaacacctgatttaccacagcagtccacaaacaaacctgttcaacagtctgttgaaattggtatggccaaagtggatacatctttggatgttgcgggcacaggtgggtttgctgccagcgatggtgattacctccccatcgtgaaggttgcgccggtttatccgcgccgtgcggctgagcggggcatcgaaggctacgtcattctggagtttactgtgacaaagcagggaactgtagcgaatgttgtggtggtcgaatcttcgaacagcatctttaaccgggccgcgtcaaaggctgcggctaagttcaaatataagcccaaggtgattgacgggtcccccgttgatgtggacggcgttctgcataaaatcacgtttgagctggagaagtaggaaggtgagcatgaaaaaaccattaggttatatcaaacagctggcccttgcgactgcattgggtagtgtccttgctgcgtctccggtgatgggtctagtggggcaatctgatctgtcattcgcggcagaaaaagaaagtaagtatgcggatcgcgagacccgtaaaacgcctgccctgcgcgaaaaggtgtataaagttttcgggaaagcccaggaatttgcagacgcagaagactatgcgtctgcagttaaaacactgggtgaactggatcctgcgaaattgaatagttacgagcagggccagttagataatttttatggatacatatattatattcaggaaaattacccgaaagcgattgcggcctataaacgtgtgctgacgcaagaggggattcccgttgcgttggaagataacgtgacctacacgctggcacagctttactttgtgacagaagaatatcagaagtcgatagacctgatgaagaaatggattaagtatcaggaaaatccgggtgcgaattcatttgttctggttgggcaggcttattaccagttaaatgattatcgccaaggtattccctgggttgaaaaggccatggctgattataaagccaagggtaaagagcctaaggaaaactggtatcttctacttcgcgtgatgtattttgagcttaaggaaaacgacaaggttgttgatatccttgaaacactggtgaagaaattcccgaaaaaggaatattggattcagttggcgggtatgtatggtgaaaaagccaacacgccaggattgcctaaagcacaacgtgaagaactagaacgctggcaattggtgacttttgaatctgcttatcgtcagggactactcgtacgttccagcgaactgaccaacatggcgcagatgtatctgtatcatgaagttccatataaggcggcgagagtgcttgaaaaagggctgaaagaaggcctgattaagagcacctccagaaactgggaaatgctgtcacaggcgtggatcaatggacaggactatgataagtccgtaggtcctttgaaaaaggctgcggaactctctaatgaggggggtaagttgtgggtacgattggctcaggtttacagtcagcttgatgacaatgccaatgccgcaaaatatgcggaagtcggcattaagaaaggcaagctaaaacggcctgatacagcgcatgttgtgcgtggtatggctttgtttaatcaaggccgcctgaacgaagcgcgtaaggaattcgttgccgcgtcaaaatatgaccgcagcaagaagatggcgagacagtggatcggctatttggctggtgaagcagagcgtcgtcgtcaaattgcagaatttcttggcaaataagcctgtattatcaatgattaaaaatggcggctggtaacggccgccatttttttatgtcacagtaggctggtggcttgatccactggatggtatcttctatcgtaacgttgcatgagcgcaatgttattgaaggctgaagcctataatagataagaacgccgttatcgcctgagagggttgcaaggtcagggcatctttaatgaattttttaactcatattctattggttgtgtcatatgccgttattgcgctgtttgtcgcggtggtgataccggaactatggacggagcgcagcgcggcagagggggcttttgccggggcgattgtgttcttcattgcggcccaattgcatcatatctatattcgccggcttgaggcggaggatggtaatcaccgcttattggctttgcatcaggattatcaggcgtcattagaagcattagaggatgcgcaacaggaaattagccaactgaaatccatggtggataagacaacgcaccataatagcgcggaaatcattgcagagatgcgcatgttgcaaacgttgttgaaacaggtggtggataaaagcggtaaacacacgctgattgcggataccgaacaacgactaagcgactttgcggggcaggtaggcgatagtagtgtacagggtccaggtggtgtccatgctgatgacggtggcgtttttgcgcctgcaacacggcagatggccggaatgccggagggggagcgcacaggagcacgtcacctaacaagccatgaacgcgtgcatggtgaagaagaaatattacatatcatgcacaatgcgctggaagaaaacagggtggatctttacctgcagcccattgtgtcgctaccaacgcgtaaaactttgtattatgaggctttttcacgggtgcgtgacgaagagggacgggtcatctttccgaaccaatatcttcatctggcagaagatagcggattggtcgggactttggataatttattgttatttcggtgtattcaggtcattcgtcgtttggggccgcgccgtcctaatgtgcgttttttctgcaatatatcttcagtttctgttcatgataaagaattcttcccgcaatttattgattttatgttgaataacattgaattggcggatcgtttggtatttgaattttcgcaggcagatgtgatgcgacaatcgcccaatatcggccgcagcctagggtcattggggcggcgcggttttcaattttctatggatcgggtgctctcacttgattttaatcctgcagacctagcggagcgttatttccgctatgtcaaggtggggacggacctgttgctggaaggcggcggtgatgtcgcgtccggggatttgaaggaagcattaggacgttatgatatagatttgattgcggaaaaggtagaagaagaaaaagacctgatcgaagttctggata

SEQ ID NO: 3588 - DNA, 6097 bp, synthetic construct
  source 1..6097: mol_type = other DNA
  misc_feature 1..6097: note = Synthetic
accccgatgtgtcggacgaaaaagcactggaattcgaacgctccagttgccccacttgtggctcgtgctcgggcatgttcacggccaattccatgaattgcctggtcgaggccctgggcctgggcctgcccggcaacggctcgctcgttgccacccatgccgaccgggaagagttgttccaccaggccggcaaactgatcgtcgatataaccaagcggtattatgaaaacgacgacaccagcgtactgccccgttccatgggctgtgtcaaagggtttgaaaacgccatgacggtggatatcgccatgggcgggtcgaccaatacggtgctgcatctgctggccatcgccagggaagcggaagtcgatttcaccctcaaggacatggaccggctcagtcgcaaagtgcccaatatctgcaaagtcgcgccgtctcatccggattaccacatggaagacgtgcaccgggccgggggcattatcgcgatcatgggcgaattggaccgggttgatttgatcaaccgggatgtgccgaccgcccacggtggcatgatcggcgatgtgatcgataaatacgatgtatcccgaaccaattcccatgaggtcaaggcattctatatggacgcgcccggtggcgttatcaccacccaggctttcagccagagcaaaagctatgacggcctggacctggaccgcagcaccggttgtattcgcgataccgatcacccctacagcgccgaaggcggcctggctgttctgtatggcaatattgctaaagacggttgcgtggtgaagaccgccggggtcgatgaaaaccgctatcagttttccggcagggcggtggtgatgaacagccaggacgaagccatcgcccgtattctcggtggcgagattgtcgccggtgacgtggtggtgattcgctacgaaggccccaggggcgggccggggatgcaggaaatgctgtacccgaccagctatcttaaatccatcggcctgggcaaggcttgcgccctgatcaccgatggccggttttccggcgcgacttcgggcctcagcgtcggccatgtgtcgccggaagcggcctcgggcggggccatcggcctgatcgaagacggcgatatcatcgagtttgatatcaaggcccgctcggtcaatgtgaaggtttctggtgaagacctgacccaacgccgggccgccatggatgccctgggcaaggacggctggcagccgggtccgcgcccacgcaaagtcagcccggccctgcgcgcctatgccgccctggccacttcggccgacaagggcgcggtcagggatgtcagtcaggtcgaataagggaagcgatccagactcccacaaacaaaaagagaccgggcggacccggtctctaaattttgtgacaaaagtcttgttaacgaattgccaggatttctgagtagctacactccctaaaaggttgctcccatgtggagaacaagtcaatagtaattctctgttgaatgatttaaggcggagaaaaggtatgtggcgattggcactggacatgggtaccaactctctggggtggtgcgcctttgaattgacagcggatggcgaggccctcgcattactggagtcaggggttcgaattttttccgatggcagggaaccgtccggcaaagaccgggttggcgacagtctggccgtgcaacgccgactggcgcggggcatccggcgcaatcgtgatcgggccaaccggcgaaaaaagaaattggtcgagcgactggtccagctgggattaatgcccgccgaccgggccgacagaaaagcactggaaacattggatccttatgccctgagggcggcgaccgtggagcgtccggtgacaccccatgaactgggacgggcgttgtttcaactgggccagcgccgtgggtttttatccaatcgcaagaccgataatgacgacgaggaatccggcgtcatcaaacctaaaatttctgaacttagacaattgctgggccggcggacattgggtcagtggctttatgaacggcagtgtaacggtcaatcggttcggtttcgcggccaggaaggcgatctttatgccgaccgggcgatgtatctgagcgaatttgacgccatcaggaatattcagagggaaaaacattctttgtcggagcaagactgggacgacctgcggaacggtaacaaggcgcagggatttgacggtatttttttccagcgcaaactaaaacctgtcgagcggggcaggtgcgagtttttcaatgatcaataccgcgcccacaaggacctgcccatcgcccaccggtttcgcatcctgcaagacctgggcaaccttcagtacgtcggtgatgattacagcaaatatgaactgaacgaggcccaacgcacccggttgcaagaatgcctcgataaccagaagaccatcacttttggcgccattagaaagctgaaaaatggcgatggcgaacgtctgttcccgcgagactgcctgttcaatctggaggccggaccaaaagacgtgctgaagggaaacatgaccgccgttgaaatgcgcaaggtcgatatgttgggcgaccgatgggactctctggacgaagaacgccagaacgatttgctggaaatgctgcatgaagctgaagacgacgagcaattaatcgccgatctgatgggctctttttcgctaacggcaggacaggcggcggctttgtgcaagttcaaattaagcccggcgacgacccatttatcgcgaaaattgatgagccgctgcgccgatatcatggacgttcgaaaacttggctatgccgacgccgttggcgaagtgtatgacgatgatggcgtttttttgcatcactctcagcgaggcccggacacactgctcgacaggttgccttattacggggcacttttgaaaggcagtgtcattggcggcaagccagacaaatatgacgccgccgattttcccgaacagcattacggcaaaattaacaacccaacggtccacgtcgcccttaatcaactgggcaagctggtcaaccgcctgagcgcccggtttggggcacccgacgaaattcatctggagatcgtccgggatttgaaaaaatcagccaaggcccgcaatgatatcgccaaggagaataccaaattcgccaaggccaacgaccggcgggccgatttgtttcgcgaccagaacggcggtgcggatccgtcggggttggatctgaaaaagatacggttgtgggaagaacttggcccggaccaactggcccgccgctgcccgttttcgggcaggaccatatcggcgaccatgctgtttaatggcgaggccgaaatcgagcatatcctgccgtttgccagaaccctggataacggaacggccaatttgacggtggcgatccgtcaattcaaccgcttgaagggtaataacacgcctttcgaggccttcgccaatggccagcatgaacaccagggcgccgtatggagcgaaatcgccgagcgggcgaagctgttgccgagaaacaaacgctggcgtttcgaagccgaggccatggacaaattcaataaggatggcgggttcattgcccgtcagttgacagataacgcctacatctcgcggctgacaaaacgctatctggggcatatttgcctcgacaataaaatcgtcaccataccgggtggcttgaccgccatgatgcgtggcaagtggcatctcaataacctgattggcgaccacaatttcaaggaacgcaacgaccaccggcatcatattatagatgccttcgttgtcggcctgactgatcgcggtatgttgaagcgggtgtcggatcaaaccaagcgtggcaccgacgaccgtgttcacatcgaccttcctgatatttcggcgctgcgggatcaattggcaaggcgcctggagacaatcattgtttcctataagcctgaccacgggaccaatggcaaaatgtacaaagacacggcctatggcctggttgctgaagaacaacaggacccggacctgcccggctacaccctggtcacccgcaagaaaatagagagcctgtcggaaaaggaagttggggcgatccgcaatcccggatggcgcacccctatagagcaacatgttgcggctgcccgtgcgtcgggaaccaaactggacaagaacggtttggccaaggtattgggtatctttggccaagagaacaatatcaagaccattcggatactggtttcaaatcagtctgccacggcgatttcttctgcgccctacaaggcctacgctccggactcatttctgtgcgtggatatctggcaattgcccaagggcaagccgggaaattggaaaaatggcgaatttgaatggcagggggccttctggtcctatgatcagtgcggcggcaaaagtcccgataaaaatgatggcctgatcaaaggtaaacccattcatcccgccgcccgctatatcacccgattgttcaaaaatgacatgattgaactggacgatggggggcagaggaaagtaatgaaggtggccggtttcagcacgacagacaacaaaatagatttgcatccacagtacgaaacagacggtaagcgccagcgtctttcaatcaatgttctgcaaaaacaattcaggaaaaaactcagaatacgtgaagatggcagcgggggcgtctaggccgtggttacccaggtggtcgaaatatccgaggatggttgttacctgtcgaaaagccgggggtttatgattgttaagcgtgaccaggacacactcggtcgggtgcccctggacgatattaccagcctcgtcctgacggctcaccaaatcaccctgacaaaaaccttgatgacttcgttggccgaacgggggacgccgattgtcgccagcggggccaattaccatccgttggcgttgaccttgccttacggcaatcactacgatcacagcggcatattgtgggcgcagatcgaggccgggttgcctttgcagaaacgattatggcaatcggtggtgcgagagaaaataagaaatcagcggatcattctcgaatattttgcgccaacctcgtcggttctccgggaactggacgtgcttgtgaaaagggtcaaatcgggcgatccgcaaaatatggaagcccaggcggcccgctactattggtcggcattgtttgggccagattttcgacgcgaccgggaaaccggaatcgaaaacatgctgctcaattacggctacactgtgttgcgcgcggccacggcgcgggccgtttgcggggcagggctgacaccggcactgggaattcaccacagaaaccgcaaaaacgcctttgcccttgtcgatgatattatggagccatttcgaccgctggtcgataaggccgtgcgtcggattgtcagtcaagatggcggacgatctgacccggccctgaccgtcgaagacaaacgccgtctgagtaaaattctcgatacagatgtgcgatcgaaaaagggcatatcgactttaatgaatgccctgcaccggctggcactgacactggtcagcagtttgcacgagaaagaaaataaattggaattcccgcatattttaccgtccgggtcgttgttgtgaccgatgatcagggatcgggaaaaatggctcagtggatatgaaattttgtggatgctggtgatgtttgatttgccggtggtcgagaagtctgaccgcaaggcggcgacacggttcaggaactttctcctggaccagggattcgccatggcccagtattcggtctattatcgtttgctgtccggcaaggacagtggccttgttatgcaaaggaaaattcgccgtaatttgcccgaatatggttccattcagattctcagtatcacggacaaacaatatgagaacatgcagatttttcaggggaaacagcgacgtgacaatgaaaaaacggagcaactactattattctgactcccgtttatgcggattaggaaatagaaaggcgctaatcgttgaatgttttcaatcgattagcgccgatccattgtagctattcagaaatcccggtcaatccgcaactcgtccatcatcgcagacacaaaagaattgattgtagctattc

SEQ ID NO: 3589 - DNA, 19475 bp, synthetic construct
  source 1..19475: mol_type = other DNA
  misc_feature 1..19475: note = Synthetic
cagctcacgccaggcgtgcacgaaaacctgacagtttccgcaggtcaacgctatcggaaaccacgccgagcgacacgtttcccgccaccgaaaccggtaagggtcacctcacctggcggtgatgagtggcgggcaccggaaccggagtgctgggccgaaggcaaactaccagctcaggtgctgtttccggccggggcggggcgggcatcgccgctggtcagcgcaagcgaacccccgctgcgtcggctcgcgcgccggcaaactcgccgcggcccgaacccggccgcgccgcgcaacgtccccacggcagctgcgccctaccgtgcggacgtgcccaccaccccgtcgcccggccgcgttcggcgtgcgcgtcgcgcgctggtgctggccacagcggtgagcatcgcggcgtcggtgagcagctgtgccggtcaccgtgagcccggcgagccaccggcggcggtcaccgtgaccgtcaccgtcgcggtgacctccacggtggaggttccggtgcccgccggtgagccaaccccgtatcagcgcacccccgctgccgatgggcgccgctgggcggtacggaccccggcgggcatggtgtgcggcttcgataccgcggagatcacctgccgcggcgactacgactccggtacctcgacgatgcgctggctggccggagccgcacaggccgagcccgccgagggcactgtggacatccctgacgacggccaggagctggcctacggcaccggccgcaccgccggcccctgggagctgcagatgaacgaagccggaatcaccttcacccacagcgggaccggcgcgaaagcgacgttcagccgcgccggcgttgcggtggggtagcggtgaggtccacgaccacaggtcacacgaccacgagagcgaggtactgatgaagtacgggtggtgcaaacagtgcgggcgctcctacgtgtcgccgcagctgccttcatgcgagtgcgccggcgacccgcctgtcacccaccgcggcggccgtaagccgaacttcgacccggagatgaggtcgtaccgggggcgcgtgcgcgcacttcgctttacgccagcgggagccgcgcagtgagcgatttcccctcagactcgagcctcgtgtggcgcgaccaccccgacagcgccagcgcggtcatcgaccagccggacgggcagatgtacatgctgtcggtcagcgcaccgggcgaatacaccgacgtctggactgcccaggccgagcttctcgacgcggactatcggcaagtgaagttctcggggctctacagcgggggcgatacccgggaagcggccaaagccgctgcgctggaagcgctacgagcgatccacggatgaccagcgactcgcaccctgacccggcgcccgagccggtggcactcccgcctgtttcgtacacccgtgatgagttgtgggacggcgacggctatccgaccgatgaggcgctggatctgatcaccggcttcaccggcacgcacgcggagctgttcgcgctggtggaggtggtgtggaggctttacgggtggatgcggatcgaacggaccgtcgacggtcgcgagatcgccgtggtgctcgtcaccggcggctggtcgggcaacgagtcgatcatcggcgccctggagagctcgttcttcgtacagacgcggctgtggcattcctcgacgcgcggtgggcgccacgagtaccgggttccggtcggccagtggaactcgcccctgccggcggagctgatgggcacccgtgcgcaagtgctcggcgccaaggccctggtgccggcgctggccgccgtcgacgaattcgccgctgcgggtgaagtgtccgctgcggtcgccgaccgcgcccggacgctgctgcgtcagatcctggtcgatgtgtttgtgccgccggcggtggcgcccgacggtaccgatgcgctcgcgctgtactgggccgccgaagagatgtcgctgaccgtgctcgtgtaccccgacaggtactggtggagcgttcgcttcggcggcgagcacgcggcgggggagggtgcccggttccccgcggcgggcttcgtcgactggctcgtggagttcagcgtgcaggtgtatcagcgtcggcgggccggaggggccacgcagaacctccacaatggacccgcgccagctgcggcacccgatctcactggtggcgcccgaggggacgcgcagtgacgggcgcggagctactgcgacctgcacaggttgtgcagcgtgcgacactcagaagcatggcgtccgggtcgatcggagtggaacgaaccggcccgtcgatccgtgcagtcctggcggaacacgccgcggatcggtgcgcagagttcgaagcggagtttcgtattgccctggccgagactgacgacgactttgacctgcgtcgggtgcaggatgtcctcgacaagtggtggcccgtcgcctacgcaacgctgcaccctccgaccgaagaggaacgcgccgcggtggcgaggttctgttccggcgacgacaccggcctgtggacccgggacgacggtggggaatgggtgcgcgcctgatggcacgctacgagttggtgtggagcgacgtgccgcgcgaccagtaccgggcgctgtcgccggaagttaaggctcaagtcgatgaagcgctcgaccgggtgctcgacgatccggagaagttcggcaactatgacaaatccgcggaccagtggtcggccacgttcggtggtcgaatgggcttcatcctctacgccatctctcacgaacgcgtgaaggtcatgctcttgaggatcgtggcgctgtagctttcgccggtcgcgggctgccggcgctcagcctctcggcgggtacgcccggtgcgctgacgacgaccgcccacttccgcgtgtccccgaatctcgctggcccggcgtcggtcacagctgcgacgctggaccgatgatgagcaccaccgttttgcaggagccgggcccggacagggtgatgctggccggtgactggcatgccaacaccgcctgggccacctccctggtgctgtcagcgggccatcgcggcatcccggttctgttgcagctcggcgacttcgggttctgggtgcctggccgaggacgtgacgactacctcgacgccatcgaagcgtcctgcgtgcgcaacggtgtcacggtgatctgggtggacgggaaccacgagttccaccctggcctgaacgaattggcgatcgactccgcgacagggctgcgcccgatccggccgcacatcttccatctgccgcgcgggctgcggtggcgctggcacggcaagacgtggatggcgctgggcggggcgcactcggtcgaccgccagtcgcgcatcgagggccggtcatggtggccgcaggaacggcttaccgacgccgatgtcgcacgggcgatccgcggcgggccggtcgatgtgatcgtctcccacgacgcaccggacggctatgagatccccgacctgccagggggattcccgcccgccgagctgtacctggccgacctgcaccggcagcgggtcggcgaggtcgtcgacgccaccacgccgtcggtgctctaccacgggcactaccacgtgcgatacaacgcgcagcgcggggcgacccggatcatcggcctggccgatgacggcggccgcttcgccgacggcgccatggtcctcgacctcaccgcctgaccagacaggaagccatgaccgcgagcaactacgccgttgctccaggtgaatacctggaggagtggatcaacgaacacggcttgtctcaacagcgtgtcgccgagcagctggggtgcagccgcaagcaggtcaacgagatcgtcaacggacacgcaccgatcacgggcgataccgcctttcgcctggagcgcgtcgtcggcatcccagccgactcatggctccgctacgaggccgcatatcgtgctgaccttgcgcggatcgccgacgaggagaacctcgcagcgaggttcggagagcatccgcgacgatagccgcaccccctcgatccgcctggcccaaacgatcggcagggacgacgaaaccgcaggtgaaccgcgacggcggtggtgtgcgtcgtgcgagctaggccgtggcgggatcggcgacccggtagcccgagcgcggcgccgtcgcgatcagcgcccgaagcgcgtcagcgcgcgccgagctgctcgcacacaccagcatcggcgccgccgctgtgtgcgcggtggccatgaacgctgccccgaacggggcacctccgccggcatcgacgacagaggcacgggtcagccctgaggtgttgaggaaccactcactgtccccacggttgttggtgcccagcgacacccgcagcgagacattctccagcagagacctgaactcccgcgtgaacgtccgcgcggtcaggatcaggtgcacgcccagtgtgcgtccggcgcgcgtggtgcgcaccaacgcatcggtcagagacacgccatgccggtggttgtcggagtcgtcgtagtcggccagctcgtcgactacgacgacaagatcgggcaggggctctgcctgtccactcgccgagagcgcgcggtagtggtgaatgtctgtgcccgcggtgaggcgggcggcagcagcggcgatcaggtccatacgccggtcgagttcggcggtgagcaccgcggcgagcgttgccgcagcatcgggaccgtcggtcttgaggcacaggaccgccgcggtgtgcggcagttcctgcagcccgcgcgccgcgccggccccggcgatgatgaactgcacccggttcgggctgtagcgcgccgcgagtgcggtcagccatgttcgcatcagttcggtctttccggagccggtgcggccgagcaccgcggcgtgggaaccgtgtccgcggtcgcgtgcctcgccgaggtcggcccacacgaactggcactccggccccaccgcgaggtgctcatcggcggcccagcccaggggcgctcgcaggtttggctccagcgcgttgtgcgcccaccgggcggtcagctgggaggtgtcggcggcggcgatgaagtccagccacgcatcggttcccggcggggtcgggtgcgcgcgcacggcgtcgagggcctgctggtagcgggttccggggtgggcggccatgtattcgcgggccagtttcttgagtcgagcggaatcggtcacggggatgtacctcctgtgcagcggcaagacgcgcggcgccgcgaccaccaggtccgtcttgcgcggaacagggcaggtgccacggcccctgtgggggctgaccgccaggtgagttcggggtcgcggcccgaaccgacgcagctcccgccacgtgacgcggcgattgcggtgcaccgtacgggcctccgacaggtgcgggcgcccgcgacacgaacacaccgcggcgatctgaaacccgttgtcacgtcccggggaatgtctcgctatgtccgtccgtgtcccttgaatgtccctgaaatgtccctgatgtccccggccgtgtccgtgacgtctcgcatcacggacgcgagtcgcgcaggttcgcaacgatttccgcttcatttccggacaatgaagcgcggcgattcaccgttcggggccagagcgccggccgcgcaacgaattaggccccggcgccgaagcgccgaggcctacacgggatgttcccgagatcattcaccacggggacctgccccgcgcttgtttcgtttctcgcttcctggagcataccgtccgtgcatccgtggcaacggattcgggaaattttggggatcctcggcgtgtcgcgcagctgaccgaactctgctccggtctttcacgcaccctagtgcggcggtaaaccgacacaagggagttcagatgaccagcagcgttccgcttcccgacgagccacgaggtcacgtcgttttcgggttcgatcccggacgcagctcgctggggattgccgccctgcggttcgacgccgacggcgagctcgcagagatcctttcggcgggaacgattctgcattccggaggaaccgagagcggcaagccccctgagtcctacaagtccatggccggccgtgcccggcgcggacgcaaccggcgcgccagccaccacgcccgccggcgagagctcgaccgcgaactgcgcgaccgcggctaccccggtctgacagcggccaccgtcgcacacgcggtgcagattcgcggtgggggagatgtgtgggacatccgcgcagacctggcgactgccagctgggccgatgaacagcagcgtcgcgtgctcatctctgcggcgctgctgaacctctacaaccgccgcgggcagcgcaatgcgttcgtgtcgagcctcagcgtccggcaggcggccctgatggagcagcacagccccgcactgctgcgctcacactctcgcggcgagcagatcgtcgccggggccagtgcgggcggcaccgctacaccggcgcagctgttgcgcgccgtgcgcgatcaccacaaggccgagcgccgctccgacggctgcgtcagcgccaaggtgctcccggaaccgctacgcaaggccaccgccgcccatgagcgcgcgatgcgcgcctacgagaagaaacctgacggcaaagagcggcctgaccttggtgcgcgcatggcagccgaggtggacaagaacaagaatcccgaggcggcagcagaattggagcgccgcatccatgaccacttgttcacctcgtcgctgcaccggagcgacattctcgccgagtggtatcgcatcggcgaagtgcagggtcttgaccgcgccatgatgatcagcatcggcgacatcattgccgggcagggcgacccgcgcccagccgcgatcgaacgggtggcctgcgacgacttgccgcgacttgaggggcagcccgagtatcggccgcgtgccgccaagtccagcctcacctaccagcgattccgcatcgtctccgcggtggctaatctgcgggtcggcgcgacaggttcagcggcggggctgtcgcgcgagcagcgtgcggcggtggttgagctgctgtcgaattggcacgccgctgaggacccgcgctggcaggacgtggtcgatgcgcttggggtgtcgtcacggctgacgggattcgacgggcgcgccaagccgccgatcgaccgcacccggcgagcgctttggtgcgccgctgacccgaaagccacgttctacagtgcgtcattggcatggctcttgagcagcgagcagctccaggcatcgcctgagctgctcgacgtactcgtcgcgcgcatcagcggcacagcggtgttcgaccctgacgacgaggctcattgcgcggtgcagcgctggatggacacgctcaccgatgaggagactgtcctgctcatggacgcggtgaagctggagcacggacgagcggctcactgtgaggacaatttgcgtcgcctcaccgcacacatgatcgagcatgcttgcgatgtcttcaccgcccgcagcgccgtgttcgggactgctccagactggcggccacggcccaacccgctgggtacgccgacgggtaatcctgtggtggacgccaacatcgcgctcgtcaggcgcgcttacgacgacctgtgccgccagttcgggcaccccgacagcgttgtgctggaatcaacgcgggatctggccagcagcgtcgccgctgcggctgagcgccacaaagagaatgccaacgccgcacgcgcccgccgtgccgcactcgcggcggccaacgccgccgccggcatcgacaatgacgcacccatgagcaagcaccggagccaggaggtgcagctgtgcgcggagcagcacggggtctgcatgtactgcggggtcgcgatccggcccggggacatgcagatcgagcacatcctgccggtcacccgaggaggtcgctccactcggctgaatctggcaggtatctgcacctcgtgcaaccaggccaaaggcaaccgcaccctcaccgaatgggctgcggccgggggaccgtcggtgaagtcggtcaaagcccgcgtcaaacatgttgagccgctcgacggtgggcggctctcaaggtcggcatggcagaagcgctaccgggatgcgatgagtgccagcgagatggacctgccgatggagtcgttcggctgggcggcgcgcgaactggccgaccagctcgaaggtgtggtggggcgcggccgtgtgcatctggtgtctgggcggatgactgcccaggcccggcgacttggcgatgtcgacaccgaccggcgcatccgcgacgacggcaccgagaaaggtaacccgctgctgctgcggtggccggcggagctggtgactgaggacgatccgctgccttccggggccaagtcacgcttcgaccgccgccatcacgccgtcgacgctgtcgtcgtggcgctgcttcacgacggcgttgcgcgccaggtgttttccgagcgcaacgtgctcaagcaggcgcaggaagtgacgggacaggctcaggcggctcgaaaggcgggccgcacccctgattggcagctgcatgttgggcagggtgagaacgcccgccgcttcacccagttgaggtccaacctgaaagtcgccgccgagctgctggccaaagaagtcgccgccgacaccatccccgtttcgacggtgcgccggctgttgccacgaaccggccgcctccacaaagagacggtgcgaccgctggtgaaaatcgcgctcggttcggcgatcgccgctgaggaaatcggccgcgcgagcaacgtcggactctggacggctttgacgcgcttaccggacttcgatcctaaggcggggcttccggaggatccccagcgcacgatctcggtgaaaggggtcacctaccgcgccgacgacttgatcggattcttcggggtcaaggggggtgcgctggcggtgcgcggcgggtgggtggaggccccgtcgatgcaccatctgcggctgtaccgcaccgcgccgcgcaagcgcggcgggaggcccaccgtcacgtcggtggctgtcccggtgctcgacgcgctggagctgcgcggaaagcccggcggtgacgaggtggaccggatcttgtcgcggccgctggctgcgcatatgttcggcgtgcggcagcgctccgcggcaaccgtgcagctcgcgtgtgatcctcggtcggaatttcgggtgttgatgcctggcgacgagattgtggtggaccgggaacacgctgcgcggatgggagtggccttgatcaagggactattggctgtgactagtaccgagccggtcaggctcgttgtcacaggcgcccgcgtaaccggcaaggttcgggttgcgcccctgcggttgtcagaggagggggcgcccaagagggcgtggcaggagctggtcgatcagcctgaactgggaatctctccgttcgagggtgcgcacgtcatccgccggtccatcaccggccatccgcgcccgttcgggcctcgcgtgctggacagcttcgtcatcggtgagtggagctgatccggcggtggcggtgccggctgcccgcggtgtcgaacatccctggcaggtggtggatctgctcgacaccgcagacggcgccacactgaccatgcatgaacagctactcaaagtgttgccggtgggccgcccgccggtccggataccggtcggcgatgtcgcggtcgtcctggtgcgtgacacgaccacggtcagcgggcaggtgctcactgcgttgtctgcgcggggtacggcgctactggtgtgcgactggcgcggtgttccggtcggcggaacctggccttggcgcgaacattcccgcatcggcgcacgcacccgcgcgcaagtgcagtgcccgcgccctcgtgctaagcaggcctgggcggcaattgtgcggtccaagatcctcggacaggcgtgggtgctgcgctctcagcggggagaggacagtgggtggcgtcgggtgggcgaatacgcagcggcggtgcgctccggtgacctcgacaatcgtgaaggcgtggccgcagcggcgtattggcggagcttcgctgatggcttcgtgcgggaccgccacctcgcagaccccgtcaactcggcgttgaactacggatatacggtgctgcgtggtcacgctgtgcgcgcggtggcacaggcaggactgtgtcccgcgatcggggtgttccaccgcgggcccgacaaccagttcgccctcgccgacgacctgatggagccgtttcgccccgccgtcgacgccacggtgcttgcgctgtcagccagtggcgagctcgacatgtcactgcaggagtgccggcggcggctggtcagagcgtgctcgacgccgatgcaggaatctgcaggcgtctcagtgacgaatgcgatggtctcggcggcacaaggactgggaatgttctttgagcagcagcgggcggtgtttcaggtccccagctggcgcggaatcctggactgacgagtgtggctcgtcgtccttttcgatgtaccgaccctgacacaacgcgaccgccacgagtaccgcacgctacgacagaccttgctcgacagcggaatgctgatgctccagtacagcgtctacgtcaagccctacagcggcgggcactccccggagccgttgattcgcgcaatcgagcgcgtgcttcccggcgacggcaaggtcacgatcctggagctgcccgaccgggtctaccagtcggcctaccggtttaccggtgctcggttcgcagaatcacacggtgaagaccccgaaccgccccaggaactgatgcttttctaacggcggaagccgccatctgcgcaggtcaaagcccctactcgggagagtaggtcagattaccagcaatagctgggggagaaacgaaacccgggccagtgactatggcgccgagccggtcagattaccagcaatagctgggggagaaacgaaaccaagttgctgcgtcaagctccgacctcagtcagattaccagcaatagctgggggagaaacgaaactcggtgtcggtcacggttgtcctcctgggtcagattaccagcaatagctgggggagaaacgaaactcggcgtccacgtcaccggccgcctggtgtcagattaccagcaatagctgggggagaaacgaaacccgaacgtgcccgagatcagcagcgcgcgtcagattaccagcaatagctgggggagaaacgaaaccgggaaaagtcggtcgtgggtacagcgcgtcagattaccagcaatagctgggggagaaacgaaacccccgagaaccatgcccggcccggaagccggtcagattaccagcaatagctgggggagaaacgaaacctgcaggccatggctgagctgcctgagagtcagattaccagcaatagctgggggagaaacgaaacctgagcttgatgatcgagccgatccccggtcagattaccagcaatagctgggggagaaacgaaacgggcctgccgtcaccagcactgagcgccgtcagattaccagcaatagctgggggagaaacgaaaccctgttcccgcaccggcaccgacaccgagtcagattagcagcaatagctggggggagaaacgaaactcgacgatcacgttgccgatatgcacccgtcagattaccagcaatagctgggggagaaacgaaacacgccgggggtgaacccgggacgatgtaggtcaagataccaggcaacagctgagggtgagacgtaacttctgcgggcggggggtgaatccgttcccgaggatgctactcgcggcggtatcgcgaccgccctgccggcgtttgtctccgcgggttggcaccctccacgtgtccgtgtcacacgtgcagcgcacactcacgctcatgtcgcacaacgggacccggttggtcgtgatcgatctggagacgacgggtctggacccgcgcgccgaacagatcctggagatcggtgcggtgatcatcgacgagacgctggcggaggtcgatgcgttcgcggtgctggtggccagcgctgaggcgcgaatgtgggcgcgcaccgtttggggacgggccacggcccctgacctcggccccgccgagcagatgcacctggccaacggcttggtcgatgaactgatcgacgcaccttgcggggctcgcagcgaagttatctcgtcggtggcgacgaccgtcaccgaggccgccgcgttgatcgccgaggtgctcgaccgtcacggcgtcaccgatccggtgccgatggtcggcagctcggtgcgggcgttggacgcgccgttcctggaagtacatgcacccgcactggcggcccgtttcacgcaccgcacgatcgacgcgtcggcgttgatcgagttcacgcggttcgtcgaccccaccggcgccgctgccgtgatgtcgacggtccccgactccgggcaccggacactgggggactgccgccgctcgctgttcatcctgcgcgcgttcggccagcattacggcatcggtgcttccgcggagctgatgcggtgaccgacagggaccgggcccgccgcgctcgcgcgctgttggcccgaaccgaggagcagctgcgggcagcgcagcgctgcctggactcgcagctgtggtcggcgtcagccgcgtcggcgatccgtgcaggaaagtctgcagctgatgcgatcgcgatggcgttggacggccggacggtgaccgacaccgaagcgttgaccgcagctgaggcgctggagccgattctgcgcggtgaccacgacggcgcgcacgccgtgatcgcgttgcagacgttggcgcacagcgagtccacggtctgtcgcggtcccgaacccgtcggtgaggtgggcgcccgcggcctggtctcgcacgcgcaggcgctgatcgacgtggcgcgacgcgtggtgtgagcgcgccgtcgacaacaccaccggggacgatgaacgcgcagctcagctgacttcgcgccggcgcggcccgggccggctcagagttcgaaagtgacgatccagcgcgggtcgctctgctcgatcgccgcgacggcctcgacgaacaccgcgctgcttcgttcccggtcgtcgaggccgaaacgccgcgcgatcgactcggccacagtccgggtgttggcgtcgtcccactgtccggtctcgcgttgcccctggggcgggtagacgtctgcgcggccgtcgcgtgacacccggacggcctcggtctcgcggtggtcccagacgtcgtagtgcagatgcaccacgacgttgacgttactcacccgaccattccttgaagttgtccgcagtgacgacgaactgggtggtgttcacctgcacgatgtccccttcgcgcagcccggccgcgtcaccgccacgcaccgcggcgatggcctggcgcgtcgacgcgacgaactcggctgaggtttcgttgttgatctgtccgagaacgtattccatcgtcagcacggtggatccgacgttagggagactgaactggcccaccacagtcagctgggccgtgcggtcggagaaggggccagtgacggtgttggcgtagacgcagacgttggtgtcgctcatgactgaaacgctccgttcctgtgggccacgatgtgtgcagcggtggcccacgcgaagtcgacgtgtccgccgcggccgtcggtgcgcgacaccgccgcgaaagagttggcccatccgctgatgcgcgccggctcaccgtcgagggtcaccgctgcttggcagagcttctgtcgctgttcatcgtcgagtccaccgtgtgttggcatggccgcgatggtggcagcagtggcgggggcgcagcagtgcccggcgcgcaacagcgtctgatcttttgagcagctgcatgctgcggcccgagctggggcgctttaccgttcgatcgagtagatgcggctgtaactgaaccggtcgaggttctgttgggacttgatcgcggtgggctgtccggccgactcaccgtcagcgatgacgccgtagagccgcaggctgccgtaggcgtcgtagccgggctcggccaggatcgccgcggcctcgtcgtaggtcaaagtcttctcgacaccgtcaccgagtggcgacatcagcagctctcctccatccacccgcgagcggtgaccagtcccagcgggccctcggcgactgtttcgtcgggctttccgtagttcctcacgatgcgtgtcgcggtgttctgccgtgtccacacgatcaagatctcgacggccccgcggttgagaacgacctgctcctgatcgccagagcaggggctgaccgaaacggtggtccacccgtgttgcgccgcgatctgttcgagcactgcgcgtccgttgtaggtcatggcgggaatcgtggcagtgcctgtgccagcgtctggcatagggcgcggcgtaactgcgcttgctcgtcgatgtctcggcgtcgttcagtgcttcccgccgcagcggcattccgcggcgacggtgcggtcgttgtcgtcggagacgatcagctcgtcgatgttgtagatgatgccgtcgcattcgacggttcgggcgtcgggggaccagcgtcctgtgctcttcatcccggctaccgacccggaggaatcgatgctggggtgaacggtgtagcgcaacccggtgctgccgtcggcgatccaggcgattccggtggctccgtcgcggtagagcttctggtgtggtccggtctggcgaacgagttcgatcatgggcgccagtttcggtaccgggtgctgtcgcccgcggctgaggcgcgccgcggcggcggctgagcgcctgcttcggcctacggtcggcgccatggcacacgagatcatcgtcaacctgaccttgtccgacaacggcgacgccgctgcgatgatcggtgatgtcgcggcgggccggcgcgaatcggttgacctggaagctgccgatcgccggtccggaacaccggtcaccgtgcgcgtgtatccctgacctgcgggagattcggatggcatcgatcacgatgacgctgcgctaccgcgccgacacgtcgaagtacccggctcacgtccaaactcaggcccaggccgcccaacacgacatcgatcagtacgagaacggtgagatcagcctcgctgagctgttcgatgcactcggcgaggatcagctgacgttcactgcaggggactaagtaccggcatgctcgagtttctgctgcatccggtggtgccgatgtcgctgttggccgtgtgggtggtgtgggcacatcaccaccgcaagacaccgcccgtgctgcccaagatggaccggacagcggcccggcccggtgatctttccgctggcggttcgacggcgacgtcgaagaccgagcagcgggtgcgaaaggtgttggaagacgccgggtatccgacctacccgcagggaacgctgatgtgcatgggacgtgacagcgccggcaagaaccggttcttcacgcccgacatattgatccggcggccattcgctgtcgtcgaggttgatccgcaccgttggcacggcaccccggacaaggttgccgaggacatcatgcgtaaccggttctacgccgcgcgcggtctgcgggtggtccgggtgcgcatcgccggaactcaggcgctgagccccaacgacgtggtgatcgagcagtcggatttcgatccggcccgcgacgggaccgcggtgttgcgcgctgtggccggcgcgcggatgctgccgccgacgttctggaccacccccgcggccagcgcatgaccggcgcccgaacgccatcgtcgtgctcggcgtgcggcgctccggttgccggctactacccgcccgatcccgaattgccgcttcccggtgtgtggctgtgtgattcgtgcgtggacccgcaggtggtgcgggcacggttggcgagcgagccgcgccagcccgttcggctgtctggggtcaagcgcgcaggtgatcagcagcggtagaccgctgagtaccacacggtgcacccttcgacgtacatgcccaccgcggccagtgcctgctgcagccgctcatgcgatgcgtgatcgccgtagtcgaggttgaaggcccgcgagtgatctccaccgtcatgagtgatcaccagcagcgaacgtgtgccgtacaactcgccacggtcggcccactgcgtcggactgtaaaaccgcccgccgccgccgtgttcggtcaggttgtgcacgctgaggaaggtgcgaatggtctccgcggcggtgcgtccatcgggggacaggtcatcagggatcggccatagcgtctcgactggtgtgctcatcgtttcctccgtgtgcggcgtgccgggcgcgcacgcaccggcgtggcgtggtgatgacacggtcccgtgtcggcgggccccacggctgccacggcgcgtgcgcgccccgctcgccgaccatggaccgcggcgggcacagtcgcgctgccacagccgacgagaggaacgccgccgtgcccagtccgaactacgagcagctgcgtatcgatgtgctccaggccgcgcgtgaaggtcgcgccacctacctgccggcaggcgcgcgcgataacgccaccgctcaggtcttcatcgacggtgagctaatcggacaggcatccacggtcgcgcattacgtgcgcgaggatccgtcgaacacgacgacattcggggagcgcaagctgcttcccggctacgaccaccagatcccggaacggttgcgctgacgccggtgcgagtgggcgcgtcggaacctggttctccgtgcactggtgccacgcctgcgaagcagtggaggaacgatgagcgacaaggacacccacatccccgaatggatcccgatcgcggccttcgtcggcatcgtcctcgtcgccgtcgccacgttcgcattcgatgagccgccggcctggctggcgatcccagcaatggcgctgctcgccgcagccacggtcgcggcgatgtcgcgtggctggttcgtggggtggagccctcccgcacggcccgctgctggcccgcacccgcagggcttggtggggtcacagatcatgtaccgcggcgtgacctacaccgtgctcgacgacagcggactggtcggcgacggtcgccgaggcagcgtcgtggcggccgatgggtggggcaggaccggcctgttgttcctcggattcgacgcggccggcgcagtgagcgaggcgcgtgtcgacggcggcgactgggcgccggcgcaggtaatcggctgacacatcgcctcctggcacaagcaatctcgcaacctaggagagcggctctaccagttccaccgagttgccgtcggggtcgcgaacgacgcggactcgtccgtagtcgaggtcacaggggccggaagctgccggggatcctgccgctgagagtgcctgcagtaccggagagctgtcagggacggtgaatctcagacggactcgggtcggcgggcgggttcctgctgggtagagttcgaagaccaggccggtcggcaaggaggccacgtagtgcagggggccggatccgtcgcgcttctcgtggaaggtgatgccgcaggcgcgatagaagcgcagtgaggcgtccagatccgtggcgtaaacaacgatcaggctcagtggtgttgtcacttcggtgaactccatttctccggaaggctgcttgtgcgcgccggttcacccgcggggtgaactggggcgtcgtttggacctacgtagctgcgaacacgtagccgtcgccgtcgggaacccatgccccagaggggaagccgtggtcggcgaccagcgatgcgagcgctggtccgcacacagctgtgtcggctccgctcatccggaccaggacggcgccgttgtcgtcgaccacctgccagttccactcgctgtttccggtcggttgcagtcgtgcgtacatgcgcgcctcctcgcggctggggactgcagccgagtctgcccgccgcgggaatcggcagcggcccgaagcgcggcccggaactaagcgccgggcgcggcgtgacacccgatcagtcggtaccacgttgtgcgaggctgtttttgtgcggtgggccgccggggcccgcatcgtggacacggggagctgggcatggaggtgttggtggtggtagcggcgttggcgttcggggcgctcgccgtgatccgcagggcgctggctggccaagacacgtcgacgacgcccgagcattcaccggagctgcaggggttgatgtttgtgcggctcgagactgtcaaagtgtcgcgccccgaagagatggccgaggctattgcacgggtggtccgtgaccgcacaaacaacatcctcgccgccaactatgtggtcggtacgccccaggtatccgcagacgggctcagcgccaacgtgccgttgtaccgccaaccctgacagtgacccgcagcgcagctgggcgggctcgtcacggcgtggcggtgaaggaaaggaacaccgtctgtgtctggccggcgacggcagcgcggacgtcagcgtcactgctgacggggtcgccaccggcggcgcggatctgtgtggccaccgattcgagggccagtgccagggcttcggcgtcgtcggggccgctggtggacgcggacagtgacaggttcatcgacatgggccaagattcgcagtgaccccgtcctggaccggtggcgcggcgcgtgcctcaccgacccggcgggcgggagcatgcagcgcggggagtccgcctggaaagttcacacatttcggggccacttcacacaaacttcgcactcaaccggtattcggggatgatcgagatgcctcatcagcccaggtcaggaagatatggcatccttggggcgacctgggaaaacgtctttgcgtccgcctcacacgcggaaggtcgctggttcgaacccagccgggaccaccatcaatatcccgggaaaaggctacttttgtcgccccggcccgtgctgggacgacctgtgctcgggtcaagcgcggctgggcgattcgcgacgtagttccgcattcgtcaagtgctccaccaataccgaactggctaggcccggcgttggaccgccgcgggaaagcgcgattcgatcgcttcaagcatgcgatcgatctggcgcagatcgctgtcgacttgccggatagtccgcctcagcccggaaacgtcgccgccggtggacagcgtcgcggcggccaaggcctcgaggcgcgccgattgctcggcgagatgcttgcgctcagcgccgaggaaagcgcagcactcaatggcctgcagcaaatcagattccgcggcgagttccttctcacttcgcaccaggtcaactctaacgcgtgcgtcgattgacggtccgccaccgccgatgaactcgtgttgggctagctggtggtctgcggtgcctccgtgtcgtgggtgcggtcgcgggcggcgcggcgttcccggtggatgcggttgttgacgatgtgttcgacgaggatcgggacgaatgtctggattctggcctcgtcgaactgcgtggctgcgtcctcacaccagcggaggagttcggcattgcgctcgacttgattgaggccttcatggtcggccagcttcttggccac

SEQ ID NO: 3590 - DNA, 8508 bp, synthetic construct
  source 1..8508: mol_type = other DNA
  misc_feature 1..8508: note = Synthetic
aaagctaactatcattataacagctatttttatattctcatcttgtacatatttcacaaatgacggagatattagcctcaacgattttataccaattaaaaacagttatgccgaagagcaaggttcaagttatggcgaatatctagccggtagggttgctcaccttagaagtgattatcaaaaagctgccaactcttacaaatatgtaatagagtctgggctcaatgataaaatgctaattgatagaacttttatgctcctaacctctacaggtaaagttgatgaagccgtaaaatttgccaaagaaactgataaaagtggtaaatctaccaatctaactaagattattctagctacctatgaaattaaaaatgaaaattatgaagaagctaaaaaaattgtaacttctcttcaaggcgatgtttacaaagaattatttattcccctaattaattcttgggtttatgttgccaagggtaataatgataaagccattaaagaattagatgttatcaaaaagaatgaagccttactagctctatatcactaccattcagcaatgatttatgatttagcaggtgattatgagaatgcagatattcattatcaatccctaatcaatgatagtggtacggatatttcctttagaactctacaagttgcaggtaatttctatatgcgaaataaacagcctaacaaagctatggagattttaagaaaatatgaggaagaaaacacagggctaacaattgaaaaaaatgttttaaatagattttctccaaatgctaccaaccaaccaagattgataaaaaatgttactgatggtttatcagaaagtgtttttggtatcgccgctacagtaaatcaaggcttaggaattgaccttgcatttatctttatcagactttcaatctatctaaatccgagcaatgatttggctaaatttttattaggagatatattagaagccaaggggttattcgccaaagctaatgatatttataacgaaatccaaccatcatcagatatatattatagtgtaagatttaaaaaagttgctaaccttatctcaagggaggagctagcagaagctgagcaagaactccgaactctacttaaaactcatcacaataaaaatgagttatacaccacattggcagatgtgcttagatatcaagaaaaatttgaagcatctttaaatttttatgaaaaagctatcaaaatgctcgacccagaagatccaaatgcttgggtgatttattatgcttatggtgtgtcactagaaaaagtaaaaagatggaccgatgcagaaaaggctttttacaaagctctaaaattaaaaccatatcaaccattagtgatgaactatcttggctatagttggttagataaaggtaaaaacattgccgaagctataaatatgataagtaaagcctatttgcaacgaccaaaagacggctatattgttgatagtcttggttggtctttttataaaataggggactataaaaccgctgtaaaatatcttgaagaagcaattgctctagagcctcataatgcggttattaacgatcatttaggtgatgcctattggatggtaggtaggcgaaacgaagctagcttccaatggcaccatgctataaggcttcaaagtgatgagggggaaatagataaagaaaaaattaaaagcaaaattaacaaaggtctcaaaaccccaaccccactacattttgaaggtaatatcgtgttagaaaaaggtgtcgagtaggacgatttataaatacctaaacctagcctatatatctccgaggatagcaaacgatataatggattccgaaatcccaccacatataaatctacaaagactcttcgaactcagttctaagcatcgagattttacaaagcaggaaaaagtgttttatagataactatctaccatcattttcattggttgggtgttgaggtggtttttgttgtttatgcttttctatattaggtgtattgtctggattgttttcttcatttataccgtttagcttatctttaactctaccagttctaaatttactttttctttgagagaatctatcgttcatatttttatattcatcattattatttttatgattactttgtagcatttgaactatatctgcggcattttttagacctaataatttttctaattcaagtttactccatttgcttctatggttttctatatttctagcaaataatttaatattaccatcaatatactttctagcaattttcacaggttctttaaatgagttattatatacaaaagcttcatctgctaaagcaaaagcttctttcaaaaatgccatagaccttttatatctatttacaattttatcagtagggacatcatgtcctccacttctaactcttttttgaaccctttttaaattaatatcttcatcttgtgtagccacataaaaaaggtttatatgaaatcctttatctttggcttctttcataaattgaacttttgattcatgggacataacagtttcaaatgcaaaagattctcttgcttctagagattttactctttcagcttcagctattgctgcagcttcgtatgctgatatatcatctttagaattagcttttatatcatcagcatttatgtagtttttaggaaacccctcatactgagatacaattcttgttattgtactcttccctgaaccattaggtccagcaaacatccatatttggggttttctataacctgtcatctctagcttctttagggtttatgaaggttttttttccatcagggctttcttcgcatagtttaccagtttcttcatctaattgaactgtagaaatgccttttctgtgtaagtctcttcttgcctctaaaacagatttttttaccatattatctatcttttcgtcatctagacctttatattcttcattttcttctgtcattttattgttgctccttgtttaacataagaggtattatatactatatatgactgtaagtaaagaatatttagatatacttaatgtagtatgtagggtagtgactctgccgaaaatggcagtgtatagcaatgcataaaaatgccgataaattacccttgatttatgttgtatacaaaaagttgggctgtgtagggcgcagaaatgcgggtaaaaagaaaccctcttaaaaaagagggttaaatggctgggcacaagataaattagtagccatctatccaagattagcaaataacagggaaaatacagggaaatttcaccactttttgagcctgtttttaactacctctgcgtgcaactccacaccccacctcaaaaactaaaatttatattgtcaaatctccaaaaattaacagggaatttaaacacaactaacagggaattaatgagagggtaaatcatttaaaataaatcccagctacctaagtaactgggactaaatatcgaaataaatttcttattaacgaatcagacatttaaaaccgatatgctatcttaactacgtcaataatttatctgataaaagtaatctacgtcaaaaaaaatataaagtcaacttgatttatttgttttttgttataaacttctattattagtttattaggagatagagatatgaaatacagattaggtttagatatgggtgcaacttctattggttgggctgttataaatattgataatggaaatatagaagattttggggttagaatttttccagatggtagagaagacaaaagtaaagcctcattatgtgtaaaaagaagagacgcaagaggagctagaagactacaaaagaggcatattataagaaaaaatcaaattataaaaactttagtagatatagacttatttcctcgaaatattaatgagagaaaaaatctagaatttaaaaatccttacgaactaagatcaaaagcagtaacccaacaaatagaattatatgaacttggcagagctttatttcatctttctcaaagaagaggctttatgtctagtcgtaaagatgacaaagaagagggaggaaagcttaagaaggggtttgcagatcttaaagaagctatgaaagcagaaaattgtataacttacggtcaatatctctatgagcaacagctaaaaaatcctaaagataacataagattaaaagactcattcgatgaaaatggtaagtttaaaggtaataaatttccttttagagaaacctataagcaagaatttgatatcatatggaataaacaagcgatgttttatccgcaaattttaacatccaaaaataaagaagctttgtttgatattatattctttcaaagaccattaaaagagcaagaagaaggtttttgtatgcttgaagatggagagaaaagaatagcaaaggcaagtcctttgtttcaagaatttagattattgcaagtgattaataatttaaaattttctgaagaaacatcagtggaatataaaattattaatgaaaataaaagaggagagcttattgaagctttaatgaatcctgaagaaataaaaactactaaagatggacgagctagctactctgaaataaaaaaatatcttaagttaccatctaaaggagtttttaattatgaaaaatcagaatctaaaaatgaaaattttgctaaaggtgttttagtagataaaacacaattagcgattaatgaaactctacatttgaaaaatgattggaacaaactaggttttgaaaaaagagaaaaattaatagatatcataacaagacccgaaaattatattgaatttccaaaaactaaattatctattgaaaaacaagaagaaataataaaacaatttattattaaggaattttccttttctaataatggagctagcgagttattggagctaagtatagaagatggttttggaaatttatcaagaaaagctattgataatattataaactatatgagaaaaggtttggaatacagtgaagcctgtaatgaagcaggataccaccacagtcttaaaaaatataaaaacattgatagattaccatattatggggaaatccttgaacaacattgcttaggaagaaaagaaaaacctaataataatgaagaaaaatacggaaaaattaataatgccacggttcatgttgctcttaatcaattaagactaatcgttaacgagcttctatctttatacggtaaaccattcgatatttctgttgaatatgccagagatattaaagcttctcaaaaggaaagacttaaaatgtctgatactagagacaaaaacgagttagaaaatcaaaaaatagtagaagaagtcaaaagtaaaataggtttaacaatatcatctagagtagatattcagaaatataagatatggaaaaatctaggaaatcaaaaaggaggtaacgttcttgacaaagaatgtcctttttctggtgagaagataggattaacagaattatttaacggtaataagtttcaagttgaacatattttaccattttcgagaaccatggacgactctctagataataaagtaatagcaactattagctctaataaatacaaaggaaacagaactccgtgggaagcatttagtgaaagtaaagatggctttaattggaaagaaattcaaaaaagagcaaaaaaattaccattagaaaagcaatggagattccaaaaaaatgctatggataagttttctaaaaatgaaggtcctattgctagagcattaaatgacactagatacatgacaaccttaattcaagaatatctaatgcctatatgtagcgaaaaaggttttaaaactattcaatctattccaggacaacttacttctatggttagaaaatcttgggggcttaacgaatataaaagcaaagacaatgaagatgattatagaagttttcataatcatcatgccattgatgctataattgtttcctgcatatcaaggggacaagtaactaaagtttctaaagatttgatggaagctagagacagtataataactcatttcaaagaagatttttataaattaagagattttaatacctccgaaaaagaaaggaaggaaataaaagaaaaaatccgtaattttagaacggataaagaagctggtatcattagagaatatatccctgttcctgatggtctagacatatctaaggttagagaagacgtcgctaatataaatatttcttataaacccaagttaaaagatataaaggacagaaagtctactattggacaacttcacgaagatacagcctatggccttgttaaattcattgatgaaaatagtcttaatgctgaatttaaaaccattgatttgaaaactaagaaaaagaaattagttactaatgatatagtcacttatattccaatatttagaaacaaagaagacaaagatgaatattataatgcttataaagactggtttataaatgatagtaaagcaagggctatgattgcgaagaccaaagatgaaaaagcattaaaacaagctcaagcagaaaaagaattaaaaactattgaaaaactcagaaatgtttcaataaaagcttttaaatggtttgtaggcggaggaaacttttgtgcagaaatttatgaagtaaactctaataataaaataggaggattaccaactaacaatcaagcaaaatgggaaagtgaaataatttctaactataatgctactattagagaaagaagagatgaaaaaatatcttattggcattctaaatatcccaatgctaaaaggataatgactcttaaaataaatgatatggttaaggcaacatttactagagaagaggcttttgatgaaaaattttctaagggaatccaaaattatgttagagaaagatttgaatttgatgaaaatttagaaaaaactgatattttatttagagttaagaaaataagttctgatggaacggtattcttaagaccacatagcatagctaaagaaaaaagtgatactaagtgttggattgctagctcaggaagcttaaaaaactatagagccagaaaagtttttgtaactccagcaggtaggataaaaaatgcagcctaatattgttgagatatctacggacaataaaaaactttcggtttatcgaggttttttaaggattgaagaagatggaaagattctcaaagatattccttttgggcatataaatgctttaatcattactgctagaggaattatttataccaacaatgttttacaaagattatgtgaagaaggtattcctttggttgttttaggacgaaattttcatccctctggtatattattgtcttatataggtcaacacagacaaatgtctgttcagatggatcaaatggaaaataaaaaacctttacagaaaaagatatggcaggaaataatcaaagagaaaataaaaaatcaatcaaaagtcttagatatttgtaaaaaagaaaacagaataaaagaattgccgaataaagttctttctggagatagtggaaatacagaagctcatgcagcaaggctttattttagagacctatttggagacgaatttagaagaaataaagatattgaaggtattaattctttcttgaattatggttatgctattattagagcttgtcttgcaagatatgtagttgcatcagggcttaatccttcttttggtatagaacaccacaatcaattgaatcctttttgtttagttgatgatttgatagagccttttagaccagttgttgattatcaggtttataaaatatttgaaaataatgataatattgaagagataactagtgaatataaaaccatactatcagggctacttactaaagattttaataatggggaaggaatttcacctttttatatgattttgcaaaagattgtttgggacttagtgaatatttacaagaataaaaaagtagcatttgattttaacaaatatcttatagaagatagattgatataatgaaatataaaaaaggagatataagagaatattttaatgggagaaaattaatgtggatgatggtaatgtttgacctaccaacagatacaagagctcaaaggaagtcctcgtcaaaatttagaaaatttctacttgatgagggtttttcaatggttcagttttcagtttatgttcaatttacaggaacattagaaagttctcaaaaatatgtaaaagctatcaaagataatattccacaatatggagatattaatattttgttttttacagataaacaattttcatctataatacacatagaaaatcttgtggaaaaagatatggaagaagcccctccacaactagaattattttaaaataataaacgaatcggaaaaatttttagtaaaagatagtgttaaaaatcgaaaaaaaatgataaaaaaggtaatttcatatgattaaaaaactcatttttttggaaaataaaaaccctctaaacctcacagaaagtgtggtttggagggttctattatagcatatcggtttta

SEQ ID NO: 3591 - DNA, 23468 bp, synthetic construct
  source 1..23468: mol_type = other DNA
  misc_feature 1..23468: note = Synthetic
agcattggaggtactccagcagccttagcaaccaaagcatcgtctgctccgaaagtcggagcggtgtgaactatacctgtaccgtcttcagttgttacgaaatctcctgagattatgcgaaaggcttgatttggctcactcataggctgcgcccaatttatcagctgctcatacttcaagcctacaagatcagcccccttacatcttcctacaatttcaaaatcaggccccttatgaaactgcttttctactaacttctcagcaagaactacaagcccttcttcatctgtgtacctgtttttcgttctaacaatggcataatcaatctttaatccaatggttaaagctgtgttagaaggcaaagtccatggagttgtagtccaggcaaggaaatctacaggcaagttagaaatctcacttccctcactattttcatcattacaaaaacctttaactttctccgcactttcctgctctgcacggaactgacccacaatagtcgtatccataacgtcacggtaagtacctggttggtttaattcatgcgaacttaaaccagtccctgccataggactatatggctgaatcgtatagcctttgtatatcagtccttttttataaagctgagacaacaaccaccacaccgattctatatatttactctcataggtaacatagggcgattccatatcaacccagtatcccatctgttttgtaagctcattccaaactccagtgtacttcatcaccgcttttttacaagcgttattgtactcctctacagtaatagttgttccaatatcctccttagtaataccaagcgctttttctacacccagctcgacaggcagtccgtgtgtatcccacccggcctttctatcaacgcgtttaccttttagagtagcatatctacagaaaatatctttaattgatcgacccataacatggtgaatcccaggcataccatttgcagaaggggggccttcataaaatatatacgggttatctgccgagcgagagtctatactcgcctgaaatgtattctcacgctcccagacctccaatgcttctttcgcaatgtttggaagatttagtgagccgcgttctggaaatcctttcgccatcaaaatttactattgggtgtcgcgaagataatacgccttgagccttttatctcctcagactcgactgagttttagcatattcgtcatccctgcatcagcaatgggcatagaggccatgtgtatcacgaaatcgccctcttttaccttcccttctctgaataaaatgtatttaatgtcggcaatagtgtgatctgtgctgaccatcttagagtagaacactgtttttacaccccaaaccaaattcatttgactcaaaacctctctatttgaagtaaacataaagattctagctttagggcgttgactacttactttttgggctgtgtagcccgagtaagtcatcgtaactatggcacttgccttagttcttctcgctagacgacacgcattatagcatattgaatcagaaataaagcggtcatcatcggggttataaggaggtctttcattaaacggtttctcgttactttcctccatcttagtaattatctcacacatagcttttactgcgtgaatgggatacttacctacgcttgtttctgccgatagcataactgcatccgcaccatctaatacagcattcgcaacatcatttacctctgccctcgttggagttgcactttcaatcatgctctccatcatctgtgtcgcaacaattactggacgagatagagttaagcatttcgagataatctgtttctgaagcaggggaacatcttgcataggaacttcaacacctaaatcacctctcgccaccattaccgcatctgacgcctcaagaatcgcgtcaagctcttcaatcgcctcgggtttttcaatcttagccactacccttgcgtgcttcttatgctttttaattatctccttaagttctacaatatcttttgaagaccttacaaaagaaaggcctatccaatcgacattttcctcgagagcaaatgccaaatctacttcgtcctttttagttatacacggaagcgaaatctttgttttcggtaaatttaaccccttcctcggtttaagtatccccccgtgaataattttacaaatgacttcagatttcccatttgacgatagaacttccagcataagctttccatcatcgagcaatacaggctctcctttctttacatcttctgcgaactgagcatagtcagtataaactatcccatttgcacccacacctactcctaccactatagtaagctcttcgccctcgacaagagtcatttctcccccttcgatgtctccaactctaagtttgggcccctgtagatctattaaaattgcagtactcgtttcaagttcttcatcgagcttgcgaatatttcttatcacctgtctatgcacctcactatctccgtgagatgagttaatcctaaccacattcatcccagcaagtaaaagttgctctagcatttcaggagatgatgttgcaggacctatagtcgctataatcttagtttgtttaatcggaaataaagacggcttattcattctctttgttatcaatcttaataatatctaaatcatacaactcgcctaaagctcctgatcgttcaggatcaatttttgtaaccatagtaactaggtttgaccttctaatctcagaaataacatcgtgattatctaaaaaatcaattcctaatttgagcaagtagtctaaggaagacgctccagatgctagaactccgccgggaactctattcaaaattaacgcaacatctaacccttcctccctatcaataaatgtaaggacaatatgtttagtgtcgttattcttattgtatgaagttattaccctatcaaactttaagtcccagccgaaaattctgtttaattcccatgctaatctatgacttccaacatgcgacccgatacccagtagtcggaaatcacactccatttccatatctagctgaagttttgccataattgactaaggtagttgcttatgactgattaccctcctccaaatcaaaaatgtgcctccacccttttctagcagcctcgcgctcggcaatttttttcgacctacccacgcctgtgcctatgcagctatcgtcggcaaacacttctatttcatacacgttttcaccgttctctatagactccttaactactttaaaagaaagatgaacgcgagatttttgggcccaatgatgaagttgactcttaaaatctgtggtttcgtgaatcttctcatctaagccaaacctctttaataatttcaccaaagccacgttcgttctactatacccgtgatcaagataaatagcccctattaaagcttccatagcattacccaccatattagggcgaatatctttacgcctcatctttacctcgagtaaatcctctaaccctattttagatcccagtaaattaagattttttcgacttacaatcttagatctacgttgagtaagtgcaccttcttgagcactctcgtcctgtttatagagatattctgcgacacttaagcccaaaaccgcatctcctaaaaactccaaacgttcattacttttctttcccgtcttatctccgtcaagaactgaagaatgacgcagcgccttcttataataagatattttcctgactctaagacggaagtactttcgaactaacaccctaatatcctcatcagttttatcaccaataaggaatctctttaaaaactgcattaagtactctagctagagtatttcttaaataacactgacgcgttgtgacctccgaaaccgaacgtattagacaacgctgcacccacatcgcgtttgcgcgccttgttaaatgtaaaatccagtttaggatcaagatcttcatcttgatgttcgaaattaatcgtaggagggattattccgtgctcgattgccttgatacaggccatcgcctcaatcgctcccgcagcccctaataggtggccagtcatagattttgttgacgaaatactcagatcgtatgctgcttcaccaaacaccttttgaatggcctgggtttcagctatatctcctaaaggtgtagaggttccgtgaacatttacgtaatcgacatctgaaggctgcatccctgcatcttcgagagttgctctcattacattagtagctccaagaccttctggatgaggtgcagtaatatgatgtgcatcagcactcatacctccacctaccatctcacagtaaatcttagctccacgagctaaagcatgttcaagagattctaaaataatagctccagctccttctcctaaaacgaacccgtctcgagttttatcgaatggtcgtgaagctctttgtgggtcgtcattacgagtagataaggctttaagagcgttaaaacctccaattcctccctctgtaataacagcttccgagcctccagtaaccataacctcggccttccctaggcggattatattaaaggaatctattagggcatgagtagaacttgcacaggcacttactgtagcgtagttagggccacgtaaaccgttcgagatacttatgtgaccagccgcaatgtctggaatcatcataggaataaagaacggagaaaatcttggtgttccgtctccatgatagaagttctttgcttcattcataaaactctcgaaccctccgactcctgaaccccacactactccagatctatcaggatctatcttatgttttccggcatactcaagcgcctcttctgacccttcgtcaccgataaacccttcagctactatacctgcatcgttaagagcttggcgcgcacttacaactgcatactgagtaaagagatccattcgtctcgcctcgcgacggtgaatatgatcttggacattaaatccttttacctcacatgcaaacttagtcttaaacttagttgcgtcaaatcttgttatcgctgctgccccgctcttacctagaactaagttcttccagtaagtttcagggtcatttcctaggggcgttaatgctcctaatccagtgacaactactcgctttagctccataaaaacgccctttggcttacttagtagctttctctatatgctcaatcgcttgacctactgtactaatattctcagcttggtcatctggaattgcgatattaaattctttctcgaattccataataagctctactgtgtcgagagaatcggcacctaaatcgttagtgaagcttgcctctggcgttacttcgttagcatccactcctagcttatccacaatgatagctgttactttttcactaatatcagacatgataatcgtattcaatttggggcaaaattaatctaatagttcaactctagccaatattatggagaaagttttaaccaaaatgatgctaattgattttcttgacaagcacaatttacgcccttaatccctactatagttgaagttattcgataaatatcaaagcggtaattagctcaatattcctttagaatttctgggagaatcttgcgatttaggtttggtacctcacaattatcggcaggaaaaccgaaaggaatgttcaaataagctctttcattatctggtctattcaaaatttctgcgagaaacttcataggagatggggtgtgagttaaggcgactaaacctatctcatgcaaggctgtcaacaacattcccacagcaatccccacactttcgtttacatagtaatttgtcgttcttcccgattcgtctgtaccgtaagcatgtctaaacactattattaaccctggtgcattttctataaagggcttgatatgatctgttccgaaaggttctaggtctttcatccactcctcactcatccttccatggtagtttttatactcttcttcttcagctgcagctcttattttcttgcgaatttctggatctgtaactatgcagaaagtccaaggttgtttgtgggctcctgaaggtgctgtgccggcagctgcgatacagtttctcacagcttcaattggaacttcgtcagaggaaaaatgtcttacgctccttcgattttgcattttattaaggaatgcttcgcttcgctttaacatttcctcttgagaatacctaatagggctatacttcatagaggttatttgctcgatttatctctaagcttccgcataagcttagatgcgtatatgaaatcatttagagtttcagaatcactcaccatcatttctgcgttatcccctttgaaagcgatttcgccctcgtggataaagtgaattgtatcggatgcttctataacactattcatatcgtggctcacaacgacagtcgtcattccatattcacgtgtgatatctacaatcaggttgtcaattactatggcagtttgtgggtccaaaccggaatttggttcgtcacaaaataaatatttgggattcatagaaatcgctcttgctatacctactcgtttctgcattcccccacttaattcgccagggtacttatcgccatgtccatcaagttctacacgagttaaacaatccgctaccctagaagacatcgcttcttcatccatatcactgaacatttttaaagggaacttgacgttttcttccactgtcatggaatcgaaaagggcgcctccttgaaataacattcctatctccttgcgaatttctttgcgttgtctcctattcatagtcgtaaaattccgaccatcaaaaaacacgtgaccgtcatctggctcgagaagtcccaccgtgcatttcgtgaggacactcttacctgagcccgatcttccgataataaaattgacttttcctttctcgaaagttgcacttacgttctttagaacggtgtgtttcccgaacgactttgatatattctttacttcaatcaagttgtcgatagattacgttaaaagtagcttcgtgaggacaaggtttgtgagcattatgatcactacgctataaactacggctttagtactggacttagcgacctctagagctcctcccgaagtaaaatagccgtgatatgctgagaccgacgtcataattaatgcaaagaccgttgtttttatgattgcgtaaacgacatcgtatgaaacgaaatccacttgtagtccgtactcgaaatcggccatactacttacgcccgtcagtaaagcaatccccgctcctgatgccagtcctaaccccatactcatcactactagtgcaggaagacaaataaaaccggcgataattttcggtaagactaagaatccagcgctatttacgcccattatttcaagagcgtcaatttgctctgtaacgcgcatagtgcctaactgagatgctatattagaaccgacctttcccgctagaataacggggattaaagtgggggagaattccaaaatcatggtttggcgtacagtaaaacctatagtataaacaggtatccaaccgctgatttggtgggcagtttgcagacacattaccgcccccataaatacgcttaggagagcgacaatacctacgctatcagtacctataatggtcatttcctgaatcaattgacgacgaaaaatcgtccatttgtcaggttttcgcattaccgtagcaataaaccgcgtatatcttccgatgttaaagatgatgcccacaccgctaaggtacacgtaactattcttaacttcaccccatgaataaacgacttgtcaagccacttttgttatgcattttcgctctagcttttataagtgggtgcgccacttctcatggaggttgcaacacctgcgatgcttacaaccaaatcgatttggactgtaatgagtaagccttctgagacatttgctattattatggctgggggagtaggcactcggttttggcctatgtcacgaatctctaagcccaaacaatttcttgacatcctaggcaccggtcagtcgttaattcaaatgacttttaaccgactctctaaggtagtccccccttcaaacatccttgtcgtcacaaacgaaatttacagaaaccaagtctcctctcacctaccctctatccccgcttcgaatattctatgtgaaccctgtatgaggaatactgcgccgtgtatcgcgtatgcaaacgctgtaattagtagcagattgagtcctcaacgtgactcgtctgatgttggaatcatcgtagctccttcggatcaccttatcctcgacacagcagaatttgagcgcgtcatctcccttgcgttattgagtgcttgctctacctcgtctctccttacgctcggaattcaacccacccgtcccgataccggttatggatatattaaattttctggtgaaggtgagattgcgaaggtcgaacaatttacggaaaagcccgatctagctaccgccgaaaacttcctcgagcagggagattactgttggaacagtggaatttttgtttggtctttaaaaaatatctcacaggcattctcaacccacctccctgacatattcgcttctttcgaagatgaaggactcaccggttcccctaacgaggctgactccatctacaactcctgcgaatcaatttctatcgactatggcatcctcgaacgcgccgaggacgtacgagttatcccatgcgacttcggctggtctgacctcggcacttggacttcgctcgcaagtcatctacctcaagactcctccggcaatggcgtctctggagctaccctcatcgagtcaaattcgagcagaaatgtcgttgtctctcaggctgaaaaaaccgttgcgctccgtggactcaacgacttcatcatcgtcgacaccccagatgcactcttgatttgtcctaagtctgacgaacaatgggtaaaagagctcgtgggcgaattagggaggaagggtaaaaagggtgcagaaggactgatttagatcaccgttaggtcgaaatacattagcctcgtattagcaccttcgtcgttctttgtgagatattcgaagccatttttctcgtagaattttaatgaatctctgtatgcgtcaacggtgatgaatttacatcctgatttttgggatttgcggaaggtttcttttacatattgaatcattaagctacctaaaccctcgccattcattttaacatcaactgctaatctgcctattttaaccgctggatagcttttaaattgcttcccttgtggcatagactccgtgaatttctgtttccactttctgttactttgagattctttctttgagaccttgtcatttaacagactgaaataaccaacagtgaatttaggtgtctggacaatataagtagtggctaataagttctttttgaaattcttagactcattgagcagaaaactatttaagtcatggtctccacaatcaaatggcctaataactttagtttcagatagtaattctaatgaaagcttttgacgaagattcaaaacttcgaaatcgatttcataaactcgtaaccctctctaattttctttcgctcctcatcactaatcttctgagtctccgcccgcttcatggcagcttcaaaacggcgagcatcttcgccgtatagtatcggtgtttcttttataggtcgtgccatgacattcagtcctttacaaagttaatcaattttttaatacaaaggtgaagagttaagtcattgagtattaaaccaaatcataaacgacccttataagtttgtaaacggagttgataaaaacttttaaacacagtgaaggcgacccagtaggccgccttcaatgttttcacaacggaataatccttattgtgattggcacaaattccattgcaagtatatgatgttatctgacaacttccaaacttggaaatagattttatttacttacattacattttgtttagtacgtaaataggttacgttgtggagcaaatagatttaccagttacactgaaataaacttaatgatatgaaaaaaattctaggacttgatttaggaacggcatccattggatgggcttttctaaacttagatggcgacaatagtgaacttaaagcaggggtcagaattatacctttaaatcaggaagataaagctgcatttgaaaagggccaaagcattactctaaacgctgatcgccgacttaaaaggggggctcgaaaaactcttgataggtggcaaatgaggcgtgaaaatcttattaattggatgctgaaacacaattgggctaaatctagagaggagcttctattaccaagctcaggatggagcaccttcaacaatcgaagcaaagcagtaacagagaaaatttctcttctagaacttggacaagttattcttcgtcttaataaaaaccggggctttaaaagtaatagaaagacagatagcggagaagaaaactcaactgattacaaaaaacaaatagctggtagagataacgaactagtagaaaaaggactgacaatagggcaaatatttgtacaggagcgtgatgcttggcttgcaaatcctgaaggtcctgaaccacacttcaatagtcgaacatactcaagagcttcagtagtagcagaatttgaagctatttggtctgagcaaatgaagcatcattccgaaataacagaagctgatagaaaagaatttagagattacgttcttttttaccaaagacctttaaaatctcaaaagcaccttattggaaaatgtccattcgaaacatctagaagggttgcaccaagatcttctcctgtatttcaggaattcagattatggcaagacttaaaacatttcagagtaatcgaaaaaaacggtggttctagacctctaacttatgatgaacaaatttctttatctactgaactcaggtctgttagttttccaaacaaaacaaaaattcttagatttttgggactttcaactgcccaatttactgttagtgttgaaaaactaatcggtaacatcttttcttctaaagtcgaaaaaatcatcggtgacgacagacttgaatttgttgaagttgattgtactcttgatggaaatgaattcgataagcagccatctatgcagctatggcatttgctctattcttctgaagatcatgaccatttagtcaattctatagtaaaacgttttcctgaaattactgaagaggaagctgaagatcttgcaaacataaaacttcctgacgatcacgctcgactttctcataaagccatcagaaaaatactcccttttattcgctctgaggaatgtcctgactacttctctgcatgtgcttcagcgggatataatcacagtttttccgaaacaaaagaagagcgagaaaagaaagtcttaaaagaaaagttagaacctattctacgaaattcattaagaaatcctgtcgtcgaaaaggttttaaatcaagttgttaatctagtcaatgccattttagaagatgaaaatttaggtcgccctgacgaaattcatattgaactcgctcgcgatttgaagaattgtgcaaaaaaacgtaaaagcattacaaaaaataatcgggataatgaagctaatagactaaaggtaaaaggggagctagaaaagctagggcagagaacaactcgatcaaacattctcagataccaactttgggaagagtgcgatagaataagtctttacaccgggaatcctatacctatctctaagctgtttacttacgattatgagatagaacatattatccctcaagcattgatattcgatgatggctacctaaataaaaccataagcgaacgatctgaaaatcttgctaagggtagtaccaccgcaatggaatacatgcaaacaaaaggagaggctgccgtagatgcttatgaggcacgtattcgtagagccaaagggatttcaaagcctaaagctgacaaactacgttggttgcgtggtgatatccccgatggatttatagaacgtcaactcaaagaaactcaatacatcgccaagatgtcgtattcccttcttaaagacatctctcgtgaggtaatacctatggctggatctgtcaccgcatacctcagacggcgttggggtcttgaggacatgttaagccagattaatttccctcgttatgatgctataggtcaaactaaggaaattaccattaatcataaagatggatctcaagaacaaaaaataattgtagatgattggtctaagcgtgatgatcacaggcatcatgctatggatgcgataacagttgcttttgcatcatacagaaattttcaatatctgaatactttaagtggcagagatttagaaattgatgattctggtgaaaaagacgctgctctttctcctcctatttctaaatctctagttcgcaaactttctaaagatgcgatggaaaacattcttatttctagaaaagctggaaaacgcagctcggtttggagtaagtaccagtcgaaaactaagacgggaaaacactctggaaaacatcgtatcccaagaggacaactacatcttgaaaccgtgtacggttctcgattacgccatcttccttctccttcaatcctatctaagatacctgaagacttgagtttaattgtagagcctgctattcgtgaagtcattaaagaacgccttgaatccgatggacttacagccaagaaagctttcacaaccggaagattaaaaaagaatccacttctatttaatgataggcctatagaaacagtagcttgttacgagagaatttttgtaattagaaagcctcttgatgaaacagtaaaaatcgaaaaagtactagacaaagggcttcagcgaatactacaagctcgactagaagaatttgataataacaaaaagaaagcctttacaaatcttgaaaataatccagtttgggcagaccgttcaaaaactaaggctttaaaaaggattactatccaggctcacacaaagacagctaaacctttaagaaggaatgccagtgatgataatatcgattttgtggactaccaaaataatcatcatcttgccctttatctcgatgacgagagcggaaaaccctacagtgaggtcgtaagtttaatggacgcagttcatagagaacaagagggcggaacagcaatccgtaaagttgactctagaggcaacaaacttctttcgacgcttgctggtgatgaatacgtccttttcgatatcgaagccgaaagtaaagaagaaattcttggattaagctctagtgaaataagccctcatcttttccgagttcagaacctcggttatagtaataatgataaaaaaattggtgttgactgcagttttagacatcatttagaaacttctattaatcatcaaagtcagcttactcttcaaagaattaggagtattaacaaccttccttcttggaaggtcagaattaacgtgctaggtcaaattgtacatattgaatcaactggaatttaatgctaaagaggaccatcgtaatcgctaatcctggcagaatttctttccgtaaccatcaactcgtagttaagtctgatgataaaggtgagaaaactgtgccattagaggacctaggggttctagttatcgaaaatccacaaacaaccattacttctgtcgctctagcaaaactagcggatgcaaatgttgccgtgatgacgtgtgatagcactcatcatcctgtaagtttatctttacctttagttgggcattccgaaatgacgaaacgacatttagtccaaaccaatatcagcctacctctgaaaaagagactttggcaacagtgtatccaagcgaaactcggtaaccaggcaagggttttggaactcaatcacaagaatgttcctgcaaaaaagctacgtaaatatgtccttgaggtaaactcaggtgacacaacaaatattgaagctagagctgcacaacattactggaaatactttatcccagacccagaatttcgaagacgagctcaaggtatcccccctaataatctacttaactatggatacgctattatccgagctactcttgcacgctcagtagtagctagtggactaataccgtctttaggacttttccatcgcaataaatacaacgcgttttgtttagcggatgatctaatggagccatacaggccctttgtagatatagctgtcttaaaactgcttaaccaagggctagagcctaccgaaaatcttgaacctgaacataaaagagctatccttgaaattttaagttcagatacatatgaaggtgaaaaaagaagcacattatggaatagctccttaaggactgcaagtagtttgtatttatgttttgaaggaagtaggcgacaaatttccttccccgaattacattaatggctttaacgcatcatagaataaatgcatatagaactatgtggctattagtgctctttgatttacctaccgaaacaaaaaaagaaagaaaagctgcttcacaatttagaaaaatattacttcaagatggattcaacatgttccagttttcttgttacatgagacattgtccaagccgagaaaacgcagaagttcactcaagacgaatccaaaaccatctacccttatttggccatgttggagttttttatatcactgataagcaatggggtatgactgaacttttttttaacacaaaagcagaaaaacctaagactggtcctcaacaattagaattcttctagatttttaatcctaaaacacccccaaaggcatgaccctcacgctcttatgagagcgatgttggatctgccttataaaggtaggaatttgaatgccaatcacaacacgtccccagagttgagttttttatgccccgttggatctgccttataaaggtaggaatttgaatgccaatcacaacccgttagccagaactaagagagcactctgagttggatctgccttataaaggtaggaatttgaatgccaatcacaacgtagacttaactactgctagcgacgaagacgttggatctgccttataaaggtaggaatttgaatgccaatcacaacaaggtatcgacgacattatgaaagataaaagttggatctgccttataaaggtaggaatttgaatgccaatcacaacaatccagcaaagacgtacgagcggcgattggttggatctgccttataaaggtaggaatttgaatgccaatcacaactaatgactacctcggtaggcgctcggcggcgttggatctgccttataaaggtaggaatttgaatgccaatcacaactacatgagaatcataaataaactgactgttgttggatctgccttataaaggtaggaatttgaatgccaatcacaacagtaaaccagatagcactagataaactcggggttggatctgccttataaaggtaggaatttgaatgccaatcacaactcgtagaaatcaattgactagataacatcggttggatctgccttataaaggtaggaatttgaatgccaatcacaactacataacatcccctgaatcgccatcgttagttggatctgccttataaaggtaggaatttgaatgccaatcacaacaaggtgtcgtcttcgatagttccagccaaagttggatctgccttataaaggtaggaatttgaatgccaatcacaacgcgggggcctaaaatatccgaacggcggacgttggatctgccttataaaggtaggaatttgaatgccaatcacaacacggggtcgcaacctacgaaaggagctactgttggatctgccttataaaggtaggaatttgaatgccaatcacaactgttggttagatggagaaacggcatatacggttggatctgccttataaaggtaggaatttgaatgccaatcacaacgtagagctagggagaagggagggattgattgttggatctgccttataaaggtaggaatttgaatgccaatcacaactaccgagaggccctacttactcaactttctgttggatctgccttataaaggtaggaatttgaatgccaatcacaacggaacggtgggtttccgtagccgaccctacgttggatctgccttataaaggtaggaatttgaatgccaatcacaacatgttttcgcagctacgaaaagggatcaaggttggatctgccttataaaggtaggaatttgaatgccaatcacaactctacccacccaagagatttacacgcttcggttggatctgccttataaaggtaggaatttgaatgccaatcacaacaaagccgaataatactccccgcgcgtcttaggttggatctgccttataaaggtaggaatttgaatgccaatcacaacggcaagtcagatggtaaacggatatgctacgttggatctgccttataaaggtaggaatttgaatgccaatcacaacggtggtggtggagtgggcaggttagaacatgttggatctgccttataaaggtaggaatttgaatgccaatcacaactatgcaaaaggtcgggcctatcgcaaaagagttggatctgccttataaaggtaggaatttgaatgccaatcacaactcttttactatgttaaataaggggttatgcgttggatctgccttataaaggtaggaatttgaatgccaatcacaactgtctatgtgcttcaacatttttttgtaaggttggatctgccttataaaggtaggaatttgaatgccaatcacaacggaggcttagcttgggataagccattagctgttggatctgccttataaaggtaggaatttgaatgccaatcacaacgccctgccgttgccatactacccccgaattgttggatctgccttataaaggtaggaatttgaatgccaatcacaacgaatgcgcccctttcggcatggggttcgttgttggatctgccttataaaggtaggaatttgaatgccaatcacaacgaaggggaaattcttcgtaaaaagagccgtcgttggatctgccttataaaggtaggaatttgaatgccaatcacaacgtagttgcgtcgtgagggtataaccaatatgttggatctgccttataaaggtaggaatttgaatgccaatcacaacgcggtgtataatacagtagcgaatactactgttggatctgccttataaaggtaggaatttgaatgccaatcacaacacaatgctaattggtatacaattaacagaagttggatctgccttataaaggtaggaatttgaatgccaaagtgtttggaataaataagtcgataccctacggatatcgacaaaacaaaaaaacgtgtgagacccgtagccccacacgtttctaaaacatacaattcagataaaactagtgagtgtgctcagtttcccctttgtctttctccgcaagaaggtaataagctccattgcccacaacttctgcatcctcatgtaatgggcttaacagctttacttcgatataaccctcgcttgtaaaacctgtaattacctcaaccatttcaaatgaaaccttcgcctcgtcgtgattcgcgtggtcgtcgtgatccgcatgatcatcgtggtcgtcatcggtttttacgaagataaatgtcttttctttatcggtaactaccgaatgctctgggagtacgttcgtagagatgttatcggcaatgagacgtccgtggatatacattccctggatgagattactttcgttttcagaaatctcagcgtggatatgtaacgctttaggactttcttcaaagacagggcttatcgcgaaaatctccccttcaaattcttctcccagcaagcttgaagtagtgaagaaaatcttttggcctaatttaattttattaatatccttctcatacactctgaagtctgcatggaggttagaattgtttactatctcgaataacttcgtgagaggctctacataggaccctatatttgtctcaaccaaactcaccacaccgtccataggagatgaaatagaaacctctgaaaacatagttccgctagctatttcgtgagcatcaaggcctatcatattaagctttatctctaacgcttttacaacagattttttactgaaatactctgcttgaacttgttgaaattttttgccagaacctaccttttcttcatataatttcttttgtcttatgaaatccttttccaaatattccagcgtattaatgctattgatatagtcttgttgaagttgtatgaaatcgggatgttgcatagttgccaaaacttgtccgctctttactatatctccttctatcacttttatatctttaattacacctcctagcataggactgacatctgccttatcctgaggaaataattctaattgtccggtaacttgaatgccgacatttaagtttcttttttcgaggtgtactaattctagtcctatagcacttatttgttgaggcgttaaagaaactacgccttctgcgtggtcctcgtgaccgccgtggtcctcgtggtcgtcgtgaccaccgtgatcatgtccgtcatgagatgaattacatcccgcgagtaatattcccataaatagaacggtgaatattgattttatattgattgttttcatgatatttcttagttattccaaataaattacttcttaccagccaaatgctcgatggctattattgactgattgtattgcattaaaagcgataaatagttactcttaatctctaccccattatttaaactctgtatatactccacataatctatcgccccattttcgaaactcttctttgaatttgagaggattaattccgcttgtggtagagcgttattctcaaaatattctagagtggctttaaatttatagtattcctgaactacacgttcgtattctcccatcaggactgaattgaaatacgcaacgtctgtacttgctttcttttcgtgaagactagcggccttgattctagctaaatcaggtttggcccaaataggaatagagatagaagcctgaagtcctgtaaatctactatccgaccctaaatattgatcctgaccgtcaattaaatgaatcccgattaaagattgattgaagtatcctatcgaaaagtccggtaagaatttcgacttctctaaagagctctccctctccctaattaaaattgtatttatcaataattccagattagggtttgtattgaccaaatcgtggttaagactgatactaagttctttttttgacgaaatatcatcagtcaaatcaacggggagaggactatttaaaagaatttgaagcttcttcttaaatatctttatatctgcatcgttttgtgtaatcctgaccttaacagcagtaaccttggattccgcggtaactttttccaaaagcgtaccagcttctgtctcatatctaagtcgagccgctttagaaaattgtacatagacttcattttgatagtccaaaagcttccccacttctttaaggttcgctaatttgtaacaggtaagctttatttctgaaatcaaatcgttctctgtctgcttttttcgaagttccccgtctttaatattcgccgacgccaaagcacttcggtttgaataaacggagggaaattgaaagctttgggctatagaaaaggcaaaatcattctcaatactattgtactgaccatattgcattccgaaatccgttttaccaatatctacagacgtctttttcaacgcccttaaacgctctacttcaaaatttgccgactctatactgccattatttgccagaccaaaagagatagcctcctctagagagtaaaaacttacctccccttgtgcattagaaggagagctgaagaaaaagaatgatcctattagaggtattaataaaaatgaggccaaattcatgcctcccatatctatcgatttgttctctttctttgcaagtcttttttcctcgcgagactcaactatactataaaggataggaattactatcaaggtgagcatcgaagccgtaagcatacctcctattactacagtagctaaaggacgttgcacctctgctccagccgatgcagagatagccataggtaagaagcccaagatatcagtagatgccgtcaagaaaataggtctgatacgctctctcgtcccttttattatcctttccttcaatccgagtccttcctttttcaagtcattcatactcgtaattagtaccaaaccattcagtaccgccacaccgaacaatacgatgaatcccactccagcagaaatactaaatggcatatctctaatccatagcgaaaatatcccacctatagcagagagaggaattgccatatatatcataatggtttggacaaaagactgtaaggcaaagtacagaagtacgaaaattaaaactagagctatcggaacgactatagtcaacctttctttagctcgttgtaaattttcgaaggaacctccatattttaagtaatatccagggggtaatcctaactccgcatcgagtttttcctgaatttcatttaccacggactctacatccctacccctaacattaatacctacataggtccttctattcgttccttctctagaaatctgcataggtccagcttgatagctcactttagcgacttctttaataggtatctgatctccgttaggtagggaaacgtatatgttttttaaatcatcaatatttcttttgtgctctttttttaaacgaacaactagatcaaatcgtttctctccttcgaagatcactcccgcggtttctccactaaaagcagttctcactatggtatttaactcctgaacgtttaatccgtactgagctagtttatctctttcatattgaaccgtcatctgtgggagacctttggtagcctctacttttaaatctgcaacaccttcaaccgttccaataatagtagccattttttgggcataaatagctaattcatctaggtcttcaccaaacagtttaatagctacatcctgcctaactcctgtcataagttcattaaaccttaattctaggggttgagaaaattcgtagttaactccaggaataaaggctaatttatccttgattttatctatcagttcctctttagaacttgcagaaacccattcgtccgtaggttttagtattaaaaacatatctgctatatccataggcatagggtcggtaggtaattccgctactcctatccttgaaaccatttccgttacttcggggaagttttctaatatagttttctcgattaaagaagatattttctctgtttcttctaacgagcttcctggcttcaataaagcctgcatagcaatatcaccctcatctagtttagggatgaactctcctcccatattcataaaagtaaatatcgaaagacctaaaaaaactaccgacacagagagtatctcagtctttctattaagcgccccttctaaaataggttcatattttccacttaaccaaataatgaatttatctccccacataactttttgagatggctttttgctcataaataatgcagaaaccataggcacatacgtaaggcataagatcatagctcctataacggcgaaactaaatgtcatagccataggtgtaaacatctttccttcaacaccttgtaaggttaaaatcggaataaatactattaagatgattaactgcccgaagaaagcagcgttcatcattttactagatgacttttttgaaatctcatccaaatctttctgtgatagcgtaccgttggtggattgccgtaccctctgtactgtatagaacaccacactttcgacaatgattactgccccatcgacaatgattccgaagtcaatagctcccagactcataaggtttgaccaaacaccaaacacattcattaatatatatgcgaaaagcaacgaaagcggaatagttgaggctactataagtccacccctaaagttgcctaagaaaagaaccaaaataaaaattacaattaatcctccctctaaaagattcgaagtaactgtgctcgtagttctttgaatcaattgcgccctatctagaaatggcttgattctaatgccttcagggagtgacttttcgatttctgcgatgcgctccttaactcgttcaatgacttcattagaatttccgcctttcaacattaaaatcatcccgcctacagcgtctccttttccgttttttgtaaacgacccgaaacgtacagcatgaccgaagcctactgtagcgacgtctttaataagaattgggactccattttctgttttaactacgattttattaaggtcgtcaatagatcttgcaagaccttcaccacgaataaaattcgctttatggtttttaactatataagcccctcctgtattctcattattaatttcaagtgctttgaaaatttcagagatagagattcccatgctttttaatctgtctggatctaccgcaacctcatattgcttaactcttccaccgaagctgttcacctcgacgactccttgaagcattgccatttggcgtttcactatccaatcctgatacgtcctcaagtccgtatctgagtatttatcagcaaactctggagaagcctctagtgtatattggaaaatctctccaagacctgtagtgataggccccatatagggctccccgaatttttgagggatttgacctttaactgcgctaagcttttccgagacaagctgcctaggtaaatacgtccccatatcgtcttcaaagactatagtaactacagataatccaaacctagaaattgagcgaatctcaaccactccggggaggtttgccatagctagctctaccggatatgtaacgaattgttctatgtcctctgtccctaaattgggagaggttgtgattacctgaacctgattattcgtgatatcagggacggcgtctatgggcactttttgcatggagaatatgcctactccgatccaagctaccatcattattccaatgatgagcttgttatttattgagaatgcgattattttattaatcataatttttacttgataaatggatacaattattcctcccaaaaaacgctttgcgttaagtggaaagggagaaaatagattctagccttaagctcttagtagcttaagctcaatctagtttaacaagaaaatgtcggggggcctcttaaaggcgtgtgctcaataggtggctgagaaaagaatggggtgacgttaaatctaaaccctaaattctttttctttttatcgaaagaaagttctttcttaaataatgtaattactgactttacaggcagtttacacaacttcttatctttaacgtccgttttctgggtatgagcaaaaaattgaatcttacattctgaaacatgatgcccgtatgtgcctaaaagacagacaactaaatcatatatcccttcgtgacaatgtccttcaaaaaaatgctgctcatcaccttgatg

SEQ ID NO: 3592 - DNA, 14888 bp, synthetic construct
  variation 7902..8013: note = note, n is a, c, g, or t
  source 1..14888: mol_type = other DNA
  variation 9697..9720: note = note, n is a, c, g, or t
  variation 10144..10311: note = note, n is a, c, g, or t
  variation 7618..7619: note = note, n is a, c, g, or t
  variation 6601..6602: note = note, n is a, c, g, or t
  misc_feature 1..14888: note = Synthetic
cacaaaggacttgttcgcaatgttgatttttggcagactttggcgttcttctaccgtaagacccaccaaaaaaggtaattgttgcagaatggtttgcaaggcagcttttacggcttgcacttgggcggcggtgagggtcaccgacacgcggttggtttgagcgtttgacacggttaaaaaaaatttaggttaaaaaaataagccgctttagctccacggcaagcgagttgtgttcggcagtgggggggcggactgttgtcgcaatgcttaacgctctttatgcagataaattgtgtgctggtgtattaaaattaataggttagccataaaaataagtttttcatagcaatttattactctaaaattttgaaataaaaagattgtcgtatcttggcaatataaaacagaagtattactttcgccttgtagttgttataggtagttgttgtagtttgatttcaaaaaaggtgttacgatatggcaagtgcttggagaaacaacatatccaaagttgtagtttgatttcaaaaaaggtgttacgatatgactttaaacttttggttgctcaaaaatttagttgtagtttgatttcaaaaaaggtgttacgatatgtaatacagcgaatagtagcgacaacgcaatgttgtagtttgatttcaaaaaaggtgttacgatatggcatagacagtgcaggtattttggatttgtgttgtagtttgatttcaaaaaaggtgttacgatatgctgttttactttcgtcattagttgctcggcgttgtagtttgatttcaaaaaaggtgttacgatatgtaattcattaattactgaggcatcaactggttgtagtttgatttcaaaaaaggtgttacgatatgtgctgatgctccttctaaaataggctgtaagttgtagtttgatttcaaaaaaggtgttacgatatgaagagcgtttttttttatataccattgcaagttgtagtttgatttcaaaaaaggtgttacgatatgttgcaataccgactttactttgcggtatttgttgtagtttgatttcaaaaaaggtgttacgatatggtttttgcagttctgataaattagcaatatgttgtagtttgatttcaaaaaaggtgttacgatatgccgctgctactcaaactgattttagaaggagttgtagtttgatttcaaaaaaggtgttacgatatgtgaaaattgattgttgaacgagtgtataggttgtagtttgatttcaaaaaaggtgttacgatatgagtacctttatatcgtattgaaaatcagggtattagctccattttctttaaaaaaaaatgagctttttaccctgatttttcaaaaaaaaagtcagtttttgccatcctaattaaaatattgtgagctgctcgggctgctcaggagggggtctcggtaggggttgccccatatcgccgtattgcttattgctaacttgccgataccccacaggggctgttgtatgaagcgcaatgtataaatatagataaaaaaacaataaaaaaagcgaccctccaaaaagagccgcttgtgataattgcgatagccatcaacggctatcttgttgcaataagatattcaaaaaaggtaatttttctttaacgccttaaattttatatagctaccactaacgcctcaacatcagtgttatcgcaaagctaataatatttttttataacacatacattcaacaacgattttttttatcttgcagcaatattttttcttttttaaccaaaaaatcatttcttggctctatgggtcgggggtgtttttttcaaactaatattgcacacaatatgattattctgggtttagatttgggtgctgcctcgctgggctgggcactctccaacgacagccgccccgataataggctcgtggattgcggcgtaattatttttaaagaaggcgtaaatattgatgccaaaagtggcaaagaggagtcgcgcacggtgcgccgccgaatgatgcgccaagcacgccgccagattcaacgccgcacccaacgccgccgccaactgctgcaatacctccggcatatcggtttagtgccgccgcaccacaccgcccaccactttgatagccgccgcgatgtgtatgtgttgcgtgccgccgccctccgccgcgccctgctgcccgctgagttggcacaggtgctgtatcattttgccaagcggcgcggctttaagagcagccgcaaaagtggcagcacctccgatagcagcgacctcttcaaaggcgaccccaaagtaggcttgctgggcttcaatgataccgaaactgctatgaaagaaggcaattttgccacttttggcgagtatcttgcctccctcaacccacaccaacaacgccgccgcaaccgctacaccctccgcaaatggtacgaacacgaagtagagagcattttgcaggtacaaaaagcccaccaccctaccctgcaagatgaagaagtgacgcgccgcatcaaagaaatcctgttttttcagcgacccctgcgctcccaaaaacaattgctcggcaaatgcgaattagaacctcgccgcccgcgcacccccaaagcctcgctgcattttgaggtgttcagagcgtggcaaaccattaataatttgaaactctggggaaaaaatgtttatggcgaagaactgacccttgaacaaaaacaacaactctggaaagatttgttttcgcagcgcgatgaaattacgcccgaacaaatcctgaaaaacctcaaaggtaaagacgcgccgttatggagtattaattctgacgaaaaaaaatttaaaggctgtggtgtggctgccaaactgcgcaaaatattcggtgcggcttgggacagttttgatgccaaaaaacaagagcaaatctggcatgtgctgtacgaaaacgacagcgaagaaagcattatacaatatgcacaaaaaaaatggggcgtaaatgaagcacaagccgccgaactcgcccaaataaaaatgccgcagggctatgtcaatttgagccgccacgccattgagcgcgttttgcctgaactgcaaaaggggttgcgctaccacaccgcctgcgaagcggcgggctatcgccatgcacgcgcacaacgcgcaccggcagacgcacccgaatacactttgcggcagttgcctcccgtacctaatctgcgcaatcctatcgtacaaaaagctcttggcgaattgcgccgcctcatcaatgcactcatacaacgctacggcactattgatcttatccgcattgaaatgctgcgcgaattgagaatatcaaaagagcagcgcgaagaaaagcgcaaagaccaaaaacagagagaagcccgaaacgaagccgaccgcgagcgtttgaaaagagattttggcatacaaacagaaggcaggggcagtacactacgcgaagatattatcaaaatgcggctctatgatgagtgcaaaggcgtgtgcccttacagtggcgacaaaatagagccttatcaattattcaacggcgaatttgaaatagaacatattttgccctacagccgcaccttagacgattcttctaccaacaaaacattgtgccgcaaagacatcaacattgccaaaggcgacaaaacaccgcgcgagtttttttcatcaaccgattttgatgaggcaatggagcgtttgcgcagtattgattttccgaaaaataaaatcaataaatttgcaacaaaagaattcaatgaagattttatacaacgccaagtcaacgacagtcaatacctcgccgccgccgccgccgattatgtgcgtaaattgggcgacgtggaggtgcaaacggtgatgggcggtgctaccgccgaactgcgccatttgtggggtctcaacagtgtgctgcacccgctcggctttgattccaaaaaccgcgaagaccaccgccaccacgccctcgatgccattgtggtagccaacaccaccgtaaaaatgctccaaaccctcagccgccgtcatagcggcgaatacaatggcgcaaataataacataaaattcaggctgtcgccaccttatgcaaatttcagggagcaggcagagtttgcgctttccaatgtgctggtggtgcatcggcatcaggcgcaaaaaacggcagggcaactgcacgaagaaaccttttacggcgaaatcaaagaccatcagggcaagcgcaggggttttgcagtgcgcaaaaaactccaagacctcacggcggcaatggtggaaaaaatcatagaccctattgtgcaggaggcagtggtggagcgcatcaaagcttttggcggcaatataggcgataaggaactttggaaacagcccctgtatatgcccaatcccaaaggcggcaaacccactgtgataaaaaaagtgcgtattttacaacaaagctctaatgcggtgcgcttgcaggagcatatcaataaatgggtagagccgggtagcaatcatcatatcgctatttacagattgcccaacggcaaaattaaaggacctatcgtgagtttttttgaagccaaccgccgccaacgccttggcgagccgctaattgacaaaaggggggagatagcaggcagcgagtttttgttcagtttgagcaaagatgaaatggtactcctgtattgtagccccgagctgttggcacagcaaagcgaggagcagtatagcgcattgagtgcgcatttgtatagagtggtgaaattaacagagggtagtatttgcttggcactgcacaatgcctctaatgtgaaagcagacaaagaccccgctcccaaagtattaaaagtgccgcctaccaaattaatagacgagctaaaagccctcaaagtaacgctcaatgccgaaggcaggatagcggcggcggagtaagggaaaataaaaaaaggaaagcacaaggctttccttttttattgaatatgatttttgtagcttgattttgttctttttttaaaaaaaactcttttgctgcaaactattacaaaaacccaagacggcgcgtatttaaactactttcacctgcttgccttctttggcttgtaaaaatggctcaacgattttccaaaattgttcggcgcggttttcccacgagttggcacggctgcgctcccaacggtctttgtagcgttccggcgtgtcgtgatacagtgccgtgttgagcaaagacacaaaatggtcggcatcgcgggcaatataaatgccatcggcgtagtcttccaaatctttggaaaaatgcgtaacgataaccggcttacccaaagccaaacactcgttgaatttgagcggataaatattgctcgtcaaatcgttgagtttgtacggaataatggtagcatctacatgctgcaaataagcgggtaattctaaaaaaggttttctgcccaaaaaatgcacattcggcaacttatccaagccgcgctctttgtattcttcgccgtgaatgggtccgatatacacaaattgaatgtcgggatatgccaaagccgattttttcatcagttcaaaatcaatgcggaggctgtccaaatgaccaaaataacaaatgatttttccttttaaatctttcatatctgccggacgcggcaaagcaggggcaggtggcgaaacggctttttcaaatacttccaaatccacaccattggatagttggcgggcattgggtgtaagggcggtgtattgctcttgcagttttttggaagtggtcagaaatatatcggcacggcgggcgtgctccgcttcaaggcgcacaccgtgtcgggcaatatacggctctccggcaatggagtcgatggtttggtaaatatctaagatcggcttaaaatcttttggaaaaaatctgccgaaaaaagggtcaaaagaattgattaaaatgaatttttttacatcaaattcttttaaggttttcataacagttctgaacaatactgcatcgttgcgttttgccagcgtgtcgtagagtgcgccatcgggcagccagttaatgggcagcgtgagttccggcgtgatggcatacagattttttgaccagccattcaggtggcggtagtaagaagtgccctttgtgagtgcctcttttttgcccttgatgatggggtcgtttttgccttgccaataatctttccaagtgtaggggtgttctatataaaaaatgcggttggtacgcgcaaattcttttgccaaagaataaataggagccgtcaccggattatctaagcgggaggtggtgacgattaataagtcataatcagaacgcatggatataatttttgctgcaaaaatagtaatagatattacaaaacacgccattttatggtgtatattgctatatttggtcgtatctttgaaagaaagaagcattttcggctacatgaataagcgtttgcaaagctatatatctgtaaaagtgattaaatgtttgttgagatgttgtatgtgcataacgctcatcatcttatcactaaccttgcgggcacagtcgttgcgtgtaggcgtagatatgaggcaggtgaagcctgcacaattacagcagtgcggcattgcactggattgcggcgtatggcaacagggcgattcgctgtttttggnncattcaggaggctgccctgccgcatcgtgttgtttctgctgccgcaatgctccaatatttccgacaacaaacagcacagcgcggcgatacagcagcagcgtttcaggcggcgatgtttcggtggaaaagccccgaacatttttctttgggttctttgggcggttattttacttacgaagaaatattggcgcatttggataatttgcacaatttgcgccccgatttggtgagcgaaaaacaacctattggcgattttaaaacctttgaaggcagacccctttattacctgaccatctccaaccaccctgccgcctacgagccgaacgaccccgctattttattcaccgctttgcaccatgcccgcgagcctatatctgtgagccagttgatattttttatgtattatctgattgaaaattatgataatgatgcgctcctgcggcaattagtggacaacagcaacttgttttttgttccctgcgtcaatcccgatggcgtagttttcaacgaaagcctttttgacggcagcaccacgcccccttcttttgggtattggcgcaaaaaccgccgcgaccacggcaatggcactttcggcgtggacttaaaccgaaactacggctatcagtggggctacgatgacaacggatcttccggcaatacgggcagcgcactatatcgaggagctgcacctttttccgaacccgaaacccaagccattcgctacctgtgcgaacaatatccttttaaaatcgccctcaattatcatagctacggcaattatttattgtatcctttcgggtatagcgatgctgtttttcccaccgatgctttgcattttgattttttgaccgaacatttgtgccgcgaaaataaatttgaatatggcaactcgcatcaggtattgtatgccaccaacggcgacagcgatgactggatgtatggcgagcaaaacaccaaaaacaaaattatagcgatgacccccgaagtgggcaataattttttaggattttacccgnnggattttacccgccacaagaagaaattattcctttgtgcaaaagcacaatgtggcaaaatatacaggcattaacagctttgcattataaggtcattaccgattttttgcccgattatgcccgcgccgataaccccaaaatacggctgaaagtgcgcaatatcagcaatacaagcaccaatgtattgttgagtgtgacaccactttcaccacatttttctttttacgaaaacaacaaaaatatcagcctgccaccctatgcacagcaagaaattgcttttgatnnnnnnnnnnnnnnnnnnnnnnnnnnnnnnnnnnnnnnnnnnnnnnnnnnnnnnnnnnnnnnnnnnnnnnnnnnnnnnnnnnnnnnnnnnnnnnnnnnnnnnnnnnnnnnnntggcaagtgagcaatacgcagtttattcagggtagtggtagcattaccgaatcgccaatcggcaattatgccagtaatttgcaccatagtttgtattttacagatacgctgcacttggaagactgcttgcacgcacaggctcattttttttcaaaatgggatataataccgtataacgatgcagtgcaaataagtgtggaagagataaacagccaagaagaaacaagcgtatattcggcagatagccaaaatgcttttgataaaaaaacaggctacatcgacagggcggtttatcagaattttcaaaagcaatggaggcggcaaacggtgaatttagatgcttttttgggaaaagccgtgcgcctcaaatggttgttttatagcgataatacttacggcgcgggcggtttttatatagatgatttagccatagaatgtattaaaaatatcgctccccttgccgccgatgataccgtttatactgccctcaacacaccgacttatttgcaaattgccaccaacgatttcgaccccgaagcacaagcgttgagcgttgaagtcatcaccgcacccgattatggcactttaagcggcggcggcaatctttatttttatatgcccgcacccgattttgtcggtattgatacttggcaatatttgttgagcgaccctcactgtggtgcagataccgctacggtgtggataatggtgggcgaagcacaaatgtggcctgccccgccgccgcctgcttacgaaacaaacagcatcatcaatagcagccccgacagcaccgatactgctgtggctcccgaagtaacatcatcaataaaaatataccccaacccgaacaagggcgtattttggatagcaaacagcaacgacaatgcttatttacaattggtcaacgctttgggaaaaaccctatggcagcaatcgctgacgggcggtgtgcaatgtgtagatatatctatgctggaaacaggcatttatattgcacgaattaatgccgaaaatataaattatatctgcaaggtacttgtaataaaataattatatattttgttatttataaaatgtttcttgaattgaaacttatttttattaaaaaaaacgcaatttattcatcactaaatacttatcaatctttatacattttttatgaaaagaaatcttttttttctgatagtcggctttttgagtatcatttctgtatctgcacaggaggtatatcaaagagtgcgtatttatgccgatgatatacagttggcttatttgcagcagcaaggtatcggtattgaccacggcacattcaaaagagggcattggtttgaaagtgatttttctgccaccgatgtagcacgtttgcaagccaccggcatcgcctacgaaatcatcgccaataatgcgtgggatttttaccaaaaacaggcggctgctttttcggcaagtcgggagcgcggcgataattgcggcggcagtggtagcaatagtttgtactacaaaacccccgccgattttaatttgggtagtatgggtggtttttttacttatgatgaaatgcttgctcatttggataatatggcgagcaaatatcctgacctcatcaccgccaaagccgctattgatacttttaaaacttttcaaaaccgccctatttattatctcaaaatatccgataatcccnnnnnnnnnnnnnnnnnnnnnnnngtttgtcgcagatgatattttttatgtactatctgctggaaaactacaataccgatgctgccgtaaaatcgtgggtggacgacaacgaaatttatatcattccctgtgtaaatcccgacggctatatttataattctaccaccaatccggcaggagggggcttttggcgcaaaaatcgccgcgacaatggcgacggcacttttggtgtggacttgaaccgcaattatggtcatttttggggtaatgacgatgaaggctcatcgccggaaacttccagcgacacttatcgcggtactgctcctttttccgaacccgaaacgcaggctgttaaatggctctgtgaacaagtaccttttaccattgctcaaaattatcatacctacagcgatatgctcatttatccttggggctacataggcgattnnnnnnnnnnnnnnnnnnnnnnnnnnnnnnnnnnnnnnnnnnnnnnnnnnnnnnnnnnnnnnnnnnnnnnnnnnnnnnnnnnnnnnnnnnnnnnnnnnnnnnnnnnnnnnnnnnnnnnnnnnnnnnnnnnnnnnnnnnnnnnnnnnnnnnnnnnnnnnnnnnnnnnnncgatctgcaacgtttgggactcaatggcaacggcaattttgtagtcagtgccattcctgtttcgcaaggcattaccttcggcgcacctcagtcttttaatgcaatggaactcctcgaaacccgcagcgattcgctctcttatagcgtggatatcaatgctttggagggtaatgaagaagtgacttttttgctcaatgtatccaatggacaatatttaacctcagatactctaagacgcaagtttgctgttgatgctcccaccgccgactataatattattcttgaaccttctttggatgcctttgccgcagactggagcgtcaatggcggcggcgaatggaatgttaccacttttcagtatcacagtgcgcccagcagcatcactgattcgccggtgggctactacgaagcatcaacgcacagtaccttgcgctggaaagataccattgacctcacagcagcgcaagccgccgaagtagagttttgggcaaaatgggatattgaaaccgactttgattatgtgcagatacaagcagtgaatattgccaataattcggttactgctttgtgtggaaaatataccaacactaccaactatgaaattcagaatgaacccttgtatgatggattgcaagatacttgggtgaaagaaaatatatcgctgaatgacttgttgggtgaaaaaatatttttgcaattatacctgtacagcgaccagtacgaagaaagagatggcttttatgtagatgatattttggtaaaaatacaatcgcccgaagaagaggtaggtttgcctgcaactccgctctccgacaacgaaacagtgatgatgcaaataagccccaatccggcttctgatgtgttaagggtgtcttatacgcagccttaccccgatgcgcatatacaaatatgtgatatgtggggcagaagcgtttttggagcaagaattgatcacggaaatggcaccctcagcgtagcaaccgcacatttggcaaaaggattgtattatatacagcttaaaaacaatggaattgtcgcaaaacgacaaaaatttatgataaagtagcttgtttatttttaaaattatattgtaggtttgctgcaactctgaatagaaagacaggatttaggcaaaaaactcagggtacgttagaagatttgatattattttctaaaactttgattttcaatttgtttcaatttgttttgtatgtcatctaaattctctgcaaagttattgtgccatgttgattattattttgcctgaggtctttgatattatatgttattgtaaatacacagatgtatgtcttttgtatgaatgacttacaattatagtttttttaacaagctgttgaagtttgtgtaccggcagtaaagagataattccccccatgttttaactcttagagtttcatcgttgatgagagctgccggtattttttattttcttgtaaaaaattgtttaaaaccctctggtacacttactatttttccggcactgtaatcgtagcatacaatacctgtttttgcaatagcacatactttgccgctgcttgattcgcttactttgtaatacacttcaaatcctgctcgcgaaaactcgcccgcagttacggctatttccaaattactcggatattttacctccgctttatatacgatacccacatctgccataattgtacccacacccgctaagttcagttcggtgtagccgtaatgtgcataaaaacgaacccgtgcttcgtgcaaaagagataaaaacatatcatttcccaaatgattaccatagttaatgtcggtgatgcgtaccggcaatatggtggaaaaatgaaaatgttcaggtaaatcaatagtaatacgagccataaaaaaaatactaatgttacaggtgatggataaatcttattcggtaatatctatgttttctatcgtccaattgccccaacgtatgtctttcaaggctgtatgtgtgtaacgagtagaagattctctgttaaaaataagctctaatgtatcttcttcttcatcataccaacatagccaaggtgtgcaaagacgggcggtatgcaataagccgcagcgtattttatcttcttgttcttgtattttaaaaaataaagttattttaaatgaatgtggaaatttgggataagtatcaatttttgattttaataaaggcaagcgcagtgtttcggtaatggcggttgtcagtttttttgcttcttttatatgttgttgcgaatcgcttactaccaccaatacggctaccgcttgtagtatgtttttgttgtttgtcataatattcgcaggttttaaaaagcatacctataaaaaataattattgataagcagttaaaaatgatatacatagccaaaaaataacacaactgctatttttcttccgaaaaagcaattcctatttttttgcttcgcagtatttcagtaatttcggtcagtatcagcgggtcgtcgatggtggaaggtaccgtgtaagggactccgtcagcgataaagcgcagcgtttttcttaaaattttgccgcttcgtgttttgggtagtcgctgcacgatgagcgtggtgcgatagcaggctattgccccaatttggtcgcgtactaaggctattgtttcctctgaaatttctgcttcattctgcataatactatcttttatcaccaccaaacccaccggaatttgtccgcgatacgaatcggcaatgcccagcactgcacattctgccaccgccggatgtgccgctatcacttgctccatttctccggtactcagacgatgccccgctacattgatgttatcatcaatacgacccattacaaaaaagtacccatcttcgtcataatagccgccgtctccggtcaggtaatagccttggaactttgataagtaggcttgctgaaatgctgcttcgttgttccatagtgtgcgcaaacaacccggcggcaaaggcattttaacggcaataaaaccttcttcgttggcttcgaggggtgcgccgttttcgttgagtacctgaatatcataaccgcatatcggcaaattcgccgagccttctttggtggtttttgcttccagtcccatcataattcccaacataggccagccgctttcggtttgccaccaatggtctattatcggacgctgcaatttgctttttatccaattataagtatcggggtcgcagcgttcgcccgccaaaaacaaatattttaaactcgaaatatcgtatcttttcaagccttcgcaggcaaaatcctcttttttgatggcgcgtatggcggtcggtgccgtaaataacacttttacgcggtgctgctctattacgcgccaaaaagcggcggcatcgggtgttttgatgggttttccttcgtacaaaatggtggtgcagccttgcaacaaaggaccatacacaatatacgaatgtcctactacccaacctacatcgctggcagcccaaaatacatcgcctgcctgtgtatcataaatagctcccatactgtatttgagcgcaacggcataagaatggtcgcgtaaaattcctttgggcttgccggtagtgccgctggtatagagaatatacaaggggtcggtagcgtccattgcaatataaggcacgcctacggcttcttgcatcaggtcgctccacacaaagtccctgcccgcctgcattgctacggcttcgttgttgcgcaacaaaacaatcacactgtccggctgatgcgttgcttgggcgagggcggcatctactaagggtttgtaatgaatttttttatctgtttcaatcccgtaattcgccgtgatgagcatttttggtgtggcatcttcaatgcgcactgccaactcgtgcggcgcaaaaccgccgaataccacactgtggatagcaccgatgcgggcgcaggcgagcatcgccattactgcttcgggaatcatcggcatataaataataacacggtcgcctttgtccacacctttggcttgcagcacacccgccagtttgctcacggcatcgcggagttcgttgtaagtaaatttttgcacactttgtgtcaccggactatcatagatgagtgccgtttgttcgccgcgcccctgctccaaatgataatccaaacacaaataagccagattgagtttgccgccttcgtaccacgcatatttgccatcggtattgtagctgagggcagtgtcgggttttttaaaccagttcagcaatgcggcttgttgtaaccaaaaatcattcggattttgtatgctgtgttgccactgttgttggtagtccataagtgttttttttgtattggcggtggttaaaagaatttcaatttgctgtattaaatattttgtggaaaagggtttgggaatatataaagccgctcccgtttggtagcctttttctatatcttcttgcttggattttgccgacagaaatataacctgacaatgatgagttgctgcattgtttttaatttgtttgcacaattcatagccgtccatttcgggcatcataatatccagcactgccaaatcggggcgatgttgcagggctaattggtgagc

SEQ ID NO: 3593 - DNA, 10670 bp, synthetic construct
  misc_feature 1..10670: note = Synthetic
  source 1..10670: mol_type = other DNA
atgatccagcggggagaggccgatctcgccgtgatgtacgagaccggcgcgacgagccatatccacactgagccgctgatcgaggagacgctctatctcataggtccgccctcatccgatctggaaatagccaagcccgtgccctttccgggtctggccgacctttccatgatcctgcccggatcgcggcacggtctgcgcaacctgctcgagaacgccgccggacgggaaggcatcgcgctgcgggtatcggtcgaggcggatgcgttgcagaccctcaaggaactcgtcgcccgaggtctcggctatacggtcctgcccctcgccgccgtccatgcggatatcacggccggcacccttcgcgccacgccgatcgcccgcccggccctgacccggaaaatggtcctgacccgctccatcgtccgccccgacaccaacgccgtgcggatcttcgccagcacgctgaaggcggaaacggcggatatggtgcaacaggggatctggcagggaacgctgttgttttaatgtcttcaacgagcgacctattgcaatcgatgcgctcggatttggttccgtttttggccctgaacagcaaaaacggctcacgcggtgatgcgtaagccgttgttttgtttggttgcgggggtaggatttgaacctacgaccttcaggttatgagtttggtttcgatcttttcgccgtgtttctctgatttacgccaatgatacatatcttattgtttttgctattttattattgacgatgcctacgccaaaacctacctcttaagcgctggcctgcgcttccaactgcttccatagcgcttccagatttgagggagagagtatggcgaggctttccaaacgtgttgtcgaggccgcagacattcggccctcggactacttcgtatgggacgatgccttgcccggctttgccgttcgggtcatgcctaccggtcggaagtcctatgtgattcaataccgcaagggcggacgcacacggcgggtctctctcggcatgcacggcaaggtgacggtggaggaagcccgcaccacagccaagcgcctgttcggcgtgatagcctccggtggcgatccggcagcacagattgaggaccatcgccgcgcgccgagcgtagcggctctgtgcgaccggtttctgtcggaatatgtgccggtccattgcaaggccagcacggcagccgagtacaagcgttcggttgatctgttcatcaagccagccatcggcacctataagctacaggacattgagcgcgcccacatcgccaagctgcaccatgacatgagagataagccctatcaggccaatcgcacggttggcgtcctctccaagctcttcaatctggcagaggtgtggggcttacgtccggacggctcgaacccctgccgtcatgtgaagaagtacaaggaagagaagcgcgagcggtatctgtctgccgaagaacgcgcgcgcctgctccaggttctcgatgaagtcgttgcagacggcacagagacagaacatgttgccgccgccttcaagctgctgctgttcaccggctgtcggttaggcgagatacaggccctcaaatggtcttatttgaaagacaacctgcacctacccgacagcaagaccggggcgaagacggtctacctcaatgatgccgctcgggccgtgctgacttccctgccccgtgtagacggcaatccgtatgtgatcgtcggtgccgttgcagaccagcatgtgacagatctgcagaagccttggcgccgcatccgagcgcgagccggtttagatgatgtacgtatccatgacctacggcactcatttgcttctgccgctgccgggcttggaatgaacctgcaaatgattgggaagctactaggtcacagctccccgcttacaacagcacgctatgcgcatttagctgatgaccctgtccgcgctgctgctgagttggtgggaggggtaatgtcacccaccacacacgcagctaacgactgatcagcccctatatatattatctatatagggggacggatgcgggggcggcggctgttatagatatataggggtctatttatcagcgggggaaacatgaacatcggcgccatgtggtcaaacggcacacctctcagagcttcattcgctaaatttggaaaccctcagaaagcggaagcttaccggtcggtcaatcataccgggcaggcaatggggctgataaacgccatcacactttcactcacagatcagcaggcaggagacgccgcgagtgtggccgcgcaaaaacagatttctgagacatctgagttgcgtcgagaacttgaagacgaggtgctttcacgcctgcgctcaggagagttgatcggcattgggtatgacgtgccacgccgctcagacgacgaaccgaaacaagtaccacgtgacgcctggacactatcgtcgatgaaatgggatcgcgacgaggtcaaaggcaacggcctgcacctaagtgcggttcgtattgtcctgatcgagccggttaagaataagaaagtcggtcgtcctggaaccgaaacgttgatcgcacaggcattcgatgaactgcatagcgaaggcaaaatcgacgtcagcaaaacgatcagggcacatttcgaggtgattcgtgaacgtgtttggttgaacaatcctagcctgaaccgagatcagaccgggctaggtgataaggcgctatccaagcacctcagtccattgttccaagatgcaaagagcaatgaatgagggtggctataaactataaattcaaaccccttttatagtcgtatttatagatccatcgctccctcaaggtgcgttcatcgacgtttaacgatgaggcactctgatgaacaccaaaaccgaaagcgaacatctcgataatctcgacagtctgctcaatgagcgggacgccgccgatttactcggcctctccgaccgcaccctccagaaatggcgagtctgtggaggtggcccggtcttcatcaaaattggcggaaagtccgttcggtaccagcgccgcgatctgatcgtctggatcaacgcccgtaagcaggccaacacctccgatatcgctcccgcaaacgcggcttgagttttgcctcggcggggttggaagcaccgccgaggattttgggggcggacgcttcaagcgttcccttcaacagccgggggcaggcttcggcgtcagccgttagcctcgcctccggtccctttctcgggcgggccactgcccgcccccaaaacaaaagcttccccctgcgcggagcgcatcttcactgagcaaacacagctcacctcatcaaattccaaaaatcagacagacgaaaaccccaggggggggccctgtaacacccccctcttcattgacatggcgtagtaaggagtaagacccatggattatcgaatactgcatgctggcgtagacactctggacatagccttcaagggcgccttcccagtcgagacgattgagatgctggagattgtccgcaaggaagccgaaaccggaaaccgggagctgcccgtcacactcggccccggaaacgtgcgcatgatggtcaagtcgcacggtcagcgcggcggcttccgcttcgtcctgactaatggcccgtgcggggcgatcttctctgtgaaggcgagctccaatctgcaggaatggaacctcttcgtgtcagtccgcgcgctacggcttctcaccgccggttatgaaggcacgaaggactggctggcccgaaccctgaaagatgccggattccggacggttgaggtcagcgtcaaccggatcgactatgccctcgacatccttgcaccagacttcgagctgaacgcggcacacttcgtctgcacagggcggcctaaggtccgccctcactggtccaaggaacagcttctggacaatgatggcaacatcccgcgctccgtattgcgtggtcgcagcttcgagtcagtcacgatcggcacgatgccagggcggcaagtcatcgtctatgataagcgccgtgccgccattgatcagcaacagccctattggttcgatgcctggggcattgaacgagacgatcccggacagcgagtctggcgggtcgagctgcgcgctggccgggatgctctgacaaagctgcttgcgaaacaggccatcggacgcccttttgctgctgtggagcaacacattcggacgttcctgatcggcgcaagcgggcaagtccgatacaccgcgcctcaggggctgcaggccaatatcagccgggtgccgccgcaccccttgtggaaaacagttcaaggcgcgctgcaagacttaccagttctgcaagctgcagctttgccagaagcccgcgttattgaaacgatccgcttacagcgtcgtgacatggcggaaaagcaagcttttggaaacctcttgaacgttggtgttctcgacggccgttcaacagaggaaataatctcccgcttcccggaactggcagaagaatacgcgcgacggtacagcgcagccaaaggagccagcctcttgacggcaaaggttggtgaaatccagaaacgccaagcgctgcttcaacccggcaattgacaaatagagagggcggcccgaagaccgcccctcattttgtggcttaaaagccttgctaacgggtggacctcaaatccctatcggctaaaacaggttctcaatcacccgctttcagaatggtcctgcgcaaaatccgatgcaatagaaaattgcaattagagcgcaccttaccgcacactctccccacttataggggtgtggggaagcggttatgggctcagatattgcctatcgaattggattggatgtcggggcgaattcaattggctggtgcgttcttgcactcgacaagtcgggtcaaccgacgaacgttattgatctaggtacccgcattctgacggctagcgcagaggccgggcgtgatccgcagacaggtacctctctttccgttgaccgccgtgtcgcgcgcggcatgcgtcgacgacgggacaggtacctgcttcgcaggtccgatttgatgtccgctcttgtgaaacacggcctgatgccgacagacgaggcggcacgaaaggcgctggaagaagtcgatccttatgaagtgcgcgcccgcgctctcgacgagaaagtgccgatacaccatttcgggcgcgccctatttcatatgcaccaaaggcgcggcttcaaatccaatcgcaaaagcgatagggcaaatgccgaagctggcctgatccgacaaggcatcgaaagcctgaaagaaaaaatgttgtcagaaagtgcgcggactgttggggagtttctcgcccgccgccatgccgaacgccggactgtgcgcgcccgaatggtcggcaccggcaaagacgcacatttccctatttatctcgaacgcatactgatcgaggaagaattcagtgcgctatggagcgcgcaatcctccgaacatcccgaactgagcaacgccatacgcgaagacctacatgccatcatgttccggcagcgtcccttgcggccagtcaaacctgggaaatgctcgctctatccggatactgatcatcgcgcagcacgggctctccccgtcgcccagcgcttccgcattctgaaagaactggccaatttgcgcctacgccatccgggcaacgcggaacggcctatcacgattgccgaacgaaatatcttggccgagaagctgcttggagctgcaaaactcagtttcgatcagatgcgtcgcgcactcaaactcgacagcgatgtgttgtttaaccttgagagcgaacgccgcaaggatctgaaaggtgacgagaccgccgcaaaacttggcgcaaagaaggttatgcacaaggaatggcgggatcttgatctagcgaaccagacagaaatcatcgaagccctgctggatgaagaggacgagagtcgtctcacagagcgccttcacgcccaagtcggagaccgcccggacgtcatcgaatcccttactggtgctcttctgccggaagggcatatgcggttcggaatacgcgcgttgaatgagctggtcgctataatgaatgaagcggtcagggagtttgcggatcctgaaacaggcgagattatcgagcggccaattcgtgaagatgaggccattgccgaaatgggcctgcatcactccgacaggcgaccggacgcacagatggaccggcttccttactacggccgggtgctgaccgacagcgtggtcgggacgggcgatccggccgcgccaaccgaggcccgctacggacgccttccgaatccgacggtgcatattgcactgaaccagctccgccagttggtgaacagcatcattgcgcggtacgggccgccaaccgagatcgctctggaaatggcgagagagctcaaacagagccgcgaagaaaaagccgaaaccgagaagcggcaaacggcaaatcagaaagccaacgaaaagcgccgggaacgacttgcggaactgaaacaacccgacaccgggctgaaccgattattgctgcgcctctatgacgagctacctgctgatgacaagctgtgcgtctattccggacgccccattgcagttgcacagctgttctcttccgcagtcgaaattgatcatattctgccgttctccaaaacactcgacgacggtatcggcaacaaggttctttgtttccgggacaccaaccgcagcaaacgcaatagaactccggcagaagcgtttcagggcgacacgctagtagccatgcaggaaagggcggcacgcttactccctgcaccgaaagcgacccgtttcgcgtccgatgccatgagccggttcgaggatgatgggtttcaattacctcggcgcctgattgacacccaatacattgcgcggctcgcacgcgaatacatgacccacgtctgcccaccgaacaaggtatgggcaaccaacggccggttgaccgccatgttgcgaggaaaatggggcctgaactctctgctgccagaccataatttcgcggaagttgggcaccccaaaaaccgtcgcgatcaccggcaccacgccattgatgcctttgtcatcgccgtcacggaccgttcgcttgtacagcgattggcacatgccgccgggcgtgctgaattggatcaaatggagcggatacttgccgacatgcctgctcctttcccggaatttcgcgccattcttgatacccgattgaagaacactgtggtctcgcatcgacctgaccgtggcgtacaagggaaactccacgaggcaaccgcctacggtcccgcaagcgaagcggagaaagcagacggctggaccgttgtctaccgcaagccggcggatgcgttgaacaagaacgagatcagtcgcatccgcgaccctctactccgcacaacctgcatgcgccttgaacaagacaagggggaagaagcggtcaaaacctatctcgccgccgaaggtattcgccgggtccgcctattgaagcgtgaagacccttcaggcctaatccagatagggcatgggaaagacggaaggcatatgaaggcatatgcggccggcgataatcatcatgtcgacatcgttgagacaccggacggaaaatggcatggcgaaggcacaagtgtgttccacgccaaccagccggaccacgaaccggtctggctcaaaaacctgcccggcgcttctctcaagatacggttgcacaaaggcgatctcatccaagttgagcacaatggcgtgagaacgatcatgcgtgtttactggctggagccgtccaataatcgcattcgactggcgggcaataccgaagccggatcgctcgataaacgccataaagatcccgatgatccgttccgctggttcatggctggttactcgactctgaaaaaatcaaacgcccgtcccgtccgggtggatgtacttggccaggttcactcaatagagcccaggccatgatcaaccgggtcgtggagattgcggaagatcggcgccacttgtcggtgcatcgtgggtttcttgtcgttagtgccgaaggcacggaaatcggccgggttgccctcgacaccatcggcgctctaatagcgaacggtcacggcctgactttttcgaacaacctgatgatggcattgacagaacgcaacatcccactcgtcttttgtggcccgaaccattcgcctaaagcggtaatgtggcctattgaaacccatcatacccaaagcaagcgcatgcgtgcgcaaatcggcgcgtcggagccgctgcgcaagcggctctggcaaggaattgtccgggcgaagatcatcaatcaaggcgctgcattgcaggcagtcgggtacccttccaatgatttcatggcaatggctcggcgggtaaggtcaggcgatccggacaatctggaagcacaggcggctcaacgctattggccacgactgatgggcgagcgcttccgacgcaatagtgccgccgagggtccaaatggtttgctgaactatggctacgccatattgagatccgccgttgcacgctcggtcatggcagcaggattacatccgactcttggcatgcaccacgcaaaccagaataaccccatgtgccttgtggatgacttgatggagccgtttcggcccattgcggacgttgccgtcgttcggctaatccataatggcgcggagagcgtgacggcagatgcaaagcatattctggcatcaattctggcactcgacatggcgacggcttcaggaacgacgccgttagcaacatgcgcccatcgcctcgcactgtctgtcgcaaaatcctacgagacgggcaaaccggatctcgacttgcctttatcgccgcttcctctcgaattcggagcgacatccagtgagggcaatatgtgaccgcattgtccggataccgaatcatgtggatacttgttatgttcgacctccccgtcgccacccgggaagaacgaggccgagcaacaaagtttcgacactatctcctcgacgaaggattccagatgtcgcaattctcgatctacatgcgcttctgcgccggcaaggaacaagtcgaggctataagtaggcgaatcgagaaagcggtgccgccaaaagggtcaatccatctcatgtccatcaccgacaggcagtacgagaacatcgtccgattccggagcaaggaaaaagaaccgcaacaaaaaaacccaggccagttagctctattctgaggtttatggatgaatttctaccaagcaataaagacaaaaaacgccctgtttccagggcgttttgagttaaggtatcttagccgatagggatttgaggtccaaccgcagcccaaaggtgccgctcgtcagcaaccccatcatcttagccgatagggatttgaggtccaaccgcagctcgcgtgcgatgcggggtagctcgtccgggatcttagccgatagggatttgaggtccaaccgcagcgtggaaaacccggtcatgcacaagtacgcgatcttagccgatagggatttgaggtccaaccgcagcacatggctgatcgccctcgcacgggaacagatcttagccgatagggatttgaggtccaaccgcagctggggcgcaaagcagggcgtcgaaagcggcatcttagccgatagggatttgaggtccaaccgcagcacgtcctgagtgccccacgccagaaagtccatcttagccgatagggatttgaggtccaaccgcagccatcatcatgcgccatgcgccgttgagtgcatcttagccgatagggatttgaggtccaaccgcagcgagttcgcggtcgattacaacatgagttccatcttagccgatagggatttgaggtccaaccgcagctagacgccaaccgaccactgaaggttcagcatcttagccgatagggatttgaggtccaaccgcagcggtgatgccgagggcacgggcggcggcgctatcttagccgatagggatttgaggtccaaccgcagctgtcgtgacccccaggatgttcgcctgcttatcttagccgatagggatttgaggtccaaccgcagcgtccttgttggcgttgatgtaatccgcgtcatcttagccgatagggatttgaggtccaaccgcagccggtccagcagccgttccgcgtgctctttgatcttagccgatagggatttgaggtccaaccgcagcgggaccgcgaaagaccagcggagtccgtgcatcttagccgatagggatttgaggtccaaccgcagcgagcttcgcgatcgcgcgcgagagctcggtatcttagccgatagggatttgaggtccaaccgcagctcaaagcgagccagcgtcatcgcgagcgctatcttagccgatagggatttgaggtccaaccgcagctatatcggcggcgtggttgccaagttctcgatcttagccgatagggatttgaggtccaaccgcagccatataccggtcgacagtctcgtcccaagtatcttagccgatagggatttgaggtccaaccgcagcgcgcctccggaggcaggcggggctggttatatcttagccgttagggacttgaggcccaaccgatgttgagtcaggcatcagccatttttcccgagcccagttgcttccactatgcttccagacaataaaaaacggctcacgcggtgatgcgtaagccgttgttttgttt

SEQ ID NO: 3594 - DNA, 17170 bp, synthetic construct
  source 1..17170: mol_type = other DNA
  misc_feature 1..17170: note = Synthetic
cagaattttatgtttttcttgagctggatgaaggaatcactaaagcgttccaccgcagcatcttcctgattcaataaatgtaaaaccaaccttaaagccgttttttgcccaattccgggcaattttccaaactcatttacggcattctctaatagtttagaggaaaaattcatcttgctaaattaaaaatttaatgctaattagcgatggtattcatatcataagcataccttaaatcaatctttttatgtcgccaaacttattgctttcttttgttatcggttattttttggtcttaattatcatttcttttctcacttcgaggaaatcatctgataattctactttttttattgccaatagaaattctaaatggtatttagtggcttttggcatgataggaactgcattaagtggcgttacatttatctcagttccagggcaggtagggagcaatcaatttgaatactttcagtttgttttaggaaatgcgattggttttattgtagtggcaaccctcttactaccattgtattacagaatgaacttaacatctatttatggatatatcgagaaaagattaggaattgtaagttataaaactgcggcaggtatttttttaatgagtagaactattggctctgcatttagactttatttagttgttattgttttacaaagatttatttttgacgcctatggaatgcccttttgggccacagttttaacttcactttccttaatttggctttatacatttaaaggagggttgaaaactattatcattactgattctttacaaaccacttttctggttttatctgtcattctcaccatatactttatttgtagcagtttagatttaggatttgtggaagcctttgaaactattaaacacagtggctactcaaaaatatttttttatgaaaactttatgaccaataaatttcacgttagtaaacagttattaggtgggatgtttgtaactattgccatgataggtcttgaccaagatttgatgcaaaagaatttaagttgtaaaaatatctcagaagcacaaaaaaacatgttcacctttacaggaatatttgtgatcatcaatcttttctttttaagtgtaggtgctttactttatgtttatgctcaaaaaaatggtatcgccatgccgctagacgaattggggagtcccagatccgattttctttttcctgaaatcgcattaaatcatcttgccaccctacccgcaattgtatttatgttgggtttaactgctgctacttttgccacaacagattctgcattaactgctttaaccacttctttttgtgttgattttttaggtttcgataaaaaagcggatgtaaactccgcaaaaagtatcaaaattagacatcttgtgcatattctgttctctatcttgatgttttttacagtgatattttttaataaagtaaatgataaagctgttgtaagtgcaatttttaccgttgcttcttacacctatgggccattattaggcttgtatgctttcggtctctttcttaaaaaaaggggcgtaagagataaattagtaccctttgtttgtttactctcccctgctattagtttctttttaaatcagaattctaaaactttattaaatggttatgtttttgacaacgagctcatcctaataaacgggctgattacctttatcggtctattattcatttctaataaaaaagctaaaattgcataaaatataattaacgaaaatgacaagtgaagataaaataagaagtgcctttgagaataaaacgtggcaacaaattaaagtaactgattcatggcagatttttaaaatcatggcagaatttgtagatggttttgaaaaattagctaaaataggcccatgtgtatccatctttggctcagccagaacaaagccagatagtaaatattaccaaatagcctctgaagttggccgacttttaaccgaaagaggttacggagtaattaccggtggtggacctggtattatggaagccggtaataaaggagcttatgaagccggtggtaaatctgtaggtttaaatattgaacttccttttgagcaattccataaccgatacattgatagagataaattgctggaatttgattatttctttatccgtaaagtgatgtttatgaagtattctcaaggctatatcggtttacctggaggtttcggtacgatggatgagctatttgaagccttaaccttaatccagacaggtaaaattgcaaaattccctatcgttttaataggaaaagattattggggtggtttaatcaattggttgagaaacgatatgttagaaaaagaacacaacattaaagaggaagatttaaatctttttagattagtagataccgccgaagaagcagccgaacatatttttagattttatgataaatatgttttgaaacctaatttttaatttaaagccggatgaaccggctttttttatgagataatgatatattagagcacagtttttgtcttcatgaaaacagcaaaaagcttctttgtatttctgctcctccaaattttacttggctttcaatgggctgctgctcaagaaattgaattgaaagatacagtttcgaccgtcgatattacctctaaatgtgctatttatccgtttaaagaagctgtttccattcaaaaatttaaggctgtttatcaaaaattaaatccgacagacagcatcaataaagaagctgaaaattggatattattcacattaaccaatcaaaaccctaaaaaagagctattttatttaagcagtaactttgcagatcagatgaatctgtttgattttgaaacagaagaacctatcggtcaaacgggtttacctcttcctatccatcaattaagcagaggcgtagcaatcggctttattcctatttctttagaaggaggagaaactcatcaatatcttcttaaattaaagggagaatatcctccaaatgaacaagttaatttgaaaatagaacccggttctcatatcgctcaatacgacagagaatcagaaatatcctccatcgccatctttgctatcatcctctcctttttcatttttaactttttagttttcttgatttttaaggataaaacttacctatattatcttctttacttgatcaatttaggtttatggatggtaaatttatggttggccaaatggttaaacctctcctattccacttattttattcaacattatatcaataatgtatttttaattttctttaatctagcttatatcagctttgcattgagttattttagcaccgataaaaaaagcaaatggtataaatttttatgtgcttatcaagccttatacctcatcccttttttattacaattggcacatcataaaaattattatacccattctgaggatacaatattggccctactttcgctggggaatatcatttccatcttgatttttagcatcagtaattattcaaaaaaagggcgtgtagcggttttgtttcttattgcagaagtcccattaattagcgccggattaattttaggatttgaatttttagtttccaatgccgataactcctacaaattaggcccaacggcttttaaaattggcaccatcctagaaatcttgctcttctcatttgccttaggcaatcgctatcgggaacaaaaaatcagtttgatgaaacaaattgaagaaaacgccttacttaaggctcagagatcagaagaaatcaatcaactcactttagctaaaaatatagaattagaacaaaccgtaaaaagtagaactgcggaactagagaaaagaaatcaacaattaaacaagcttaatgatgagaaaaataaaatattctccattattgggcatgatttaaaaagtccactagcatcattacaacaaatcttagacctttacttaaatagagacatcactcatgatgaatttaaagaaatgggtgggattttgagtgagaaattaaaggggatgtctaattccttacaaaatcttgtcatttgggggcatagccaactagatggagtcaatacagtaaaatctaaagttgatttagcttttttaattcatgaaaaagcgcatcttctacaaatggccgcagaaggaaaaaagattgaacttatcattgatgttcctgagaaaacaatggcttatgtggatgtaaatcagactggtgttgtgattcagaatttgattaataacgccattaaatttaccagagaaaacggaaagatcatgattaaaacggaggaacaaagtgattttgtgctcgtttattttatggataatggaaccggaatgagcaaagaaatcgtaaataaaatcaacagcaataacctagtagagagttctccgggtacttccggggaagttggaacaggattaggactttctatctgtaaagaaatgttaaccgccaataatggagaaatttgggtggaaagtattcctaacaaaggaaccaatattcaaattaaactacccaaatcctagttaaaaattacttaccccgccagaaacaataaacttcatcgcttgcgccgatgatatttttaaaggcgttacccgatctgcttttactatgaccacttgacccgcaaaagagtacgaccaagggaaatacaccgctacctcgcctttaatcccaaaagagctcatatccttttgggttaaaaaaccaattcgcttgaagccatgcgcatcttctaccagaacaggttcactcaattttttatcatctcccacaaaggcttcagttaaatccttaatagacgaatagataaacttaaaaagaggcaacttatttagccatctattgaaccaattataaataggttcggtaattaaataggtcaccaaaaaaccaacaattaagataaatagaatcacagaaataatccctaacccaggtacatataaaggagcacccgtttctggattaattaagaatttatcgcttaaattcaaggcatcatccactgaagaaaaagcccaaaaaactaaaaagaaggctgcccctaaaggtaacacaaccagcaaacctttcacaaaataccttaataatgcactaaatattcttttcatttttatacaattattcgtaaaaatacactctttttaccctttgcgaaatattggttaatacctcataaggaatggtttttaattgcttagcaagatcataaacagaaagttcttcattaaacacaatcacatcatcctcttcttttacctccaaacctgttacatctaacatacacatatccatacaaatactcccaatagtgggtgctaattgttggtttatcatcatcttccctaccccattacctaaagctctgggataaccatccgcatagccaattttaaccgttgcgattttaccatcctctaacatcacccctcttctaccgtaaccaatggtatctcctttttttaaatgcttgatttgcgtgatggtggttttcaatgtagctacattttgcaagcccgcttgttcttccgcaacactggctatcccatacaaaccgatacctaaacgtaccatttcaaattgcgcatctggccatctgctaatagcagaagtattggctatatgacgaataaaatcataagaaagactttctttgatttgctgagaaagcttttggaatagttgaatttgatattgggtataatcccgatgttcttcactttcacttgctgctaaatgagaaagcacactcctcacctttaactcggtttgggtttttaaatattcacaaagtgctggtacttcattttcatcaaaacccaaacgatgcattcccgtatccaacttcaggtgtactggataatcctgctttttctcctcttttaagaaatcagcgaaagcttttaaaatcctaaaattatacaattcaggttctaactgatactgtaaaatagcctcgaaagacggtacttctggacttaaaaccatgataggtaagtgaattcctgcttgtcttaaagcaattccttcatcggtataagccaccgctaaataatctacgcgattatgctgtaacaaattagccacttcatcacttccactaccataggcaaaagccttcaccattgccatcaattttaccccaggttttagctttgctttataatgattgagattaaattctaaagcatttaaattgatttctaaaacggtatcatgcactttttgggtaagcgcttgactaattttctcgaactcaaaatgcctagctcctttaattaagatgatttcatttctgaactgttgtttatcaaattcctccaaaaaagtatccgtgtccttataaaaccagctttttaaagtaaataagttttgatattgataaagctcatcgccaataccaatcaatttatcaatacctttattcgtgagtaaagccgctaattgtggatataattcttgcgaaggaattcctgtttgatggatatccgagaggattaaggtttttgttggatgttgcttctgctgattcaagaaatctaaagcaatttctaaagaagaaaaatcagaattataagaatcatcaatgatagaagattgatgaatgccactctttaactccaaacgcattttaacggctaataatcgctccatcctttgttggatgatctgttgagccaaacccatctttaataaagtagcccagcaaataatagcattttcgatagaagccttatcagtgaaaggaatggttatgctaatttcttgatgttgataaatagcctgtagatgtgtatcctgctggtgagcatgaacagccgtaatctgcaaatctgctttatcctctctactccatgtaaatacatctttcttcctcaagctatcatctaaatattttttaggaatgatgactgttttacagtgctgaaacaatcgtaatttctcggctaatttctctgctctattggcaaaaccttcatcatgagctgccccaatattggttaaaattccgatggtaggttgaatgatggcttccaaatgttccatctcataagtggtggaaatacctgcctcaaaaatcgctaaatcgtaaagatcattcatttgccaaacagaaagcggaacacccacctgcgaattatagcttttcggactacgcacaatcttataatcagctaccaaaagctggaaaagccattccttaatgatggttttaccattactccctgtaatggcaattacaggcatctgaaaatttttacgatgttgcttggctaagagttgcaaagcccttaagctatctttaacccacaaaaaattggcatcaggatacagattaacatcaaaattaatatccgtaatgacaaaacatcttaatccttgttcataaagtgcggggataaactgatgggcgtctctcctaccttttaaggtgaaaaatatagatgaagcaggatcagaaactttacgactatcagtaagcaagtgagaaatgcgttgatgaggccgcttgattaaggctttttcagcgatcatcgatgatagctcttcaactacataagattgttttaacatcagcaacaaatttgatgattattcatgaatatcactaattttaaaatctatggaaaagaaaagctttacccctgttgattttaaaacagccatgcaaaaggcagaagcttattgtgcttatcaagaaagaagtcagtatgaggtaagaggaaaactcattcaattagggataagaggcgatgaattagaggaaattatcttacatctgattactgaaaactttttaaatgaagaacgtttcgcaaaagcttatgccttgggaaagttaaggatgaaaagttggggtaaaaataaaattgctcagggtttaaaattgaaacaagtgtctgctccactcatcaaaaaagcacttcaaaacttagatgaagaagagtatttagaaaaattgaaaaatctattggagaaaaaagcagaaaacatcaaagaaaaagtagcttatcagcgcaattataaactcatgcagtatgcattgagcaaaggttttgagcaggatttaatttttttcttgttgaaagataatgatttataagcaagcactaattttttttacattgcatcttgcaaaaactttttttctgtctatatttgcatcccgcaagggacgttctcaataatacatgcgaaagtagctcatcccgatagctatcgggaggtagagcacaaaatataaagaattgttctttacataagcgaaagtagctcagttggtagagcacaaccttgccaaggttggggtcgcgagttcgaatctcgtctttcgctctaaaatttccttcctatcaggtaggattttttttaaaagcgagaagctgctaattggtggaactggtagacacgtcccgataacatcgggattcgcccataaatcgtttgggcgaattattaaaaattattaatcagttgctgaagtggtggaactggtagacacgcaggacttaaaatcctgttcgccctaaagcgagtgcgggttcgattcccgccttcagtacaaaaacctctcatatgcccgtgagaggtttttttgtttaaaatatttcctatgttttacacttacattctacaatctcaaaaatcaggaagatactatatcggtcatactgctgatttaaaagaacggctgaatcgacataatagcggtttagttaccgctaccagaaataaaggtccttggaaaattgtatattttgaagtgttcaatgcaaaattagcggctaatcaaagagagctgagcatcaaaaaaatgaaaagtagaatttatatcgaaaagctaattcaatctcaacaaatttaaattaacctaaagcgagtgccccgattttcaatcggggccttcagtactcaaacctctcacatgcccgtgagaggtttttttgtttaaaatatttcctatgttttacacttacattctacaatcccaaaaatctggaagatattagatcggtcataccgctgatttacaagaacggctcaatcgtcataacaatggtttagtaaaggctactctaaataagggtatgatctggccttattaagtcttaaggaatctttatttaacttgctgaaattaaaatacttctgtattttagtattaaaacattaactatggcaacaagtaacaatccatttcttaagggctttagagggcatattgagaaaacagtggtggtcaaacaataccctggcgatagaaccattatcacagcatatcctgacatgagcagggttaaacctagcaaagaccaaaaagtacaacgctccttatttaaggaagcagtagcttatgcgaagggtattttagcggatagcattgaaaatcaaaaggcacaatcacgtctatatcaaagaaccggtagtttataccacgctttgttgaaagaatatatgcaacaacattccaaaaaagtgtaacatcccttcgggttaggttatggtttgcttctggtttccttcgctcatccttcgttcaaagacgaaggatgactgaacatgacctgcactaaattcctactcatcccttacccaccccccaccgtaaaaagacgaaggatgaaacggttccaataagctcttagtactattctaacaatttctactctccattacgctaccactagctataccagaaaagcggtatttttaacttttgcgcaagctaagcttgaaaattattgaaataattatttatcttgttctttgaaaatctaaacgagggaacagctacccatatctgcccgtgagaaagcttcgcatgaaaagattagaaatacagatattttagattcttagtggtttggaaataaaaaagcctccagccgaactgagaggcagacttaattcagtctaaggaataatccttattgtgataagctttcgatgtaaaagtaatagtaaaatttaaaataataaacaaatggcaagatttattctaggacttgatattggtactaactcaattgggtgggttttatttaaagacaacaaaatatttgataaaggggtaattatttttcccattggaacaaatatagataagaatgggattgagacaactaaaaacaaagaaagaggaacctaccgaagagtaagcagaacaaatttccgatataaattaagaagaaaaaatttaaaaaatcttcttgtaagcttagacatgttacccacattttctaacacatttgaagtaaaagaaaattatcaagcatcagatttatataaattaagagcaaaagctttagatgataaaatcccaattgatgaattaggtagaatttttttgttaattaataagcatcgtggctttaagagtaatagtaaaactttaactgaagcaaaagaagaagatggaaaagtaaaaggtgaaatatccgaactaaccatatcgatgaaaaaaaataatgctagaactattggtgaatactttcataaaatgtatcaaaaagctgctaacctttataatgacggtaaatggcataatttagatgagccatttgatgaaagagcattaatagacgaggagggtaatttcagcctcttaaatagtagaggcattcgcagagaagggagatttgttgatagagaaatgtatgctactgaatttgacctaatatgggataagcaacagaagtactatcctcaattaactggtagcagaaaggaatttgatgaaatatgtaaactaccagtggatgaaaaaagagctagtctcaaattatttagagaatccttttattggaaaataaagcatcaaacaattttctatcagagacctcttaagagccaaaagaagtttataggcaaatgtcaatttgaaaaaaacaaaagaactgctccagctagttcattattatttcaagaattcaggatttggaaacaattagctgatattagatatactgataaggctaacgacgcctataatcagcctttgccacgagaatggaaactaaaagtgtttgattacttacaaacacatctttcactaagtcttaggccaaaaaaagacaactcagacatattagaactactcggaattgctaacaaaaagaactttgaatttaactacgatagtaatgaagatgataaaacctttcaaggtaataaaactctatatgcaatatatacaacatgtggagaggataaattcaaccaattaaaagaagaaaataaactggaaaaactttggcatattctctacatggctaaagatgatgaatggttatatgatactttaacgtggaaatggaaatttgaaccatcggttgcaactaaactagttgaaatgggacttgaagaaggatttgccaattactcaagcaaagttttggcgaaaatattaccatttttaaaggaaggtaaagacgaacatgatgcgctaattctctcaaattatataaaagcgcctgacaaatacaaagaaacccaagctcttcaaaagaaaataaagccacttcataataatgaattaagaaatccagttgttgaaaaagcagtaggtgaaactatccgattagtaaatgcaattctgaagtctcatgaaatcgatcaagaagactttacaataagagtagaaagtaccagagaattcaaaaaacctaaaaaggaaagagaaagcatcagaagaaaaaatttagatactgaaaaaagaagagaagaatatgcaaagttcttaaacgagaaaaaggaaaaaggagaactaacctttagtaggcatatacaaaaaaatgatagcataattaacaagtttgagttatggcttgaattaggtgctgataaaaatgaccctgaattcaaagaatttgaaaaaatagttgagagaagggatagagaaaaacatagtctgtggctagattgcaacagagtctgcccttacactggtaatacaatcactttatctaaattatttagttcagaaattgaaatagaacatataatcccatatagttggagtttagatgatagttttaccaataaaacattaacttttaattatgtaaataaagaaaaagcaaatcgatctgcttatgattacatgcaatcaaagggaaaagatgctttcaatgaatttaaggaaagagtaaaagtatttcaaaaggaaaaagcagaaggaaaattcttaaatgcaaaaccagagcaaacttttactaatgcacaaggaagaaatgcatcatacatagctgtttatgtaagaaaaaaactacaagaggtttgcagagatgtacaatttactaatggttttgcaaccagtgaactcagaaaaaatgattggcgtttaggtaatcttttagacaaggttagataccaagaagaaactggaatagatgtagataaatacacaagagaatttgttaattataaaagagattttgaacagtatagaaaacgcaaagcaaatagtacagatatagccaaaacagattggagaaatctaacaaaagagatgactgctgaatacgaagcagaaactaaaaaccctatttatgactggtgggaagaattacaaaagtttgatgcttttaggggtgctaaaggaaagaaagaccgctcagaccatagacatcatttgttagatgctataattataggtatgtgttccctcagtattattcaaaagcttagcacattaaatcaattaagagaaaagcaaggtatttcactctatgatgaaaaaggagaattaacaagagaaaggattgatttacccataccctatctagaaattaaggaagcattagaatcagttcttatttatcacaaagcagaacaacatttaattacttcaaagcaaaaccgcatacacaaaaagaaacattcggaaactgattctaaagtaatcaagcaaagaacaactgctccgaggggtagtcttgtaggtgacaatttttatggaaaacttaagacccctcatcttcaaggatttacaaaaagtgatgtttacgtcaaacgtgttcctcttaatggtgaaaatttcaaggataaaaaaaatctagaaaaggtttatgataaaaatattaaaaagatattggaactaagacttaataaatatgaaggtaaaggggaaaaggcttttagtgaagaagctcttttaaaagatcctatatatgtttatagtacaaaggaatatcctaacggaatccctaataatccatcaagcaaagaaggcaacacactacctgtaattaaaaaagtaagagtagctaataaaaattcaagaaatttaattcaactagtcgccagagacgagcaaaagaatatcgtaaatacgaatagatattcagaagctgatggtaattatgtaatggcactttatgaaagtaaagaagtagataaaaaaggtaaagtaaaaattaaacgagactttgaaatagtttcatttttcaaagctgttgaaagaagtaggaatggcgagaaattatttgcagatgaaaaagaacaaaaagatggaactttcttgcctttgatgaagtcatgtccacacttaaaggctggtgactttgtagtaatgtatgaaaatgaacctgaagaaattaactgggaatcaaaaaaggacttaatgaaacggatttataaagtcacacaacttagttcgaaaatcgttagtaaaatctatgaatttggagatttattctttacaaaacacaatatctcaagttcaaatgctaaatatgaaagtaaaggctatagtaacattaaagaatacaaatatttgcaaaactctcatatacaattaaaagctatcaaagtgcaaatagatcgcttagggaacatctccaaagcataaagccatgctagaaacgtcaacctactaccacatctacaaccacgccaatggagatgacaatttgtttagagaacaacgcaattatccatttttcttatctaagtatcatcagcatatcgacccgattgcggaaaccatcgcttggtgcctgatgccgaaccattttcatctactggtgcggataaaagacgtagcggctttagaacaagattttccaaagtttaaaactttggaaaatcttgataacgaggaaaaacaacaacaactctcttatttactttctaaacagttttctaatctattcagcgcctacagtcaatcctttaataaagtttatcagcgaagaggttctttatttcttaagaattttaaaagaaaaaaagtagatagtcaagactacctctatcaactcatcctttatatccacctcaaccctattaaacatggttttacccatcagttatacgattggaaatggtcatcagttcatggttttgatatcctccaaacctctctatttaaagaattatttggaactgccgagaactataccagagcgcatgaagaaaaagctgatgattttaaagaatatcacctgatagaaagtcaaatcctaagcacctcctcatgattaaaagaaccctagcctttactaaccccgcctatttaaatctgaaagatcaacaattacagattgacctcccgcaccttaaggttttgggtgatgaggaatccaaaaagacgattccgatagaagatattggggtgattgtattggatcatcaacaaattaccattactcatgcttgtatggctgctttgttaaacaataaggtagcgttgattacttgcgaccatagtcaccatcccgtaggcatgcttttacctttagacggacatgatacgcaaagcgagcgttttaaattccagattgaagcctccaatccgctaaaaaaacaattatggcaacaaactacacaggctaaaatatggaatcaagcagctgttttagctcagagaggaattccacatgataatatgttgcattgggcaaaatcagttcgatctggtgatcctgataattacgaaggccgagctgccgcctactattggaaaaatgttttcccccctaaggtagatttctttagaagaagagaaggtcatcctcccaataatttactcaattatggttatgctatcttaagagccatggtagcccgctcattagtatcttctggtttattacccactttaggcatccatcatcggaacaaatacaatgcctattgcttggcagatgatataatggaaccttaccgaccttatgtggatttgattgttttaagaattgttgataatggagaaaatttcttagagcttgggcaaagcattaaaagccaactattagccattggaagtgttgatgtgacttttgagaaaggcagaagtcctttgatggtaggtttgcaatacaccacagcttctttagcccgatgttttgagggaaaggctcggaaaatcaattatccatctatcatcgactttaatcagaaaaagaaatatgaaatccctacagaccgagatcatttatccatagctgcagaagatgaagaggattatgaataaaactttagcaagcaatgatgcgcttaaacgaatatcgtattttgtggattttggtgttttttgatttgcctacggaaaccaagaaagaccgtaaaatttacgcaaagtttagaaaagacattatgcgtgatggctttagtatgtttcagttttcgatctatttacgtcattgtagcagccgagagaatgccgatgtgcatatgaaaagagtaaaaaaaattcttccaccgcgagggcatgtaggcatgatgaccattaccgataagcaatttgggatgatggaattgtattatggcaaagaagaaacgcagctcccctccaccccacaacagctagaattgttttagatgattgatcctcagaaaactcaatcagacaggctatggaggaaaaaattagatgagtaaaaaagaaaaagtattagaattttaaatcgaagagcctatagcccttcgattttttaattctaaatttactgacaactcactgaaaaacaaagcaataaagccacctatgttgttgtaaatatcagttttgcaaagaacgaaagcaaatcacaacttgcgaacaccacgcctaaatcgccattgcgttgttgtaaatatcagttttgcaaagaacgaaagcaaatcacaaccgttgagcttgatttaatagtttgtaaagtgttgttgtaaatatcagttttgcaaagaacgaaagcaaatcacaacctgggtgattttcccaaaaactgtttctgagttgttgtaaatatcagttttgcaaagaacgaaagcaaatcacaacgttataagcaaatcacaatataataaatatgttgttgtaaatatcagttttgcaaagaacgaaagcaaatcacaaccagcttttgtttctttcaatttatcttcaggttgttgtaaatatcagttttgcaaagaacgaaagcaaatcacaaccgtttaataaatctgaaatttgtgaaacctgttgttgtaaatatcagttttgcaaagaacgaaagcaaatcacaactagtcttgctcattttcaaatagttttatagttgttgtaaatatcagttttgcaaagaacgaaagcaaatcacaactgctaacgtatcggtgctatacgatgtggcgttgttgtaaatatcagttttgcaaagaacgaaagcaaatcacaacttgtgtcataataactcaataaaataatctgttgttgtaaatatcagttttgcaaagaacgaaagcaaatcacaaccgctagcaaagcgtacaaaaggcaaacttcgttgttgtaaatatcagttttgcaaagaacgaaagcaaatcacaactgccaagaagaaactagaagatgcaggtagttgttgtaaatatcagttttgcaaagaacgaaagcaaatcacaactatttaatccgtattctctcactaggttgagttgttgtaaatatcagttttgcaaagaacgaaagcaaatcacaacgttatgaacgagaaccttaaagaagaattcgttgttgtaaatatcagttttgcaaagaacgaaagcaaatcacaacagattcaaaagcataaccactgtggtaaacgttgttgtaaatatcagttttgcggcagcactcaagcaaatcatcccgatttttccatcgggattgtaaatatcagttttgcaaagaacgaaagcaaat

SEQ ID NO: 3595 - DNA, 15535 bp, synthetic construct
  misc_feature 1..15535: note = Synthetic
  source 1..15535: mol_type = other DNA
gcactaaccataattgggatcttggcgatggcaatgtaagcgcgctccctaacccggtcaatatgtatatggatacaggttactttacagtgatattaattgattccaataaatatggatgtaaagacacttctgtacaccatgtgtatgtgttaggttatgccggtgcattaagttatgcaccgctttcaggatgcgtccctttaaccgtccattttaaggcaactgtcagtaatgtgccgagtattatctgggacttttcggacggaattatttcgaaagctattctgacagacagtattgatcatatttatctgacgcccggcgcttacgtaccaaaactgatattaagcgataatacaggctgtagtaacttcagcatcggtaaagataccattaaggtggataacgtttttccgggatttacttccattccgaatcctatctgtattaatgttcctgtttattataaagatacttctcacagtttgttctcaactgttaactcctggctatggaaatttaccaatggtgacaccagcacaagcagctcacttccttatttatacgctgttgcagggacgtacccggttagcctgaaggtaactgaccaatggggttgtgtggattctgttacgggagatgtggttgtatatccgcaacctgtcattacagcaagtcctgatacgattgtatgcctgaccgacgccgcaacacttacaggttacggaggcgtcagctattcctgggccccgacatctactgtcagttgtataaattgcaatcctgctcttgcgtctcctagagttgttacaacctatactgttacaggaactgacattcatggctgcgtcaatacgaataccgtgacagtattccttaaaactaaaacagtgagctatgccagcagtgataccggtatttgcgctaattcagcagtgcagttacttgattccggcggtacaacttatctctggtcgccaagtggcggcgttagcaatgtgcatattgccgatccactggtgagccccgcatccactacacaatatatggtaatcgccaaacttggcagttgtattgcggataccgcttttgtgctggttaccgtacaccccttacctacggttgaagttggccccgaccagacagtggtagaaggtaatttaacacatttaatagccaatggtacatggatagaaaagtacagttggggaaaatctcctgcgctcagttgcgatacctgccctaatccggtggctaccaattctgtaactgctacttatatagtagttgttacttcggcattcggctgtaacgcttccgattctgttaccgtacgtgttcactgcgataagagccagatattcatgccgaattcctttactccaaacggcgacgggcaaaatgatacatactatccgcggggaaaaggcgttatgatagttaaatctttccggatttataaccggtggggacaactattatttgaacggagtaatttccaggtgaacgatgctgccaatgcctgggatgggtcctacatgggtggagatccaaggcctgatgtattcgtatgggtagtggatgctgtatgtgaaacaggcgaaccgataaatttgaaaggtgatgtaactataatccgataaaaattaaaatcaaatgaacatgaaattgtcttttattcaaactacaggaaagcaaccggggaagagtgcattgctttcatttacttattttgcaggtatcctgatgctgctctcctcttcccgtctttacgcccaggccgatattcatttttcgcagttttatgaaacatccatacttcgtaatcccgcgatgacgggagtttttgaagatgattacaagctgggcgcctattaccgtagccagtggagcagcatctccaatccatacagaacagagcttatctctgccgaaacccactttgccgccagcaggacctctgacgatttcttcagtttcggcctcctggcgtatatggacaaagcaggcagcattgatgaaaaaataacttcgttttaccccgccatcaattataacaaatcactgaaccccaaccacaatacctacttatcggttggcttcaccggcggctacctgcaatacagcttcgacccgtctaaagccactttcaacaaccaatacatgaatgggatgttcaatgccgcaaacccttctatggaaaatattccgaacgccaaaatgtccatctgggaccttggcgcaggcattaactacaataccacaaggggcgagaacagtaatgtcagttacataattggcgtgtccggctatcacttcacccagcccgtcatctcttattatcacaacaacaaagtgtcggagaatatcaggctgaacgggaacgcggcgataaacactgttgttaacgacttcgtatcgttccaggtacagggcaactatgccatacagggaacctacaaagagctgatggccggcgggcttattaactacacgcaggtgcagggcatggaaaaccggttcgttatttctgctggcgcgttttaccgttatggcgatgcgatcatacctgtcataaaagtgaaataccatgccatggcggtgggcataagctacgacgtaaatttatccaccctcaaagaagccagtaatatgcagggtggaacagaaataaccctgtttttcagtggaaattatgttgacagaagtatgcagaaaaaaaccgtgtgccctaagttttagctgctcaaatttttatcctgagtttatcgaagggtgtcatcctgagtttatcgaagggtggcactcctgagtttatcgaagggtgtcatcctgagtttatcgaagggtggcactcctgagtttaccgaagggtgtcatcctgagtttatcgaagggtggcactcctgagtttaccgaaggggggtacatggcatttgtggtactatcaccgtccggtgtgtcactcccttgtacgttcatatcactattcctcaagcccagtcattgtaagtaaacaatttgctgagcacaagctctttgaaaatgacaagtcataaggaataaatgcaaacagcgctcaagctaaatttagattcttttgctaaatcaaagccccgccaacaagggtaacttttaatagctttcccccacatttcagcgtatagctatctttttttgtgcggagcgtttcaaaaaaagggcccttttcttttgttacttttcttttgggcaagcaaaagaaaagtaagataataagggcaaagctgaaaaaagagagggttttaagtgactaaaattaacccattacaatacatgtcattggaagtttattgaagggtgtcatcctgagtacccaccttttgacgccaaaaggataaaatgtgaatgacgttactaacacttaactcattcgaggtggtcattgcgaggtacgaagcaaccttacgatttgaggtaaaataaaatagcaccattcatttatcatttaaaatcaatcaatcgcaaagacgtcattgtaagtttatcgaaggatttctttgatttaccttcaataccgcgacgctcaccgaatgctgtttccgtgaggaattgcctgtatctatctttgaaaaaaaatcattttttatgagaaagatatggatcaggaaaatacccgttgttattgcgatagccgccgcgggaatatttgtttttagtggcgttgttatgcttttatggaatggcattttgcccgccgttctgcatattggcactattaccatctggcaggccgctggcatattactattgtcaaagatcttattcggcggctttaagggcaggcgcatgtttaacggaagctgcaggaaaaaaagcctgtttatgaagtggcagtacatgactcccgaagaaaaagaaaagttttccgggatggggcattgtaataaagtgtacggaacagcgaactgttaagtaaaattgtacactttttaagagatccatctggcgcgtgttttggcgcatagcaatgtgtgtgtgccaactcgtgtctaagcaatttagccagtttgcaactggcattcataaactccttaacccatccagaattgttgcggccctaacggggcgcatgtgctggtaatttttgaatttctacaaagctttagcacctaacggagcattccaactcaatgaaggaaaattatgttgtcgcaagattgcttcgtgcctcgcaaagactaacacgagtactgatgcttcctacgtcagcatgacaaaaaagcaaaaaacaagcgcaaaaaacacacccctgtaaaagttaccgctgccacatcaaagccgactcccgtcgtcccctaacagccttcccccacataacaccgtatagctttcttttgccatgcggatgcattcaggcaaaagtgcccttttctttggttcgtttcttttggccacccaaaagaaatgaacactcgcgcaggacagataattaaggacaaaaaacacacctctgtaaaaattatcactgccacatcaatgccgactcccgtcgtccctcaatagctttcccccacatttccatctggcgcgagtttggcgcagagcaatgtgtgtgagccaactcgtgtctaagcaatttagccagtttgcaactggcattcataaaccccttaacccatcccgaattggtgcggccctaatggggcgcacgtgctgtgaaattttgaatttctacactcatagctgcaatgtgggctaacatcagagcatattaaacaaaaataaataatacaaaatatttggaattgtcaataatggtgtctatatttgtcccttaatttgaatattatgacaacaaaatttaatattataaaattacagtgcgcaaataaagcgcaacggagagcaaagaatgcgcaggaatttgagcacaaaatttcactaactaattgatttccaatgtataattgcgcaaaaatcagaaaaataaaaaaatcaaactagaattgcgcaaccattaaaatttatattattcattatgcattcaatccgtaaaaaagcataattcaaaatacaccacaattccaggaattcctcaattccagaaattccggttcatacaaaatagaccattgtacagaaaacgtacagttctttccggtcacaaaccaaacaactcattgaaaatcaatagaataatactctctgaaagtaaataaaaaaaaatccttaaaaaccgtacagttataaatttatgacaatatcaaaacccattattaacccattgagcaattgagccattaaaaaattaccacaaatgcacccgcaaactatccgggatatacattttatctccgggcttgatgccaaatgcgtcatagaattccggcacgttcgggaaggggccgttcacgcggtattttgcgggggagtgtacatcggtgagtaattgtgtggcgatcctttcagggcgttctgcgagcagccagcctaaggaatagcccatgaagaagcgctgcgtgggcgtcatgccgctgatcttttcgcccttcttgtacatgtcggtttgtttaaaagcgtcaaggcctatcagtatgccgccaaggtctgcaaggttttcacccagtgtcgctttgccattgatatgcatggtatctaacgggaccattttgttgaactgctttacaagcacatccgcgcgcttcatgaactgagcggtatccattaaagaccaccagctgcaaagattaccatactcgtcgaacttacggccctggtcatcgaagccatgggtgatctcatgccccactgttgaggctgcggtataaccatataccagcgcatcatccagctccgaatcgcggtaacccggcacagtcatcatggcggcaggcaatactatttcattgttcgattcattataatacgcattgtaggtttgaggcgtcatgctccattcgtcacggtccacgggctttccaagcttgctcatttcataattattccaccattggttcgcacgcatcacattgagcgcataagggccacggtctattttcagtgcggaaaaatctttccatttatccgggaatcccacctttttgcggatggccagcaatttgtgaatggctttttgtttggtgctgtcggtcatccagtccagcttttctatgcgcgctttataggcggtgcgcacattttccactatctgctcataacgcgcctttgcttttgcgtcaaaatattccttcacaaaaagctgtccgagctcttcgcctatagcgccttcttccgcatccaataccctgcgccagcggggatgctgtgcttcagcgccgcgtatggttttggagtaaaaattaaagttggcagtaacaaacggaacacttaaataattaccgaaagtctttaccaggtggaaggccatatagtctttgagggtttgcatatccgttgtggctattaccttgtcaagcgctttgtaaaattccggctgcccaactattacgctgtccacctgtttcacgcccatctggccaagatattttggccactcaatacccggcgacagggtacggagctgcactatggcgtacttgttataattggtataaggatcccgcaggtcttcgagtttgcgggatgctttcgcaagattggtttcgaccatcataatttccgcagctttaatattggcctgcaggctgtcagttcccatcaggcgaaacaaagaagcaatatactgcggatataaaccgcggatctttacagtacgcgcatccgtattaaagtaataatcgcggttgggcattcccagcccgccctgtgtcataaagtaagcctccacatcgctgtgcttgggatcctgcgacacgccttcatcaaaaaatacattggcgccatagctatgcatatgtgcagcctgcgtcagtacatcttcctttgttttcatttcagctatcttgctgagttccgcgcgcaaaggctccacaccattcttttcaatagtgttggtatccatagcgctgaaccagaaatcacctatctgctgtcccgatccgcttttgtccgctcttttcagggcatcttcatttatcttctgtagcttgacgtataattctttttgcaccagttcgcctatgccccatgtagtttcatcgccgggtatggggttgtgtttcatccatccgccattggcataagcgaaaaaatcatcgtttggttttacggtagtatccatatccgtacggataatatcctgtttggcggcttctttgggtgcaggtgaattgcaggcagtaaaaaatgacagagcagctaatatgctgataagtttgttgtgcatgagattataattaagctataaaagtagtttgtttttatttacttttttatggcagtattcaggggggcaaatcctggcaagtaaatattattaatgtttggcaatctctgtcctgcattatcttactttttctttgcttcgccaaagaaaaagtaacaaaaagaaaggcgatttttggcgaaacgctccgcacgcccaaaaaaagctctgcgctgaaatttgggggaaagctattaaggggaagcccttgttggcggggcaatgattgaagcaaagaacctttcataggggcgtgtgctgttactgactaatgaatagcatctaaacaataattagtgcagcctgacttaaaaagcagaccctattcagggaatttcaagaggccggggcaatatccaaaaaactgtttgaatggcaccggtatcagaaaaagttacaccacggaaatggaactccatgcaacaatcgggacattactccttcacaaacttcctgacatctgcgccattgatcttaacgaagtaaactcctttagggaagtcagcaatagctacctgtactttctcagagttgtatttattgttacagatagcttgccctaagagattgacaattgttatgtggtttattttacccgcagccgttatggttagcgatgtagttgccgggtttgggtagatgtggatatcatttgccgaagcgctgatatcagcaactccaaggttattgaaattgactgtcgcagaggttccggtacatccgttaccgtctgtaacagtaactgcataagagccgttagtaaccggggtataagcagaagatgttgccccagggatcgcagtgccagccagcatccactggtaagaaatataagaagaggaagtatttaataccagtaccgctacagtaactaatggagttggtaacggattgatggtaatggcttttgttacactagcggtatatccgcaagtgttggtagcggaataggaaattgtatctgttccggcgcttgcacctgatactaatccgcctgaaacagttgccttgccattagattcactccatgtgccacctggtttggcatcggtaagcgatatggttgaacccgcacaaactgcagaggcgcctgttatggtgccggcaatgtaggaagggtcgcggcttattacaaaccagatattttttgtagtaacaggaggtccgggatctgtaagtttcacttctaaccaataagtaccttgtgaaataaggcctaatgtgctcatggacaaatagaaatttccacctgcagaaggcgggtagtatgctgtatgagttgctcctgaagtcccgttccataacgcaagggtggaattggaatacatggcagtattatcagcaatgccaatattagggagccagtctgacgggaaatttgatgctactacctgccagtttatagtaataggaccagcgcttgaagccgttgttatagaatcatagaggttacccatgaccggacataagtaagcattcccataagcagtatcatgctccatagtaaatgtttgcgcattgccggcattaccagcgctgatgactattaacaatgtaaggatgtaaagtttaaggagtcccatttgcattattttttaataaaaatacttaatcattaattcttatccaaaaagaataaactcaatgttaaatggacaaccataaggccaaaacccacggcttattatttatgaaactgagcgcgaaaacttagataaataaattaacatggttgtaagtcagatttcttatttcttagtatatttgttctgataattcccttaaaaaattattattatgaaatcactaatccctatagttttaattgcatgcacgatcctgattgattcctgcagaactactccaaacaactccctaaccctgaattgcagtggggccggggggcctttagtaatatataaaacaaagaaggattattcaaacaatatcagtgtgcttctgtcagccgataagaaatcagtactggcttttcctgatacaaaagatgcggcaattcaaaggcctgttgcacttgcaaatggattttatctgcaaaaaatggtggggaatgcattcacatcactgacatttgaccagtacattaatggcacctattctgaaggcgatctgttccacgatgttattgacacagatccttttaccaatatgtacgattgtacgagagctacagattgtgacagcttaaataagctgatacagaataaccaattgagccagtgtaagctcattaagtagtgttataaaagagggccaggcacaggaatctaaccgacgatctgcaatttaatattgcacatttagtcctaaatccgtcccaaacaaacctgtcccaaactcaaaagggctgatttatgtggggtttagttggtgaggttaagagcctacgttaggcgttaaatccattgaaggcattattcttttgacctcaataaataaaaatacggatagctttttaaaaataccgttaaaacaccctcttatatattaatcggaatgtttactttgtgatttggaataaaaaagcctccagccgaactgtgaggcagacttaaatcacaataaggaataatccttattgtgataagctttcattgcaaatgtaataaaactatgactatggcaaaatatattttgggacttgatattggaacaaactcaataggatggacattatttaaggataatgaaataatagatggtggagtcctcattttccctattggtactaatgtggataaaaatggcattgaagccacaaaaaatatggagcgtcgaaaatataggggcgcaagccgcaaccattttcgatataaacttcggcgcaagaaattaaaaaaatttttagaaaaattaggaatgctcccggatttttcaaaaacgtacaaaataaaagaaaaatatcaggcttctgaattatataaattacgtacagatgcacttgataaaccaatcccacgtgaagaaattggaaggttattcttattaataaataagcatcgtggttttaagagtaatagcaaaatactctcaaatgaaaataaagaagaaggtacggtaaatgaaggcattggacaactgcaaaaatttatcgaacataacaatgctcgtacaatcggcgaatattttcacaaaatgtatgctaaagcaaacagtttaagtcataaaggaaagtggcataatacagatgagccatttgatgaaagggctgaagttgatggaaaatttatacagcacaataatcgcggtatccgaagggaaaacggtagatatgtaggtcgcgaaatgtatgaacttgaatttgaccttatttggaaggagcaaaaaaaacaatacactcaattaacaggaagcaaagaagaatatgagcaaattcgtcaattaccggttgcaacaaaacgagaaaaattaaaggtatttagagaaactgtgtactggcagcttaagtaccaaactattttttatcaacgttcgttaagatcgcagaagaaatatattggtaagtgccaatttattaaaaacaaacgtactgcgcctgcaagctctttatcttttcaggaattcagaatatggaagcaattagcagatgtaaaatatactgataaaggaaatgatatttaccggcaatcattaccaaatgatttaaaacaaaaagtttttgattatttgcaaatacatccaaaacttaatttgagggaaggcggtaaaaagaaagatggaagtaagaatacagatataatggacgtgcttggtatagctaataaaaagaattttgaatttaatttcgacaatgatgaagatgataaaacatttgaaggcaataaaactttatacgctatttatactgcttgtggcgaagaaaaatacaacgagctaaaaacaagtaataaattagaaaagctttggcatatattgtatatggcaaaggatgatgagtggctcaaagatacattaactagcaaatggcaatttaatgatgttactgctataaggcttgtagaaatgggattagaagatggttatgctagctattcaagtaaagtaattgaaaaatcactcccatatttgcgtgatggaaaagacgagtatgattcgcttatccttgcaggatttataaaatctcctgatgaagtaaaagaagaaattgttttgaataaaaaaataaaacaacttgcaaataatgaattaagaaatccggttgtggaaaaagctgtaagtgaaactattaggcttgttaacactcttctacgatcaaaagatattgaccaaaatgattttacaataagaatagaaagtacgcgagaattaaagaaacctaaaaaagaaagagaaaatatacgccgtggaaattctgataccgataaaaaaagagaagagtacgttcgttttttaaacgaaaaaagaaaaaatggtgatttaatatttgcacgtgagattcagaaatacgatagtattattcataagtttgaattatggttagaactaggtgcggacaagaatgatgcttcatttagagattttgaaaaaatagttcagaaaaaagacagggaaaaacatagcctttggttggaaagcaatcgtatttgcccatatacagggcgtattattgctttatcaaaactttttagttctgaaatagaaattgagcatattatcccatacagtcgcagtctggacgatagctttatgaataaaacaataacctttacagaaattaataaagaaaaaggaaaccaaactgcttttgaatatatacaggcaaaaggaaaaaatgctttaaaagattttaaagaacgagtaaaaatattcagtaaggaaaaacaggagagtaggtttttaaaggaaaaagtagatgttgggtttactaatgagcagctaactaatacatcatacatcgcaaagtatgttagaaaaaaattgcaggaagtctgtaaagatgtccaatttactaacggcgctgctactgctgaattgcgtaaaaatgattggcgattaagtaatttacttgacaaaattcgttacgaagaagaatcaggaattgagattgaccaatatttaaaggaattttctctttataaaaaagactttcaaacttaccggaaaaagaaagccaatagtacagatatactgccaataaattggaagaatctcactcaggacattactgcaaattatgaagctgaaacaaaaaatcccatttatgaatggtggcaggaaatacaaaagttcgatgcgttcagaggcataaaagggaaaaaagaccgttctgatcacagacatcatttgcttgatgcaattattatagcaatgtgttctcccaaaatcattcaacaactaagtaggtttaatgcaataagggaacaacaaggtattggaatgtatgatgagaaaggagagttaaccagagaacgaatagagtgtcctataaagtatgaacaaattaagaaagcaataaaagatgtactaatataccatagggcaaatcaaaaattaatcacaaccaaaataaaccgaattcaaaaaaagaaagctaataacaaagatttaaggattatcaaacaaaaaactatctcccctagaggctccctacatgcagataactattttggaaaacttaaaaacccattaaatcaaggctttgataaaaaagacgtttatgtaaaaagaataccagtagaacctgaaaaatttaaggatataaattccttggaaaaagttattgattgcagagtaagaaaaattttagaacgaagattgattaaatatgaagggaaaggagaaaaagctttcagcgaagaagcattactatctgatcctttgttcctctatagtattgataaatatccagaaggagttcctgataatcctttaagtagtaatggcaagttattaccaattattaaaaaggtacgtgttgcaaataaaaactcaagaaatcttattcaacttgcagcaaaggatgaaaataaaaatatagtcaacaacaatcgttatgcagaaactgatggcaattatgttatggctttatatgaaagaaaagaaaaagataaaaaaggtaaagtaaagatcaaaagagattttgaaattgtctcgtttttcaaagcagtagagaaaagaagattaggacagcaattgtttcctgatgaaaaaatgcaaaaagatggtacatatttaccattaatgagttgttgtccatacttaaagcaggacgattttcttgtgatgtatgaaaatgacgaaaaagaaattgattggaaaaataataatgacttgaagaaaagattatataaagtttctgaaattgggagacaagtaaacaccgatggcggcgaatttggagtaattaaactgatacgtcacaacagtcaaaaaacaactaaagacaaatacattactgaaggaaatttcatcaaaatattgcactcaggaataaaatgcgttaaaatagtaattaataaccttggtgaaataattaaacatagggaatgattaaacgcaccctctacttcggcaaccccgcatacctcagcaccacacaacagcagttggaaataaaggtattggaaacgggcgaaaccaaaaccgttcccatagaagatataggagtgcttatacttgaccactggcaaatcacaatcacgcaggctgtgatagcacgtctgcttgctaataacactgcactcattacctgcgataatacgcaccatccagtcggtttgttgctgaacctcgatggtcacacgcttcaaagtcgcatatttcaggctcagattgaggcgtcagaaccattaaaaaaacaactctggcagcaaaccatcattgccaaaatacaaaatcaggccgctaatcttggacaacagtctgcaacaggaaatttgtttaacgctcccgacaaacttttattaaactatgccaaagaggtaaagagtggtgacagcgaaaaccttgaggccacagccgctggttattactggaaacgtgtctttccaccatttcttaatttctcacgtgagcgcgaaggattcccgccaaataatcttctcaactatggctatgccattttaagggctatagtggcacgcagccttgtaggttcagggatactaccaactctcggcattcaccaccgcaaccaatacaatgcctactgcctagcagatgatattatggaaccgtaccgtccttatgtggacaaagtagtttgtgaaatagtaggtaacaatgggcaatacctcgaaatgacccccaacatgaaaaaacaattgcttgcaatacccgctatggacgtaatgatagacgagcaaaccagcccattgatgaatgcagtgcagcgcaccaccgccagccttgcaaaatgctatgaaggcaagacaaggaaaatattgtatcctgttttataaatatctccctgtccccttatggagggctgaggtaaggctatgtacgaacgtttaaacgcatatcgcattatgtgggtacttgtatttttcgacttgcctactgaaacaaagcaagaccgtaaaaatgcaggaaaattccgtaaaaatatgcttgcagacggtttccagatgtttcagtttagcatttatatgcggcattgcagcagtaaggagaatgcggatgtgcatatactgcgcacaaaaaagaacctgcccgaaaaagggcatgtaggtattatgtgtattaccgacaaacaattcggtatgatggaaatattccggggacatgaagtaattgacaccattcccccaccacagcaattggaattattttaatcaagattcttacataaacaggaataaaaaattgagcaaaaacccgtttttttattcctgtaaataggctgaaaacagccatagtagccaactgtagcgtttggcgttgtttaagacctgaaagctactaaaaattgaaagcaaatcacaactgcagaggatggcgggtttaagaggcttatgttgtttaagacctgaaagctactaaaaattgaaagcaaatcacaactccaaacagctaatgcctaacggcagggccgttgtttaagacctgaaagctactaaaaattgaaagcaaatcacaacaccgggggactgataccatgacggtagatgttgtttaagacctgaaagctactaaaaattgaaagca

SEQ ID NO: 3596 - DNA, 21304 bp, synthetic construct
  misc_feature 1..21304: note = Synthetic
  source 1..21304: mol_type = other DNA
ggctctatcaactcccgctcagagcggcatggcgcacataatggcctctgatgaacaagattcggaaagccggatgcgggaaaaccgcacgtccggtttgatgaggggcaggagagcttcggctctcctgcctactctactcagtcttcttgagccctgaatgggcggcataacgtagccccgggcaagcgagcctcagcgagcaccgcccggggtttccgacaacatgaccgggaagcaaatccacgtccttcgccacacctcacgcccaccagcagcgcctacatggaactccgccacgcatcagtcgcgctgaatcccccaatatccacaacgaacactcttaaccaaaaaaagttgccaggcattttgtagaacattgtgcctcaactcattgacttccaatcgcttgaatcgtcctcatcgtccgcactttaggcgcttgaggtgccagatttgggcataaggcggggagagtatcttcttccccggctctttcttcaacgcttccatggagcgcgccgaggggctgacaccgttttcgacgaggtcatggggacggccttgggaacggtcttggccgcagtggtgccgtcgatgccgaggttgatcaagttgcctcagtatcgcctccgggttgacgagattcgcgtctattatgacatcggagaggattacgtcatgattcatggcatcatcccgaaagaacggacattcgaatggctagacgaacacggaatacccaatgatcacagcacccctgaaccaagttaaggactctttttcagagttcgtgaaccgggcctgcaccgagcaggttctcgtgactcggcatggtcgcccagcggcgatcatcatcgggtttgcagacgaagatgcctggattgattatcgacttgagcacgacgagcgattcgttcagcgcatggccgagtcccgcgcccaagccgccgctgggcagtggcgcacgctggatgccatcgaggccgatctctaaaattaccggtaacgaacaggcgaacattaaaggatgcagccaagacgttaatcatagcagcccagacgcgctgacagtaggcaaaaatacattctccgcacattcctttgtcccctcattcctttgccaaaatcaaagctcccgccagctctaccctgccgcgcatccccccctacggcgtcgccggcttcagctccctgccactcaccaccgccaccagggccagatcgacgagcagcttctgcacgttgcaattcgatgccgcaaagctcttctgcagatcctcaagcgtctgcgggccgtaggcgaggggttgttgcttcacgaagtggttgaagagttggcggatgaaggcgcggtgtccgtaggggctgctggccacgtagttcacgatgtcgcgcggcccggtgagatgcaccacgcggccttcgtcatcggcaaaatcgccgacggcgttcaccggcttattgttgtcctgcgtgcgccagcggccgatggcgtcgtagttttccaggctgaagccgagcgggttgatcgtggagtggcaggacatgcaggtcttgttgcgcgtcagttcggtgatcttctcgcgcatggtcagcttgggattgaagtggctctcatcaaacgtcaccgccatgggcggcggacgcagcgagaggccgacgatgttgcgcgtgaggaagaccccgcgatgaatcggtgaggtggcgcggctggaggccagcgaagccagcagatacggatgcgtgaccacacccgcacgctgcttcgggtcaaacgacacctgctggaaggcactgccctgcacgggcttgccatagaatttgccgaggcggtcattgagcagcaggtagtcggcctgcaagagctggcggtagtcggactgctgactccacaccacctgatcgaggaactcgaacaacgactcgcgcaggtcggcctgcacgctgtcatcaaagccggggaagaccttcatgtccttggcgttgccctcggcgcgctcaagttccagccagtggtggaagaagccatgcagcttggccttggtgcgggtgtcgctgagcatgagctgcgcttcagcgcggatctgctcaggcgtgcgcaatttgcctgctgcagccgcctggatgagtttcttgtcagggatggaatcccacagcgtcagcgcgaggcgtgaggcaaaggcgaagtcatcgggcttttcggcctcacgcagttcagggtacaggaattgcggtgacttcagggtgaagagcaccacgcgcttcacggcctgctctggactcttggcggacttgaaatgagattccacaaagagctgattctgctcctcggtcagggggcggcagaaggcggcttcgacaaacgtgaaggcaaactttttgagcttctccatacggtccggcgcaccctccttggtgccagcgagttcgttcagattttccaccacatgctcggcggtggagatggcggcgtccgtggtggcctgatcccagcctttggaaatggaagtgcctcgctcatagcccacgctgcgatcatcggcaggaaagctcgtgttcacgatcatgagttcacgggggcgctcggtgcgcagcgcatgctgcgggatgatctccgccatgccatgcggtggcttccaccacagctcgatggaggcggacttctccttgaatttgaaatgatccagccgcaggcggtaagcgcggccacctactaggaagaggctcttcttctcctcgcgcaccgtggggcctgcgctcacccaggcatcaatcagggcatcgttttcactggtgtcattgatccacagtcgcgcgccgttttcggttttcagggtgaattcatacacgcccgtttcttctgccaccaggctgccttcccaggtgtcttgaaactgatccgtctccatcttctccttgtccggactgtcggcaccaaagtgaaatgccacctgcgcatccacacgatcaaacttgtagttggcgcgtttggctttgatgccttttttcgccgtggtgtccaccaccggctcaccgggcttgggcagttccgtgccgcgataattgcccttcaggcccgcttcggcaccgatgggccggtcaaatcctggccccatgcgaaatcgcccgatcaggtccatcacggaagtgcgatactgcgcgatggtcagtcggctcagatcctgatccggcggatggctgcgcgcctgcgctgctcccgaataaaaagcctcataaatatacgccgccacctgcttcgcatcctctcccacgcaggtgccctccttgtcctccggcatcgtgcgctcgatcttccgcgccagcgcctccagcgtgagatcgcccgtgagtggatcatcatacttgtccttcacgccctgacccttggtcccgtggcactcctggcacatcttcttgtaaatgacggcaccgggatgctcggctgcgtaggtggacgcagtcaggagccacagcgtcagccaggcgtatcgtgaatgggagtgagtttgagccatgaaaggagtctgaacttggctaagctgaaaaacgggaatggatggcctacggaatacacggaatactcggaaaggagcattccacatcggtcagtcaaaaggtgaggcagcggttatgtgcttggttctgattttccgtttgttcagcgtattccgtaggccgtcatctccggctccgggctaagagtataatctcttcaccgcaactctctttcatggatcgcatgtgtgaaactacgtcttgcttggcagatcgacgagcatctgcgcattgctagggtagcgctccagcagggagatcacgcgctggatcgcttcgacgggcttgtggcccgccagaccacggcgcagcatatggatcttgtcgagctggaaggtctgcagcagcagttcttcacggcgagtacctgatttgaaaatgttcaccgcagggaaaatgaattgctcggcgatcttgcgatccagcaccagttccatgttccctgtgcctttgaactcctggaaaatgaggtcatccatgcggctgccggtttccaccagcgcggtgcccaggatggtcaaggagccagcggtacgcgtattgcgcgcagcggcaaacagacggcgtggaatctccagcgcacccacgcccacaccaccgctcatcgtggcaccgcttttgacggtgttgttgaaagcacgggccatacgggtgatggagtccatcagcatgaagacgtgctcaccgcattccacgaggcgcttggcgcgctcaatggcgaaggtggagatgcgcgtgtggttcttcacgtcctggtcattgttgctggcgtagatttcggcacgcggcaggatgcgcttgaactcggtgacttcttcgggccgttcatccacgagcaaaatcatgagatgcgtccccggatgattttccaccaccgcctcagcgatgtgctggaggatggtcgtcttgcccgcacgcggtgccgcgacgatcaagccacgctgaccacgacccacgggcgtcatcatatcaatgacccgcgtcgtgaggcgatccctcgtagtttcaagctggtagcgcttgttcggattcaccgccttgagttcttcaaacagcggcagatcgcgcatggccagcggattgcggccattgacctccgagacttcggtgatctgtgggccacgagcacctttgcactgcacgccgacaatttgcatgccttcacgcaggccgtatttacggatgaactcgggagcaatgaacgcatccagcggatgctgggcaaaggacagctcgcggcggcgcaggaagccgtagcccttgggggacatttcgagaatgccattggcaggctctggcgggccgaggggtttctccggctccggctcgtagttgcggccaccctgggcatgttgctgcggggcgtcacggtcaccgcggtcactgcgttcgccgcgctgctcgtcacggtcacgattgccattggggttgggcgtgtagggggcaccggagcggcgctgcgcatcgcgctcggcacggcgctgcttccagcgctcaaacttagctttgcggcgttccttggccgtcatcgggcgtggctggccgttatcaccgatcacggtgtagcgcggcaggccattcggctccgtgccagcattgccgccgccttccgcatcgtcatcgccgtcagcatcttcattaccctcggcagcagcagcgggtgcgctcggtgctgcgggggcaggtgcattcaccaccggtgccgccacggcttcagccacaggcgcaggaggtgcaatgatttcaacgacaggcgcgggtgcttcagcagcgggtttggctggcgcgggtgccggagcttcgacctcaatcaaattcagttcaggcgcttcaacagcgtctgcttttttcttggccgttttgcgggcgactttggccttcgtcttcgcgggcggcggggcttcttccaccacgatttccaccacgggtttcacgaccggtgccgctttggctttgggagcttttttcgcaggagcaggagccacttcctccacaatcggtgccgctttggctttggcggcgacttttttgaccgctgcttttttggccggggctttgcgcttggttttaggagcttcgagctcggcggtggtatcttcagacataaacaggaaaggggaggggattaatcgagctgatcggcaatggcgtcgtcgatttcaaaattggcgtggacgtggtgtgcatcgtcgtagccgtcgaggatgtcgtagagtcggatcagtgctttggcggtgtccacgtcactgatagtgacggtggtttgcggctggtaaatgagcttttgcgaggtggaagttaggcccttttcgcgcagggcaccgttcacttgaaacagttgatccgtcgcggtgtaaacgatccagtcgtcaccgtcttcctggatgtcttccgcacccgcatccagcgcgacttccatgatctggtcttccgtcgccgcagttttgtcgagacgaatctcgccacgccgcgcaaacatatacgccacgctgccggagtccgcaaaggtgccctggttcttccccagcagcacgcggatgtcattggcactgcggttgcgattgtccgtgacgatttcaatcatcatcgcgaccccgcccggagcgtaggcctcatagaggatttcttcgatctgcgcgccgcccagctcacccgtgccctttttgatggcgcggtcgatgttgtcattcggcatgttcgccgcgcgtgccgccagcacagcgctgcgcagccgggcattcatgtcagggctgccgccgccgtgcttcgcagcgatggtgatttccttcgccagcttgctgaaggcgttgccgcgcttggcgtccgtgatggctttgccgcgcttgattttggaccatttattgtggcctgccataatgaaaaacgatgtcagttggaatgcagcgaacgggtgcggccatgacaatgacggcggccttccgtgcggtgtggtttggggaaatgtagggggggaagcggccttgccgcggtgtgctccagtaggaatgacggcttcgcagcgagtgcggagtcgcgtttcatcagcgccaaggccggggaaacttcggcaatcctgccggggacaacaccaagtgttcaccaagttgagagaacttggaacggcgtgaagtgtgcgggatgccgagccatcatgcaagatgtttttctggcagggcgcgggaaaagtgagaatcagagtgaaacagggaagtgcatgcccaaacaagcaggcaggcatgaatatcactcagccgtaacgatgtagccgaagccttttgcacgatgcaggctcaaactcaccagcgggtaaagcctcgcgacaggaagacctgcgccaacgcgagcgcgaagcgttttggaatgcgccggtcctccggcgctttcgcacgtccataggcgcgcggaaagcaccagagcacctgaactcaacgctgccgcctgcgttagcgcccctccttcccgctcccttttaagccctgaaagggcggcataaggtagccccgggcaagcgagcctgagcgagcgccgcccggggtttccggcaacacgactgggaagcaaacccagcgcaccttcacacgcagcgcccacccgcagcgtctgcaaaaacctccgccgcaccgcccacccccgccatgttccaatttcccaccacccagatgaatcgccgaaacgactcaaaatcaaccactcacagcacccgcccgatttaggcatttctgcccgcttgtgctttaccaatcctcccattaatcttggcgttaatatgagcacgatctgggcattcgacttgggcaaaggcagcattggtgaggccgtttgaaatgggatgcctacttcacattgattatgcaaaacaacatttccaaagaaaccgatccctcatccgtccagcgcatccttgcgcttgatctcggcatcgggtcttacggcatcgcacttcaagagcgcagcggccaaggagaaaacaagcaatacacctttcccatcgtgcgctcatgcaccttaccaggtgattgggcagaattgaaagaggagcggactcggcgcaggatgtggcgcacacgtttggcacacattgagcgtgaaacttggttgcgtcaggtctttgaacgctgcggcttaaaggatgccgtgctgtgggggcggcgtttgaagaaaatcactgtggaggagactggtcccggtggtgtgaaagtgacgaagaagcgttggactctggatgcagacaacccgccagactatcgtcttgagcgtgagttcccgccgcaaccaggaaagaaggcgagagataaagcgccttcggacgagcaaggggcacgcaccatctacagcggtgcagccttgcgctgtctgctgctgcttggagaaaaagcgcaaatagctgcccaggggcacaccctggaaccatggcaaatcttcaaggcactgcactccgccattcaaaagcgcggctatgatgcgaaggtgccttggtcgcgcacgccaacggcgaagcccgccatgagtgatgatgcagcatccaagaggagtcgcaaaggaaagaaggctgaggcggtggaagcggccacagaagctgatagcgaaccggcgctttcagaagctgaagcgaaggagcggaatgaggaaaaaggcagtctcgaacgtgcgctgacgatgagggggattgttgaggggctttcctccgacacccgctttcagcacccgtgtttctgggaggcctatcgaatgggcttatgggataccaaagagccggaagtcatccttgcgcgccagagtcataatgcgcgttcttgcaagtgggcggaccaggaagacccggccaacaagttcaagaacgccaatgagcgcgacccttattcactgctgcctgccatcttcccacggcagatggtggaggcagaactcatcgctttgtgtgaggccgccgcccagcagttacctgccttgtcggtgagcgcttatgagatcgcgtacggtccgacgggtttgccctatccaaacatcccgcgtcgtgaccctgcgcagcaggagatcgaaacgcaaaggcgtgaagcgctcaaggctttgtccccagaactgcgcgagaagttcgtacgcggcaaggcggcggagtggcagggcgcgctctcgcagaaagcgcctacctttgataatcgcggcccggccccctgtgcgctcatcccgcgcttcaatgtcgccaagtgtgagctacgttttgacaaagatgcccttgtgcctgattcggccctagctgccgaagtctccttcctgctccaactcaagaacttccgctttgtgccagaggtgaaggacgacagcaaacccggtggactgcgagattatttcagtccacaagaattgaaacagctccatgcggaccatttcaccgcaacggttctccagcgcatggcttccggcatgaagggcggcgcgatgacaaagaagatgctctgtggctggatgggagagcgcatcggccccaagactacgcccaagcccggacaggatggcaaaggcaaagagatcatcgaaatgcccaaggccacaggtcgtgcgcgcttctcgcgtccggcactgcgtctggtcaaggaactgctgctctccggcttgtcgccagcggagttcaaagctgctttgttagatttgaacaaccatgcttacgatgcactccgccaggcggtgaaactagtgggtgatgatagcagcgagatgaacacgcaggagatgcgcggcatgatcgccacggacctcgatttcctcgacaacatcggagcatcgtgggacaagatcagcatccgcgacgaacggttggaggccatcagcgaactcacgcaggcagagaaggctgctcgtcaggctgccatcacacgcatgatcagcatggagatcaatcccaagatcaggcaccgcctcacgctgctagaccacatcctcgatgagatcaccgccgatggtaggctgccagatcgtgtggtgctggagtttgcgcgtgaagaatggctggggccgaagcgcaagaaagaactggaggactttcagaaggaacgcaaggagcagaacattaccgcgaggatgaagctggggggcgaggtgacacagaaagccgtgctcaagcaccaactgcttaccgagcaaggtggacgttgcctgttctgtggcaagaacttctcgaatcctgaaacgagcagcgtggcacatggcgaactctcgttcgagaatgggcacctttcccacatcgtcgccgattccaaaggcgggcctcgggcctatgtaaatttggtgctcgcttgcgacggctgcaaccgggcacaggataaccgctttcatgcggatgcctttgcacagaaccgctttccgctcggctgggatgctttcgtcggcattgtctccggttgtgcaggcatgcgtcccttcaagaaaaagattctctgcaccaagtccgaggatgaagcggcgcagatggtgcagaacaagactgccctgcaagagacggcatggattgccaaactggcccgtgttctcgtctgcctcaagttcggctggaagcttgatgctgaaggcgaacagcgtcgcatcgtcgtggtgacaggcagcgtgaccaatcgggtggcgacaaagtttggcatctactcactgctcggcgggccggagcgtgtgaagaagttggcagatgcgaaaatggctatcgaagcggcaatgaaaaatgtggaaaaagctagcgaggatgaactcggcaatctttgtgatgacttccccaaagagtggaaaatgaagaagcgtaaaggggctgaccattgggacaaagactttacactttggctcctgcgccgtctccgcattgccaatgaggatgcgatcaatgagaaagaccgcaatgatgaccgccatcatgcgctggatgccatggtgctttccttccttccgcattgggccggaaaccccggtaagagcctctattttggcctgccacccggcaagaactggaaggaagagtttcgccactatctggaaggactctatcctgaagtgctcatctcggcacggcccgaactagagcagtcattctatggcgcgcggcgggtgggcatgacttccgcagcgacgaagcgttatgtgctgcgtgagatcgcttacagtggtattaccccaaaattctccaacagcacgctcagcaaacaggcccggcgaatctttgacaagcacatccaatctgcggtgagtaccttcgcagatcaaaatcccaaggaggcagagtggctggccttttgtgagcgtctggctaaaggcggcctcaaaacaggcgggccgcgcatcacgcacgtacgccgcatcgtgtccgatgaactcaccgagtatgctgacttctccaaggatggcaccggtgcctggcgaaaaggcgacaaaaaccaaggctggttcgtgtgtgagaaaaaagttagggaaggcgaatatgccatcgagccggtttatgttcaccaatcaaaatcgaagctggaacagcgcatccttaaagagggcaaatattcacgagtggtgggcttcttcatccgtgatgaagtggtaacgttggaccatgagatcaccgggatcatggaccctctgccagcaggcagttttgtcattcgcaccatgaagttgaatggccaggtggaattatcgaataatgctgggtatcaatataagcccgttaacatcaagaccttgatgggtgtgggtttcaagaagggagaacagttatcatgagctaccacgtcgtacacatcctgactcacggagctttgctggcgcgtgagcgcggctttctcatctgccgccccccaaaaggtgctaccgatgccgtggaaaagaaactgccgctcgaagatattcgggcagtggtcatcgccgcacgcggggtcaccctgaccagcaatgccatctcaggcattctggagcaggatggactcatcctgcattgcgatgaaagctaccgcccggtaggcgtcacgacaccgctgccacgcatcattgacactcgtgcttacctcaatcaagcccggcagccgcagcgcttaaatgaacggctctggaatcgcctgctgctgggcaagacggccaatcagcaggcggtgctcaaacagcgtgaactgttcagtgcgcacctggatagggccatgaggatcaagcaggtggatgaaggcaactgcgccaagaaatactggcagctctacttccccagcattggttggagcgccacgcggcgggaccgcaagctgaacaccccaccgaaccgcatgctcaattatggctatacggtgctggcggcactgtgccaccgctccttgatcatgcatggcctaagtccgctgcttggcgtggggcatgtggcgcgctacaaggccgatccactggtttatgatttgatggagccctaccgcccctttgtggattgcatgctggcggacttcatgcagaacgagccggagatcaccgagtcggcctggtgcaaaaagatcgggcgcgagttgcgggagcgccgagtggagaaggaaccattttctctcaagctgctggatgccatcgacaagagtgccgccacgctgaccgattgttacagccatctcagtcctgacccactgtgggtgcctgcattgaattgaaaacaaaccggagggccacgcatgcccaaagaaaaactttctccttaccgcatgggctggatgctcgtcatgttcgacctgccagtgcttaccaaagcacagcgcagaactgcgaccgagtttcgcaatgctctgctggaggatggttttttcatggtgcagttcagcgtctatacgcgtgcctgcccagatgtggaccgcatggagaaacacgcccaacgcctacagaaaatagtgccggaagctggcaatgtgcgtgtgctatttctgaccgatgcacaatggacacgcggactctgcctcggtggtgggaactatgaacgcaaccacccgccagatcgcattgagatgccccagcagattgagttttggtaggaaataaaactccccgcgctccggtgctaggcagtgacggaggcggggagttatcagttaagtctttctgatccccggcttgggatggctaaaattaacgctttaatgattggtgatgaagggctttctgtcaatccgagtttagccatcccaagccggggggaaagacaaaaccatgagccgcaaaagaacacgctgtcgcatagtttagccatcccaagccggggggaaagacaaaacggggttgaaagggtaatgattcacaggcaaagtttagccatcccaagccggggggaaagacaaaacctatgccggtagaggatgcgcaggtaatcaagtttagccatcccaagccggggggaaagacaaaacctccggtagtaggttgtatcctgcccattaagtttagccatcccaagccggggggaaagacaaaacagtgtgttcgttgttcacgctcgttcgttgagtttagccatcccaagccggggggaaagacaaaactctaaccctcaaaggctactcctcaaactcagtttagccatcccaagccggggggaaagacaaaactccattagcgcgtcgggtgtcgggctgtgaagtttagccatcccaagccggggggaaagacaaaacgccggaggcacgggcaccaacttgcatgacagtttagccatcccaagccggggggaaagacaaaacacagtcaatcttgtcgcgcgcgcggctaccagtttagccatcccaagccggggggaaagacaaaactcacccctgaaaacatgacgcgtgcatgagagtttagccatcccaagccggggggaaagacaaaactacccgcaggaaaccgccgagtacttggcaagtttagccatcccaagccggggggaaagacaaaacagaagcaggaagaagaagatgccgaaagggagtttagccatcccaagccggggggaaagacaaaaccgaactgcctggatcgtgggccggtgaatgagtttagccatcccaagccggggggaaagacaaaactctagcgagtctgcacgtttggtctggttgagtttagccatcccaagccggggggaaagacaaaaccaaccagcgagcgggatgcgcgtggtgccaagtttagccatcccaagccggggggaaagacaaaaccaaccagcgagcgggatgcgcgtggtgccaagtttagccatcccaagccggggggaaagacaaaacgagggtcacattcatacctgcgtgctcctcagtttagccatcccaagccggggggaaagacaaaaccgtgtcgccaagtgcccgccgtttgcacaaagtttagccatcccaagccggggggaaagacaaaacatcgcagggaatggcaactatcagatcgggagtttagccatcccaagccggggggaaagacaaaactaaaagccctgccagcgtcaaagccgttgcagtttagccatcccaagccggggggaaagacaaaacgaggctgagaaagcgaaggtgaaagctgagagtttagccatcccaagccggggggaaagacaaaacctcctctttcgcgagcttagcggattcagcagtttagccatcccaagccggggggaaagacaaaacttccaagccccgaatggctcagatggcactagtttagccatcccaagccggggggaaagacaaaaccagttcaccagtctctgacacttcaggcaaagtttagccatcccaagccggggggaaagacaaaacttatttggaattatgaaccacgatatacttagtttagccatcccaagccggggggaaagacaaaactcaaagagcaggagcgccaggccatccacaagtttagccatcccaagccggggggaagataaataccgttggttagcctgttgtctttattcccaatatggcttttacagactcacctcaccttcttcttcaaactcttcccctgcaccttctcactggcagcggacttctcggcgggcgactcatcaaacttcagcaccttgggcggggtgggggtggggccttgccagaggaagtgctccaggcggatcttggtcgcacgttcacgggcttcgacggcacggtcgccatggcgttgggcgatctgttcggcgaggcgcgcggcggcttcccactggcgcgcggcttccagcagatccactccgaagaagcccgcctttgaaaaccacacgtaatctgccggactcgtgggcggcgtcatgtcggccgcacgcagcacgttgtagcaggcttccagcgcctcggtgtcatgcttcgcatcatggtgaatggaggcgagcgtgaagccagcgcgggccttccacatgaagggcagggcagggtcggcgaggaaggcatccagcagatcggcggcagcatccagtcgtgccggttcggtcttgccaagcagcagcagcagctcggctttttcacagaccgtcaccagtcgctgctcaggatcgagcgctttcatctccagcactttgtccagcgcggcgagtgccgccgcgtggttcccctgcagccgttcggacagggcctgctggcggcgcgcgggcacggccagcggaccgttcttttgcgcgagctcctccaagatggcgctcgcacgcttatgcccctcttcactcatcaccgaggtggcggacatggcggcaaagtagagcgcggtgtccgcctgcggggtgtcggggtaatcgcgcgcgatgatttcgaattcggtgcgtgcgttggcaaaatcctccagccggtagtacgcactggcgattttcatgcgcacttcgggcaccagcgtgctggtcggccagaccttgaggaattcggcccctgctgtgacgagggacttcaattctccagccgcatccagcagccagagccgggtgtagtggatgcgctgcgcttgcgccggagtgggggtcgccgctgccgtggtggcgttgtcgagcgccgtgcgtgcttcctgaatgcgctgcggcacggcgaggagcagccactcagtcagcgcgatgcaggcatctgcgtagcgcggatttttgggataggcgcgaatgaaggcacgcagcgctggctccgcctcgggtttccgccctgccgccagggccagagctttttccagttccagtgtggccgccgagtcttcgctttctttgcccacggcggcggcattggacacgatctcaagctgcccgagcaggctctggtataacgtgaaatcactcgccgagatggctgccacagcggcgttgaacagcgcccgacggcgctccgtgagtgtggtggccacgttggcggcgttttgaaatagctccagcgcttcccttggcttgccacgccgatattcgatgccgcctaccgtgaaatcgaccgcgactgcggctgcgctaaaccgctggcgccatgcatctgccagttccagtacgcgctcgtcgctgtggcgcgctgcatagagttccatcgccagacgcatggcttcattgcagcgtgggtgttcgggctgcagttgaatcaatgcttccagcatgctgacggcctcatcatcacgcttctgcgcgaccagccattgcgccgtaaggaagatggcgtaaccgcgaaaatcggtggtggctgcggcgagcacgggcggcgggtcaggctgctgctgggccgtgttaccagaggagatccagcgcagcaccacttccggcagagtgccgggtgccggcagggattgatgcacgcggttgagcagatcaaaggcatccagccatagccgactgtctgcggtcgtatcgagaaacttgaccagatgctcctgcgcctccgccgcgtggcgttgccgcagcagcgcctccgcctccagcaggctggcggcttggtgcatgcgttcgcctccactcgtggagcgcagcacggactggaggatttcctgggcaggcgcgatctgcccgctttgcagcagcgcgcgcgcacgcaggaagcgggtggcagcatcgctagcggtggtggaaaggccgctggcaggtttgccttcgttaatgtcgatctcgctgtgcagcagtcgcgcatggctttgcagcgccggatcgctggccgtcagcagcggcgagacggcggcgcgtgcctcggcgttttcacccagtgccgccaggatctgcgccagcagcagttgcgtgcgcggctgcggggttgcggcagtatcctccgctaaaaccttgcgcgcggcggtcaggttccccgtgagggcgagcgcctgaccacgccagaaggattcatcatcgaggtcgtaagtgtccgccagggtcaagacccgcacaccctgctcatcacgcgtccaagcctcagcggcaaaggtggcgagctggcgtgtttccacccgcgtccagcctttgcgcttgagcagacgctccgccttcacccctgcgacgccgggcagtccatccgccagtgcctgccgcgccgagatataatcgggcgctgcttccagccctgccgcgcagagtgcggcaggaaacgcgaggatggcggcggtgagaaagaggctccgaggcgtgggcatgctggcagagcctatcgcagcattcgccgcacggcaaagaagaatgcagctcagaactgatccagcagatacttgaggaggtccgtcgtggtcacgatgccgaccagcttgctgccggaaacaatgggcagggcgtggaagctgctgcccgccaggatttcagccgcttcacgcacggtgcccgtttcagccagcgtgacggggttcttctgcatcacctgctccagactcagggtgtggtccagcgtggcatccacggtgcgttcatccgtgtgaaaagcatcgccaaaactcacacgcagaatgtcgctccaggagatgatgccaatgagctggtcgccattcacgaccgggatgtgatgcacaccgtgctcgcggaccagggcacggactttggaaatggcgtcgccgtggtgcgcggtgatcacgctgcgggacatgaggtgggatatggggtcgttgcgtttcatggtaggtcatgaaacatgcagccagcagcagcgtgctgctccgcgccctttgggcatgcgtgaccaaatgttgcgcggtggctcactgcatctccaccaccaccgcgctcgcattgtcccggccggattccgccacagcgtattccacgatagtcttggcttcgtctttggccagcatatccgccagccgatggtcccagatgccgtcgatgaccccatccgtgcagaacaggaagcgatcaccgctttcatactgcaccgagccgatctgcgggtcgagatgctgactgcctgcgccgagcacctgcatgagcacgcttttgcgcgggtgcgtgcgcgcctggcgctcgttgacctcccccttgcggcgcaaatagccgacgtacgagtggtcttcagtaatctgcttcatcgtgccatccttgggcagccagtagatgcggctgtctcccacatgcgcgaagtgcatgcagccgggcgtgaaccagcctaggctgagcgtggcccccatgccacggcactcctcgtagtggcgtcccaggtgcagcagatcctgctgaatcgcatgaaacagctcgatcaacacatcgccatgtccggcggtgaggtgctgggcggactgcttgaagctcttgggcagcagccgggtgattttctctgccgcgatcttgctggcaaactcacccgatttggccccgcccatgccatcgctcaccgcaaagacgaagtccccggtgtcgagattcgactcgccgattttacccaggtagcgcacctcacgggcgtcgaaattgagcgccagaaaggtgtcttcgttgttcttacgcacgcgtccgggatgggtcatgccggaccagcgcaggtggttggtaggttgggtcgggtgggtctcactcatgtggcaggcttcggcggctcgtcgaggatggttgcgagctcgaaatcaatcaggcagaacctgccgtcagtgccgcggtaggtgatgttgcgcgcaaaggcgtcatcatggcggacgccgtagtcacgctccagatcgccaaagagctccttgatgcgggcctcactgatgtgagtgacgatggagccgcagttggaggtgacgattttaagctctgcggggtcagagtcgaggaggcgggggacgtagttacagccgcgttcttccagcagcttgagcacgcgcacttcgttttcgaagcggccctgggcattgtgacctttgaactgcttgtacaccttgccgtcatagccgatatgcacgatggcgcgggcggtgtttttggcttctttcatggtgttttttgcggtggcaccttcctgcttttggctgtgatgcgcaaggcgcgactgagctgggcaggagggcaataaacgagcggggagacttggtgaagattgcttaaccttacggacgtcttgagtccttgagtgggagtaaataaatcaaaaaacatctcgcgtgtggcatagaacatgctcacttcatcctcgctgccgctggaggaaaggtttccgaaagccttaggcaagactcaatccacacattcaaccatggccaaatacaaactcgaatacctctggctggacggttatcagcccgtccgcaaccttcgtggcaaaactcaaatcaaggagttcgccagtttccccaagcttgaagagcttccagattggggctttgacggctcctcgacacgtcaggctcctggtggcagttccgactgcgtactgaagcctgtggccgtgtacccggacagcactcgcaagaatggcgtcgtcgtcatgtgcgaagtttataaggccgacggcacagcgcatgagtccaatgatcgtgccacgatccttgacgatccagacacatggttcggttatgagcaggagtacttcctgtatcaggacggccgcccgcttggcttccctgagaacggctttcctgctccccagggcccttactacacgggtgtcggctacaaaaacgtcggcgacatcgcccgtcagatcgtcgaagagcatctcgacatctgtcttgacgcaggcatcaaccacgaaggcatcaacgccgaagtggccaaaggccagtgggaattccagatcttcggtaaaggctccaagaaggccgctgacgaaatgtgggtggctcgttacttccttaaccgtctgtgtgaaaagtattgcttggacgtcgagtaccattgcaaacccctcggtgacaccgactggaacggctccggcatgcactgcaacttctccacgaagtacatgcgtgaaaccggcggcgaagcctacttcctcgccctcatggcccagttcgagaagaactgcgctgagcacatcgccgtctatggccctgacaatcatctgcgcctgaccggcctgcatgagacccagtccatcgaccagttctcctggggcattgctgaccgtggcgcgtccatccgcgtcccgcacagcttcaagaaaaacggttggaagggctacctcgaagaccgtcgtccgaacagccaaggagacccctacgcgatctccagccgcgtgctcaagaccatcggcgaagtgccgaagccttgatctgctgcagaaagaaatctatccacgaagcgccgcctggaaacaggcggcgtttttttgtgccctcatattttttcctcctcctacctcgggcttcgaagcttcagcgaagaaggctcctcttcccgggaggttcggggcggtgtctttgcaaatcaaaggagttccatgccgccgagggaaaaacgttctattcaccgcatcaaggacggcgctgctttttgagcacctgcgacgcgacagacccgaaatcacggacgcgttgtgcgcgtccctggaatccttcgtcccagcgcaggctgttgtcccgttcactcaccctcctttcaaaacgccctccctcaccaccaccccccgcgcctttcctccagagtgccgtcttctatttgggaagacaccgcctggaatcgcggcctgaagggccgccggactcagcccagggcgcagcgcagcaagccctgggtatgcatgacggctcccttctcaccgaaggtcgcggcctgaaggggcgcgggagatcgttcgatgatcccagtcacgctgcccatcaggctcagtctcatcgcatgagaaaatcctttccaatcgtggacacctcttttccataaggattgcggcaggggcggcgattgagtaagaggcggataaaactcgtttcacttttgacttctcgcgctacgtcaggcgtatcccaccacccatgcccaccgaacaagacatccgcaccgcccttggcaacgtccgctacccaggctttagccgcgacatcatctcgtttggcctcgtcaaaggcatccagatcgaaggcaagaatgtcaccatcgacatctccgtcgccacgcgtgatccaaatatcccgcgcctcatccatgagcaggccatggacgtgctcaataaggtcgctggcatcggcgaggtgaagctcaatttcgacatcaaagacccgcccggagcaggcgtgaccgcctctgaaaagctcggcaaatccagcatccccggcgtcaaaaaagtcatcgccgtggcctccggcaaaggcggcgtgggcaaaagcaccgtcgcctccaatctcgccatcgcgctcagccaaagcggcctgcgcgtgggcctgtgtgactgcgatttgtacggcccca

SEQ ID NO: 3597 - DNA, 16629 bp, synthetic construct
  source 1..16629: mol_type = other DNA
  misc_feature 1..16629: note = Synthetic
cccgcgacccccggcgtgacaggccggtattctaaccaactgaactaccactcctaaatggtgggcggtactggactcgaaccagtgacccctgccgtgtgaaggcagtgctctaccaactgagactaaccgcccatcgctgcgttgctgtttgcgttgcagcgaagaggtgcgcatttaaccataggcccctgaggtgtgcaagcgtttttttgcaaaaatgtgcattttttcttgccggaccatgtcggatggcgggcaaattgccttgaatattttttgaaaacagcatgttgtttgataaatcggcaattgggcgtgcctgctgtgcatgcgtgcgcacctgcctgcgggcgataatcgccgtgtttgccgcattcgcatgccagcctgccgcgatggtcttatgcgtaaatacacaaaccaatcaccatctgccctggatcaaggcagtgcccggtatgcaggcgcttttgcgccatttcgccacaatccgaacaaccgtttcatggcaaacgccaaaggcctcctgtatgattgcccgattctgaaatcgaccgatgtcacgcatgaaaaccacttttctcgatttcgagcagcccattgccgaactggaaagcaagatcgaagagctgcgctttgtccaggatgattcggtgctggacatctcggaagagatcagccgtctgcaaaagaaaagccaggagctgaccaaggcggtgtacgccaagctcaccccgtggcagatctcccaggtggcgcgccacccgcagcgcccgtacacgctggactacatcaaaagcatctttaccgactttcacgagctgcacggcgaccgcgcctatgccgacgatccggccattgtgggcggcctggcccgcttcaatggccagtcggtgatggtgatcggccaccagaagggccgcgacaccaaagaaaagatctaccgtaactttggcatgccgcgcccggaaggctatcgcaaggccttgcggctgatgaaaaccgcagaaaaattcaatctgcccatcatcacctttattgacacccccggcgcctaccctggcatcggcgcagaagaacgcggtcagtccgaagccattggccgcaatctgtatgaaatgacccgcctgcgcgtgcccatcatctgcacggtgatcggcgagggcggctctggcggcgcgctggcaattgccgtgggcgatcagctgaacatgctgcaatactccacgtattcggtgatttcgccggaaggctgcgcctccatcctgtggaagagcgccgaaaaagcccccgaggccgccgaaaccctgggcatcaccgccagccgactgaaaaccctgggcctgatcgacaaagtcatcaacgagcccttgggcggcgcccaacgcgaccatgcggcgatgatgcaatccatgaagcgcgcgctggccgaagcgctgcgcgatctgcaggacgccccggtggatgaactgctcaaacaacgctttgaccgcttgatgaactatggccgattcaaggacgacgctgaggcttgattgggtggactatctggaaagcgccttgcacgaggcgtttccagaggcgcgccatatcgaagtggcgctcagcggtggggtggattccgtctgcctcacttatctgctggccgacctggccaaacggcggggctttcgcctgtctgccgtgcatgtcaatcatcagatcgatctgcgcgccggcgactggcaggaattctgccaatggttgtgcgcctcgctgaacattcccttgcgcaccgccaaggtggaggtcaactggggcggcggcgacagcctggaggccgaagcccgtcaggcgcgctacgccatttttgcccagagccaggccgatgtgctggcgctggcgcaccacgccgacgatcaggcggaaaccatcctgctgcaactgctgcgcggcgccggcccgcacggcctggccgccatgccggtgacgcgcgcgctgaccgagcacacccagttatggcggccgctgctgaacgccacccgcgaccaactggaagcgctggccacggtggaagactggatctggatcgaagacgacagcaacgacgacacccgcttgcggcgcaattttttgcgccacgacatcctgccgcgcctggcgcaaggctacccggactaccgcgagcagctattgcgcagcgtgcgccgtgccgccgatgccgccgcgctgctggacgaactggcggcgtccgacctggaactgatggtcggcgccgacagctcgctggacctggacatgctcgcccatgtgtcgctgccgcgcgcacgcaatgcgctgtttgcctgggtggaagagcgcggcggcgtgctcaccccggatgggctggacgaagcgctggtgcagcttctggacgcagcgcccgacgccaacccgatgatcgacgttggcgcctggcggcttacccgctatcgccagcgcgcctatctgattcgtccgtttaccactcccaccgcgccgattgcttttgaattttcgcccgagcaactcaccctggacttccccgactggggcggccggctgcgctttaatccgattgccaatggcggcctgcgccaggtggcgctgaccggcggcctgaccctgcgcccgcgccagggcggcgagagcctgccgcaaaacggcgtgaacaaaaccctgaaaaacctgctgcaagaagccggcatgccgccttaccggcgcgagcgcctgccgctgatctatcagaacgacaccctgctggccgcgcccggcgctggcatcaacaccgagctgctggccgctgaaccggacgtcggctatgtgccggtgtggctgccttacgacggctattgacctggcccggcagcacggcgtcaggccggcgtcaaaaacgccacgaaggtttgctgcaagggcgacaggctgacaaagtcgcgcgcgcacagctttaactcgcgctcggcccagcgatcacgaaactcgacaatggtcaccggctggccggcgctgcgatagcgcagcgcggccgcttctggcaacacccccaaacccgcccccgccgccaccaatcggtatagcgcctcgaaactgggcacgcgcaggcgcacttgcagcttgccgccgtgcagcagcgcggcgcgctcgataaattgctgcataccgctgtccgggcgcaaggcgacaaacggatgatccagcgcttcggcaaacgacacctgctggcgcgccgccagcggatggccggcgtgcgccaccagcaccagcttgtcgcggctgaacggcagcagcgccagccgctcggcgccggtgttgccgtcgataatgcccagatcgtgctcgccgtcgcggatggcctgaatcgccgccgcgctttgccgttcgtcgatttccacgtccacctgcgggtgcagcgccaaaaagcgcccgagcacatcgggcaaaaactccgccgtggtcaccgtggtggcggccaggcgcaacacatggcggccttgctgcgccgggtgggtcagctcgcgctgcatgcggtcggccccgcgcagcaacagccgggcgtgttcgacgcagcgctcgccatcggcagtcagccgcacgccgtcgcgctcgcgctcgaacaaactcacgccaaacagggtttccagcttgcggatgcgctggctggccgccgacagggcaatcggcaggcgcgcggcgccggcagtgaggttgccggcttcggccacatgcaccaacaggcgcagatcgacaaaatcaaatcgcattgcagagatccagacagccatgggttcgccatcatcggggaaatttgccgacatggcgagcccgcgtttggcgggcctggcatcccggctgacgccgtgaataacccctttcgtcacatgcttactgagcccgcgcagccacctcgccatactgtcagcatgaccccccctgatagcgaggctcctgatgttcaaatccctgtggctttgtgcctgttgtgcgctatggctgagcgccatgccggcacatgccgtcaccgaagcgcaattcatgccggctttgcatgtatttctccaggctagcgatggcgacgatgccgccatcgagccggccgccgaggcatttgctgcattgtcccaagccgaacctggcaatgcggtattgctggcctaccgtggcgcggccacggccatgctggccaaaaccatgtggatgccctggaaaaaaatgcgtcaggccgaggatggcctggccatgctggataaatcactggcgatgttggcaacgggccagccagggctcagcccgagcggcgcggccaccacgctggaagttcagtatgtggcggcgcgcacctttctggcggtgcccacggtgatgcaccgccacgagcagggcatgcggctgctggcgcaagtgcaggcccatccgcaactggccgccgcgccgacgattttgcgcgagcgcgtgcggcaaaccgccaaacaatatggggtgggcttatgagcgcggtcttgatgtcgccacagaatgggccagtattgcgcctggccggtgtgcataaacactaccaactgggcgcgcaccgcatcgacgccttgcgcggcgtggacctggacgtgcaggccggcgagctgttggcgctgaccggcccgtccggcagcggcaaaagcacgctgttgaacctgtgcgggttgatcgacaccccggacgcgggcgacatcgagctcaacggccagcccgtcaatgcgctggatgaaaccgcgcgcaccctgctgcgccgcgatgcgctgggctttgtgtttcagaacttcaatctgattccggtgatgaccgtggccgagaacgtcgattacccgctgtttctggccgatgtgccgccggccgagcgccgcgcgcgggtggcggcgcaactggcggccgtgggcctggccgaacacgcccaccaccgcccggatgcgctcagcggcggccaacgccagcgggtggcgattgcccgcgcgctgatcaagcgccccagcctggtgattgccgacgaacccaccgccagcctggattcgcacaccgccgagcaagtgctggcgctgatgcgcgaacgcggccgcgccgaaggcgccgcctttgtcatcgccacccacgacaaccggctgaccgcccgctgtgatcgggtggtgaatttactggacgggagaatccaatgcgcgccttgctgacctggttgaaatttgcctggcacaacaccctgcgcaaccgccgccgctcgctggtgacggtgtcgattgtggcgctgggcgcggccggcatgctgctggcgggcggctttgccctgtatacctacgaaagcctggccgaagcctcggcccgcgacagcggccatctggtgctgggcacgcccgcgcagtttgaccgcgacgaagacgtgccgctgcaacacggcttaagcggggtgcaaaaactgcgcgccacgctattggccgacccggcggtgcgccatgtgctgccgcgcgtggcgtttaccggcttgatcagcaatggcgacaaatccacggtgatgctggccgccggggtggacccggacggcgaattcaccgtcaaggggccgtttttgaccgtcaccgccggcaaaaccctggccgccgacgccgcccagccgcaagtgatgctgggcgccgacctggcgcgcaacctgaaagcccgccccggcgacagcctcaccctgctggccagcaccaccgaaggcgccatgaacgcggtggacgtcgtcgtcgccgggctgttcaccactggcgtgccggaggtggacaagcgcatggtgtacaccagcatcgccaccgcccagcagctgctggtgaccgacaaagtctccaccctgggcgtgtttctcgaccgcatggaagccaccgagcccgcgcgccagcgcctggccgcgcaactgccgcaactggcggtgcaaacctgggaagaacaagccgcgttctaccgggcggtgcgcaatctgtataaccgcatctttggcgcgctgggcctgatcatcgcggtgattgtggtgtccgtggtggccaacgccatggccatggccatcatcgagcgcacccgcgaaatcggcgccctgcgcgcgctgggcaccctgcccggccaactgctgtgcacactgggcctggaaggcgccttgctgggcggcgccggcgccctgctgggcgcggcgctggcgctggccatcagcgcgctgttgcatgtgtttccgatggacatgccgcccccgcctggccgcagcgtcggctacccgctgttggtgaccgtggacgccagcatgtacgccgtggtgatgagcctgatgctgctgctgaccttgaccgcctcgctgctggtggcgcgcaaaaccgtgcgcctgccggtggtggatgcgctggcgcatacctgatgaccttatctctctctttaccaaggcccgccatgaaacacgctgcctgcctgctggcgctctgcgccatcgcccccgcctggggacaagacctcgacaccctgctgcgcgacgccgaccgctaccgcatgagcgccgacaacctgcaagtggaaaccctggtgcaaacctacagcgccagcggcgagctggacaaagaacgccgctacaccgtgtttgcccaggccggccgccaatcgctggtgctgatgcaaagcccggccgaacaaggccaaaaagtgctgatgctgggcgatgacttttggctgctgatgcccaacagccagcgcccgctgcgcatcacgccgatgcaaaaactgctgggcgacgcctctaccggcgacatcgccacactgagctggagcggcgactaccgcgccgaactggtgggcgaagaaccctgccagcccaatgagcaagcccgccaatgcctgcacctgagcctgcacgccacacgcaagggggtgacctactcgcgcatcgagctgtggctgggcaaaacccgccacgaaccggtgcgcgctgatctgtatgtgcaatccgacaaactggccaagcaggcgcgctttaccctggacaaggcgcgcagcactgtcaccgacatgatcctgaccgaccagctgaacaaacaaaaagaaacccgagtgagctaccaaagccgcaagccgcgcagcattcccgacacctggctgaacccgatgttcctggtgcgcaaccccagcctggactaagcccgatgacctgcttacccccgctgtggcgccgcgccgcctgtgcgctggccgcgctgctggccgccgcgcccagccaggccgatgaccccgcctggcatggcgtgctgcgcacctattggcaaggcggccgcgccgccaatgccggcccgctggccgccgccgacgccgccggcctggccatcagcccgcccagcacgctcaacagcgaagcccagctgcaaggcgcgctgacgctgggcggcgcgcaactgcgggtggaggcgctggcgcgccagcgacggcgcagcggcgagggcgagcaaggccgcatgcaattcaacgaagcccaactcagcggcggcagcggcccctggcaatggaccgtgggcaaaaaagtgctcagctgggatgtcggccagggctttcgccccaacgacctggtgcaacaagaaacccggcgcagcctgctgaatctgccgctggaagggcgcagcatgctgctgggtgaatatttcagcgccgagcgcgcctggtcgctggcggcggtcaaccccaccgcccggcgcagcgccacgggcggcagcgagccggcgctggcggcgcgggtgtaccagcgcgacggcgacgccgactggcacggctttgcccgcctgggcgcccacactggcgccagcgtgggcgcggccgccgcctgggtggtgaacgaatcgctggaactgcacgcctcggcgcgctacctgcgccaccacgacaccctgcgccacagcgccgacagcccaccattgagcgccagcaacccctggctgaaccagcggcaaggcagcgcccggcaatggctgatcggcggcagctggaccaccgccgagcaaatcagcctgctgctggaagcctggcgcgacgacaccgcgccgtccgccgccgactggcgcggctgggccgcgcgcaatgccgagctgagccgctacgccgctgccggcgcgccggccatggcggtggccggcaaccaagcctggcaagcgcagatgttccccacctcgggcaatctgcgccgcgacagcctgtttgcccggctgagctggacgcacgacggctggcaacccacgctggacgcgctgtatcacccgcaggacggcgggctgatgctcaccgccgcactcagctggcaaggcgaccgcctgaaactggaagccggcctgcgccgccacgccggccccgccagcgcgctgatccggcaactgccgcaacgcagccaggcgtatgcttggctggagtgggcgtattgaagaatgcgggacgtgctgaagcctctcgacactcaccgtttatcgatacacttcccgacgattgccaatccgcaccacaaggatatgcaaagccccgtcctcaatattggcaatcacccggtaatcccctacccgatatttccagaacgcgccaagccgtgaacctttaagcgcttcgccaatgcttcgcgggtcatccagtgtcgccacgcgttcatgcaagaacatcagaatccggcgcacatgttgagggtcaatcttgcctagctcgcgctcggcggcgggagccagctcaaccctccatgccatagcgtttcatcacttcctcaagcggcacagcctgatcgcgcccggcgcggatatcagccatgcgctgctctgccaggtataaatcctcaaggtcatccaggtgctcctggatggcttccaccatgtaagaattcttggtgcgtccggtcatggtggccagtttatccaggcgttgcacgacctcatcaggcaatcgcagcgatacggaagccatgattttctccaagcgaaaggggctgatgtacaagtatcacatacggagaagagaagcacgaatgtatggctgccatgcgtgtggctgagttgatgacggggaaattgtcacctccatccaccataatgcaggccaggatcgctgtacctgagtgtggtaagcggcttgaagatacgctaagagccgctaacaaaaccctcttggcgtcgttacccgaccttgccgtacttcttcgcctagccaggcgcgctgcgctgggttttgtgagctgctctaaatgtgaaaacggcctcgctgggaggccgggggcgccacaaagggctatcctgcgagaaattcatctcttgtgatgaagcctctcaggcatcagtcagttacactctgatgaactgatgctaatgccaatggcacggcatgtcaatatactatcggctgatcccatgttctggagctcagcatgtccgtcaccccctccgccgatccgcacttggtgtttggctttgaccttggcagcaattccatcggctgggccgtgctggaagaaaacccggccggccaggcgcaagccctgcgtgatatgggcgtgcgcatcttccccaaggccgttgaagaaaaaacccctacccccaaaaaccacaaacgccgacaaatgcggctggcccgacgggtgctggagcggcgcgcgcggcggcggcggcgtttgcaaaattatttgatcttgctggggctgctgcccgatagcgtacacgatgtgcgcgagcgcgaacgggtgctcaacacactgggcgacccctacgccctgcgtgcgcaagcgctggaccaggcgctaagcgcccaccaattagggcgggtgattgcccacctgggcatgcgccgggggtttcagtccaaccgcaaaaccctgctgtccgacatgctggacgaccccgacgtgcaagacatgctggccgagctggaacaagaagacccacaaggccacgccgccagcgagcgcgaacgcatcaaagaagaagggcagttcaagcaagcgattagcgccttgcaagcagacatccaccaagccggctgccgcaccttgggccaatacctggccagcttgcccagcgcgcagcgcaaacgcggccggcgcattggccgcgacatgatccgcgatgagctgcgcgccattctggccgcccagcgtccgcaccatgccgggctggatgacgccgtatgcgaagaaatcgagcggattatttttcatcagcgtccgctgcgctgggatcgcgccagcattggcgcctgctcgctggaaaaacaccgccagcgcgccgccatggcccggctggaataccaagaattccgtttgttgcaagacatcaatcacctgcgctacgaccgcccatgcagccacccggacacgggcgaaattttgggcctgaacctggcgctgaccgagcaagaccgcacccgcctgctggacaaactggccagccagcaagacatgagctggtcagccgtcaaaaaactgctgggcctggataaaaccatcaccctcaatctggaagccggcagcaaaaaaggcctgcccggcaaccgcaccgccagcaaactggccaatactctgggtgctgacgcctggcgcgcgctgggcgccagcgggcaagccgagctggtggaagacctgctgaaattcgagaaaaaatccgcgcttaaaaaacgcctgatgactcactgggccttgccggcgcgcaccgccattgccttggccaccctggagctggagcccggccacgccaatttgtcgctcaaagccatccgccgcctgctgccgtttatgcgccagggcatgcgctacgaccaagcgcgcgaagccgccggctatggctatagccgcacgcccagcgacggcctggagcgcctgccgcgcccggatgacctgcgcaacccggtggtgaatcgcgcgctgcatgagtttcgccgggtgtgcaatgccctgctggccgaatatggccgcccgcacgccatccgcatcgaactgccgcgcgaactggccatgggcggcaagcgcaaggcggaatacgaaaaacaacaaaagcgcaaccaaaaagccaacgaagacgccaacacgcaataccaaaccatccgccaggccaatccgcaactggggctggccgagcgcgtgggccggctggagcagctgaaataccgcctgtggcgcgaccaaaacgaacgctgcctgtattcagacaaacccatcagcatgaccgagttgttttctgccgaagtcgaagtggatcacatcctgccgtattcgcgcacggtggacgactcgtatatgaacaaagccctggtgatggccagcgaaaaccgcttcaagggcaaccgcacgccttacgaggcatacagcggccagcctgaacgctgggaacgcatggtgcaatgcgcccgccagcaaccccccgccaagcgcgaacgcctgctgcggcaagaattatcaggggtggatgactttatcaataaccaactgaccgacaccgcctacctcagccggcaagtgttggcctatgtgcaactgctgggcagcgcggtggatgtgtcggtcagcaagggcgtgctcaccgcctggctgcgtcggcgctgggggctgaacccgctgttgggcgggggagaaaaaaaccgcgccgaccaccgccaccacgccgtagacgccgccgtgattgcctgcgttaaccgcagcctgtatcaaaaactggtcaagctgatgcgcgaacccggcgcccggctggagcgcattgcgctggatgccccatttgcccactaccgcgacagcctggccgcccacctggaccgcctgtgcgtcagccatgcgccgctgcgcaaactcagcggcgcactgcatgaagaaaccgtctatgccgtacagcgcggcccgcaaggcgagccgcgcgtggtgtatcgcaaaccattggacgccagcctgaagctggacaaactggtggatgacggcctgcgccgccagctgcaagaccacctggcgcgctttaacaatcacgccaagcaagcctttgccccagaaaacctgcccgtgctgcaccctggccacgggccggtgcgccgcgtgcgcgtggtggcggccaacagctttaacccgcgcagctttttaagcctgccagaccgccagggccaattgcgcaaacacttgccctttggcagcaatcaccatgtggaaatcctgcgcgaccgcgccagcggcaaggtggaaagcgtatttgtcaccatgtgggaagccgcccagcgcgcccatcaacaccagcaagcgctggtgcaaaccaagcacggcgccgacaaagtgttcctgatggcgctgcacatcaatgatctggtgctgattcagcaaggtgaacggcaagtgatttatcgggtgcaaaatctggatcctggcggaaagcgcttgatgctgcgtcatcattgcgccgccacactggataataagcaagaggagctgttgatcagcttatctcgcttggtcgatgagtgcgctggcaaacccttgtatctcaacgtgctgggcaagcccttgccatgatcaagcgcattatcgagctcacccatggcagctatgtgcatctgcatcatcatcaactggtgattgagcaagatggccagtgtgtggccagcgcgccggccgaagatgtcggcctgctattgctggcccacccggccaatgtcatcacccaacaggcgctggcctgctgccagcaatatggcgtcgccattgccgtgtgcgacgaacaccacctgcccagcgcgctgatgctgccgctggatggccacagcctgcacgccgaaattctgcgccagcaagtggcggccagccccgccgcccaggcggcgctgtggcaagcggtgatacgcggcaaaatcagcgcccaggccgaggtgctggcaaagctgggccggccaggcgaggcgcatctgcgccgactggccgagcatgtgcgccccggcgaccccgacaatctggaggcgcaagctgccgccgcatactggcgcagcctgttgccagagggcgagcaccgccagcctggccgccacaccggggtgaacgccttgctggactacggctacgccatcctgcgcgcagccgtggcccgcgcggtggtggcggccggcctgcaccctgcctgggggatttttcatcacaaccgccaggataatttcgccctggccgacgacctgatggagccactgcgcccggcagtagactggctggcctgccgccacatccgcgaccccagccaagggctgagccccggcgacaaacgcgcgctgctggccatgctggccgcccaggtgcagctgggcgatgtgcgcctgccgctgtgggtggcgctggggcgctatattgcccaggccaaacaagcctggtttggcgaaaacctgacggtggagataccgaaatggctgtttttggaggataccgaaccatgtggctgatcatcatgtttgacctgcccaccaccgatagtgaggcgcgcgccgactatcggcattttcatgattttttgctgaacgaaggttatctgcgcctgcaactctcggtgtacggccgccactgcgccagcgaagaaaacggcgcggtgcacatgcaaaggctgcgcgccgccctgccgccagacggtgaagtgcgcgtgttgacgctcaccgacaagcagttttcccgcatgcaggtgttttttggccgcatgcgccagcgcaccgagccgccgccagagcaaatactgctgttgtaaatcaggtaagggaaagtaaaaagacccacgccgtcaataagatagcgtgggtctagtgtaactgactgatgcctgtgaggcattcacaacgagcaggcgcgtgctcaattgagtcctgagtagctggagagactgggcgtcgcgtgactcgcccgtgtgtcatttcctgcgggcccgaaccaccgcagtcaaacttttcccgcgtcacgaggcggaaacccttgtgtgtgggcagctgtagcgcctcgggattatttccgaaatgacctgaccggtactatagataggcacgcatcgcatgacaaatccacttgttatcaccgtcgataccacccaagtcgatggctattttaatggcctgtcagtccgcgccagcaaccccagccccgcctatatcgccatcggcgagtacctgacccgcgtcgccgaccaaacttttcccgccagcagaccccagacggccagcggtgggcatccaatagccgattaacgattgagcgatacctcgccaccaagggcggggcaaaatccctgaacaaaaaaggccagctcaatagcaagggcgcactgcttgtcagctctaaaaagatggggcacccctccacgggaggggaataacagcccaatcacacagcggggaatcacgtttttgtgaggttgaggacaggtgctcagacctgtgccccctcggggtccatcaccccccgattggcgagttcatcggcgcgttcgttcaacgtatgaccggcatggcctttgacccagtgccatgcgatttggtggctggcacaggccgcatcaagggcttgccacaggtcggcatttttcaccggcgcacggctggcggttttccagccccgtgccttccagccgtgtatccactcgctaatgcccttttgcacatactgcgaatcggtatagacccgcaccgtcgcagggcgttttagggtgcggagggcttcaatcaccgcccgcagctccatgcggttattggtggtggtcggctcgccgccccagatttctttttctgcttcacgatagcgcagcaacgcgccccagccgccagggccggggttgcctttgcacgcaccatcggcgtaaatctctacgacggcatccgccgtcactgcatcagaggtcatcgggggtttccgtgtgaattaaacgaccatcccgcttgctgcccacagggacagccaaggcgcggggggcgtaagtttgccagcggggagccaaaagacgcatgccgtggacacgcttaatcacctcaaggccatagacccctgccgctgccggccaccaccggtcgcctgcgtcttccataaacgcacagcgtgccagccacgcttcgccttcaaacggggggcggtagcagagaaatgccccgcccgcaggctctaggctcagcacgcgcagccagtcttttagccgatggagcgcaataaaccgcccctgccaaggcgggcactgctggtttttaagccgccgtgccataccccacaggctgtagggattaaagccggttaacaccgcccgcccctctggcaccaacacccgttccacctcgcgcagcacctgatgtggctggggcgaaaaatccagcacatgggggagcagcaccaaatctaagctttgattggcaaacggcaagtgaaacggtacacagcccacggcgacgttgccttgttcgcccaccacgcccttccacgggatacggctttcgcgcagaaacggcacatcaggcatccccacctgcaccgcgtaatagccaaaaatatcggccacggcgtggtcgatatagcgttgttcgcaggcaagggcatagcgtcctagcggggtggcgaaccacgcatggagtgcggtcatacggacaccgcttggcagggcgaggcaaaagccgctagggtaggggctttattttgcggggtactgaccatgcaagtgactcctgttccagcgtttgacgacaattatatctgggttttacacggtgctagccgcgcggtcgtggtggaccccggtgatgccgcccccgtgctggcttttttggccgcgcaccagctgaccttggcgggcgtgctgattacccaccatcacggcgaccacaccggtggcattacggcattgcaggcggcttttccggcagtggtgatttatggcgcagccacccaagccgaggtgaaccagcctgtgcaagacggcgacacgcttgatttgggggcggatttcccacccttcaccgtgctggccaccccaggccatacgctcgaccacctaagctatctgggcggcggctatctgttttgcggcgacaccctatttggcgggggatgcgggcggctgtttgaaggcacaccggcgcagatgctggcctcgctcgaccggctggccgcgctgccagaagacacccacgtctgccccgcccacgaatatacgctgtccaatttgcgctttgcccagcgggtagagggcgatacccccgcccttggcatccggctgagcgtggacaccgcccgccgtgccgcagggcagccgaccgtgcccagcacactggcgattgagcacgccaccaatccttttttgcgttgcgaccaccccgacgtggttgccgccgacggacgtgctgaagtaaccctggccgagcgcgacgtgcagcgcgcccgggagctgatgccgcgcctcgccctgcagctcaaccaaatacactacaaggactacgacggcatcaagggcgaccgcgacgacaccaaggctatggtccgcttcgactgggcattcgatctgggcatgaaggccgcccgagtcaccgaagcggcagatcaatccgtgatctcggcccgcgagaaggctgcttacgttcgcatccaggcccttgaagaaggccgcaacg

SEQ ID NO: 3598 - DNA, 4927 bp, synthetic construct
  misc_feature 1..4927: note = Synthetic
  source 1..4927: mol_type = other DNA
tcctgaaagaattttaaatcccatgtaatctggtgtaatcaattgcaaattttttggatctgataaaagttcccaagctttgtcaatactgattggtaagttttgtttggtatgtaatctgtatattttcatattattttttttgtaaagatataaatttgtttaatctttattagtattaattaaacaaaatttattcatttaagtttatattaacatttgattctaatacaatttgtaaatttgaaaatcaaaaactaaacctatgagaaaaattattgtaatgttggctgtagtattagccaattttatggttgaggcgcaagtaaaaacacctcaatcgagtccgttagcaaaagttgaacaagttgttggacttacaactgtacaagtagaatactctagaccgagtgcaaaaggaagaaccgtttatggcgatttagttccttttggaaaaatgtggagaacgggtgctaatgccaataccactatttcatttagtgaaaatgtaaaaattggtggaaaagaacttaaaaaagggaagtacgctttttacactacaccaaaagcagacagttgggatattattttttattcggatactaacaattggggattacctgaaaattgggacgaatctaaagtagctttgaaagttacagttaagccagaaacattaaacaaaccagtagaatcgctttctattttcttgaataatctaactaatgattctggtgttattgagttatcttgggaaagaacaatggtatctattccattttctgttcctactcaagaaatagcaatgaagagtattgaaaaaactttagctgggccatctgcagcggattatttttcatcagcgtccgctgcgctgggatcgcgccagcattggcgcctgctcgctggaaaaacaccgccagcgcgccgccatggcccggctggaataccaagaattccgtttgttgcaagacatcaatcacctgcgctacgaccgcccatgcagccacccggacacgggcgaaattttgggcctgaacctggcgctgaccgagcaagaccgcacccgcctgctggacaaactggccagccagcaagacatgagctggtcagccgtcaaaaaactgctgggcctggataaaaccatcaccctcaatctggaagccggcagcaaaaaaggcctgcccggcaaccgcaccgccagcaaactggccaatactctgggtgctgacgcctggcgtgcgctgggcgccagcgggcaagccgagctggtggaagacctgctgaaattcgagaaaaaatccgcgcttaaaaaacgcctgatgactcactgggccttgccggcgcgcaccgccattgccttggccaccctggagctggagcccggccacgccaatttgtcgctcaaagccatccgccgcctgctgccgtttatgcgccagggcatgcgctacgaccaagcgcgcgaagccgccggctatggctatagccgcacgcccagcgacggcctggagcgcctgccgcgcccggatgacctgcgcaacccggtggtgaatcgcgcgctgcatgagtttcgccgggtgtgcaatgccctgctggccgaatatggccgcccgcacgccatccgcatcgaactgccgcgcgaactggccatgggcggcaagcgcaaggcggaatacgaaaaacaacaaaagcgcaaccaaaaagccaacgaagacgccaacacgcaataccaaaccatccgccaggccaatccgcaactggggctggccgagcgcgtgggccggctggagcagctgaaataccgcctgtggcgcgaccaaaacgaacgctgcctgtattcagacaaacccatcagcatgaccgagttgttttctgccgaagtcgaagtggatcacatcctgccgtattcgcgcacggtggacgactcgtatatgaacaaagccctggtgatggccagcgaaaaccgcttcaagggcaaccgcacgccttacgaggcatacagcggccagcctgaacgctgggaacgcatggtgcaatgcgcccgccagcaaccccccgccaagcgcgaacgcctgctgcggcaagaattatcaggggtggatgactttatcaataaccaactgaccgacaccgcctacctcagccggcaagtgctggcctatgtgcaactgctgggcagcgcggtggatgtgtcggtcagcaagggcgtgctcaccgcctggctgcgtcggcgctgggggctgaacccgctgttgggcgggggagaaaaaaaccgcgccgaccaccgccaccacgccgtagacgccgccgtgattgcctgcgttaaccgcagcctgtatcaaaaactggtcaagctgatgcgcgaacccggcgcccggctggagcgcattgcgctggatgccccatttgcccactaccgcgacagcctggccgcccacctggaccgcctgtgcgtcagccatgcgccgctgcgcaaactcagcggcgcactgcatgaagaaaccgtctatgccgtacagcgcggcccgcaaggcgagccgcgcgtggtgtatcgcaaaccattggacgccagcctgaagctggacaaactggtggacgacggcctgcgccgccagctgcaagaccacctggcgcgctttaacaatcacgccaagcaagcctttgccccagaaaacctgcccgtgctgcaccctggccacgggccggtgcgccgcgtgcgcgtggtggcggccaacagctttaacccgcgcagctttttaagcctgccagaccgccagggccaactgcgcaaacacttgccctttggcagcaatcaccatgtggaaatcctgcgcgaccgcgccagcggcaaggtggaaagcgtatttgtcaccatgtgggaagccgcccagcgcgcccatcaacaccagcaagcgctggtgcaaaccaagcacggcgccgacaaagtgttcctgatggcgctgcacatcaatgatctggtgctgattcagcaaggtgaacggcaagtgatttatcgggtgcaaaatctggatccgaaagacaagcgcgttgtgttgcgccatcaccgggccgctacgctggatgatgacacccaaaaagtgcgcgccagcatcagtcaattggtcgatcaacatggtatgcagccactacaactcaacgtgctgggcaagcccttgccatgatcaagcgcattatcgagctcacccatggcagctatgtgcatctgcatcatcatcaactggtgattgagcaagatggccagtgtgtggccagcgcgccggccgaagatgtcggcctgctattgctggcccacccggccaatgtcatcacccaacaggcgctggcctgctgccagcaatatggcgtcgccattgccgtgtgcgacgaacaccacctgcccagcgcgctgatgctgccgctggatggccacagcctgcacgccgaaattctgcgccagcaagtggcggccagccccgccgcccaggcggcgctgtggcaagcggtgatacgcggcaaaatcagcgcccaggccgaggtgctggcaaagctgggccggccaggcgaggcgcatctgcgccgactggccgagcatgtgcgccccggcgaccccgacaatctggaagcgcaagctgccgccgcatactggcgcagcctgttgccagagggcgagcaccgccagcctggccgccacaccggggtgaacgccttgctggactacggctacgccatcctgcgcgcagccgtggcccgcgcggtggtggcggccggcctgcaccctgcctgggggatttttcatcacaaccgccaggataatttcgccctggccgacgacctgatggagccactgcgcccggcagtagactggctggcctgccgccacatccgcgaccccagccaagggctgagccccggcgacaaacgcgcgctgctggccatgctggccgcccaggtgcagctgggcgatgtgcgtctgccgctgtgggtggcgctggggcgctatattgcccaggccaaacaagcctggtttggcgaaaacctgacggtggagataccgaaatggctgtttttggaggataccgaaccatgtggctgatcatcatgtttgacctgcccaccaccgatagtgaggcacgcgccgactatcggcattttcatgattttttgctgaacgaaggttatctgcgcctgcaactctcggtgtacggccgccactgcgccagcgaagaaaacggcgcggtgcacatgcaaaggctgcgcgccgccctaccgccagacggtgaagtgcgcatgttgacgctcaccgacaagcagttttcccgcatgcaggtgttttttggccgcatgcgccagcgcaccgagccgccgccagaacagatactgctgctgtaaatcaggaggaacacaagtaaaaaggcccacaccatcaataagatacagtggactagaatttccgacagtacccagaccacgaatactgactttcatgtccgagcccggctgaccagaagtggaagaaatgttcaccccaggtgtctgtccttgcatcccctgcaaagggctattggtattcatcttggcaagactctcacccttcacctgcaccgttgcaccggtcaccagtttctttttctgcacaccataacccaccaccactacttcgtccagcagttccgagctgggagtcagtttcacgttctgcgtataggtgttgcccagttccagcatgatgcccgtaaaggcggcactttgatagcccacgtaggacactgtaagtttgtacgggccgccggtacgcataccttgcatcgtatagcgtccgtccacgttggtgacagcgccatactgtgtgcccgaaggttcatgaacagctataaccgtcgctccgattacagtttcattctgttcgtcggtcaccttgccgcag

SEQ ID NO: 3599 - DNA, 23462 bp, synthetic construct
  source 1..23462: mol_type = other DNA
  misc_feature 1..23462: note = Synthetic
ataatgagttcatcaaaaaaagtttctggtaaattttctgaaaaagtttctgtatttgagctcatatgtttatttaatgaagtttctgtttttccttcatccatgcttgtctcctttgtgtttcacaatgaaaatagccatttttccattttttgtacagtaaaaagtcgaaaagaaatataaaaatttttttaaatgcctaataaaaatattgtttattagaaaaaaagatgttattttacttttacgtatatatatatatataccaaaatacaaggtatatatcaaaaaacggaccaaacatgaaaaagcaaaaaatactaattgttgatgatcaagaaataaacagaaagcttcttgtgaagattttggaaaatcgctacgttattcttcaggctgaaaatggcttggaagcgtggaatattgtagaaaaagagaaagattccattcaggctattttacttgaccttattatgcccgtcatggacggttatgcttttttagataaaataaaaaaatcttcctatgcagaaattcctgttattgtggcttctcaggacgactgcaaagaatcagaacttcgtgctttaaaagtcggagccgtggactttattgccaagccctatcatcctgccattatttttcagcgtattgccaataccattgcgctgcgtgaaaacgctattttaagaaatacttctgaacgtgattttctcacgaaactctataataaagaaaccttctttgagaaagttgcaaccattattcaggaagatcaaaagacaacctattctctcatttattttgatattgaacgctttaaggttgtgaatgatttctttggtgaacaaaaaggtgatgaactgctcatttatctggcagatacagtatccagtttctctcaaagctccaaatattttggtgcaagactgacagcagaccgctactgtgtgtgcatgcctcatgatcgggaaaatgaactcagatttgccaattttgtgatgtctctccttgaaaatttccctatcagcttgaaaataaaagttaattttggtgtttttgttattgaggacatcaatatgagcgtcagtgtaatgtgcgacagagcaaaccttgcgctcaagaatattgttggcaaatacgatacctttattgaatattacaatggcagcgtgcatgaaaaaattactgaagagcaggaaattgtcaatgaaatgaacacagcattgcaggataggcaatttgttgtgtatattcagccaaaatttgatttgaatacctttgccaccattggggttgaaacgctggtgcgctggaaacatcccaaaaaagggcttattcctcccattaaatttattcctgtttttgagaagaatggatttattgttgagctggatatgtttgttttcgaagaggtttgcaaaacccttcgcgctttgcaggacaaaaatgttccccttgttcctttcagtgtaaacctttcccgtgctgatatttaccgtcctaatttgtgtgagcttattgttgaggttatggcaaaaaataaacttgaccatagcctgattgaatttgaaattacggaaacttcctatacgcaagattcagatcaattaatttatgtgatcaacagactgcgtgaccttggtttttccatttccatggacgatttcggtactggttattcttcactcaatatgctcacagaagtgcctgttgaccttttgaaaatcgacatgcgctttttgaaaaacttcaatgaatcagacgaaaaatccaaaaatattatccattttattgtctatatggcaaaatggctcaacttgcctgttattgcagaaggtgttgaaaccattgaacaggttgagtatctgcgcagtattggctgctacaacgggcagggctatttcttctccaagccattccctattgaagaatatgaagaacgcctgaataaatttggcgatgccatggtcacaacctccaatcaagacaccattgtgccgattaaggatttgtacagcggcaattccacctttaaccagattttcaatttgttcaccctgcctcttgctattatggaacttcgcggtgacaatctggaaattttgcgggtgaacaagtatttctatgatgaaatcatggaaaacagtcaggaatttatcgccacaacctgccacgcgcttgattttattcttccggaagacagagacagagtgctggcagaactgaaaaatttagatgaagacaagcactggactgaaatagttgtacgtgtgcagtctcctcatacgggtatgatttcctggaaccgtgggcgcgtcagctatttgcagcaaacctacaacagcaaaatctttattatgcagcttcgcaatgttactgaagaaaagaataaagagcttattgcagatcttcaggaagaacgctttaatcttgtgctggaatacagcaaatcagcgattattgatgttaatttaattgataagaagcttcgcattaataacgtgctggcaaaatctttggacatggaaaagcttgtttttgattatcagaaagaagtcaaagaaaagtatatgcttccttttgaacaaaagaacgagattattgccatgctggatgatatttttgctggcaaggctcaggaaaagccccttcttgtttcctttattcgccatgttttcaaccgtgcatggtataaactgagttataagattttgtctttggaaggcaaagctcagcttgctgttatttattttgaaaatgtgacccattctatgatcaatcaggaaatctttgagcgtgaacaggaatttagaaacactattgctgcaagcgataccaattatatggaaatcgatgttgagtcaatgagcgttctgcgccattctccaaaattcctgggaaacatgggctacagcaagggacattctgtggatgaattctttacgcgcgttggcaatatgcttattcatcctgatgacaaggaacgctttgcccagcttatgtgtatttattccatgagccttttatcttcacaaaacaggaaactgagctttgatttccgctatttgacaggaaaagatttcaaatgggtatgcttcaatttaagtttgattaaaaacccaactgataagacagttttaggcttttgctatcttgatgaacttggctccacgcaccattatcttaatattgatgatttgcgtgctcagcgtgatcttgcaactggcctgtatacggaagaactttttgaaaaagctgtgaataattactttgaagtcttcagcgataagtttggagcattattctatatcagcctgtccaaagaatattccgcttccagctgtccgaaaaaggcttccaattattctgtcattgccatgtccaatattttgcggcaaatctttagaaacagcgatgttgtggcgcggctcaatgaatttgattttgccgtgcttatgcagaatgtttctgataaaaatattgtgctgcaaaaggcaaatgaagtatgcattgccatgaatgaatataacaagaaagatttttctaataaaatcattggaaatattggtgctgttctattacaggaacaaaatacgtataatctggcagtcaaaaaaactcaaactgcatgtgaactcgctatgcagcaaggaaataatacattatatctcttaaacgaataggtgtgacttatgattgatcgtttgcgaaattggggctgtaatgtcgaagaagctctggaacgctttgtgaatgataaggagttgtattgcacttgctttaacatgtttttagctgataccacttttgagcaattgaaagaatctgtaaaagccggagactgcaaagcggcttttgaggcatgccataccttgaaaggcgtgggcggaaacttgtccgccggccctctttatcaggctatttgtgaattgacagaaagacttcgggcccaaaatatggaaaatgccgaagaatatgttgaaaagattttgaaattgagtgatgaggtacagcagcttttagctggatagatcatggaagtacgcagtgaagcaaaaaaatgtctggaagtattaaaacaataccaagacattgttgttaccatgcacacaaatccagacggggatgccattggttcagccattggcttagcatggtttttgcaaaaagagcttgggaaaaatgtctgtatttataatgaagaccccctgcctcttcgcttttcctttttggctgtgccctgtgcttattatactgatttagcggcaattccttttgccgatcccctcgttgttcttctggacggctctgaagcgcaccgttttggtgatgcttttgcaccgtattttgcaggcaggaaaagtctttgcattgatcatcatttggtagaaaaagaaatagccagtgaatataactggatagatcatactatggcggcaaccggagaaatggtggctcatgttgtctatgcccacagtgataaaacctttgaagaagcggcaattcctctttatgttgccctgtcaggggataccgggaatttttcctttggcaataccagtgtggatgccattgaatgtcttgcgaaacttgtggaaactccgcttaatcttgcgccaatccgtgaaaagctcgataatacctggacgaaggaaaaaatgtatttttggggcaagctcatcagtatggtaaaatttgcatttaatgaacagcttgcctatattgccattcctcataccttgtttgccgaatggggcgtaaccaaggaagcactggaaggttttgtggaacggatgcgccgagttgcaactgtgcgcatgacgctgatgatgcgcgaagaaataaaaaacggttctccttttattaaagtaagtatgcggtcttccggcgatgatgatgttcgaagcattgtggcgctgtttggcggaggaggacacaaaaatgccgccggtgcaggcatagaaggttcattggaaaacgtttttgctatgttataccctcatattgagaaggtattacaaaaataaggagttattatgctgaaaggggcgatttctgctttagttttgccatttaaaaacggagaaattgacgaagaagcctatcgtgaatttattgaatggcaaattgaacaaggtattgacgggcttgttccctgcgggacaacgggcgaatctgcaacgctgacccacgaagaacatgaacgtgccattaaaatttgtattgaacagacaaagaaacgtgttccggttattgctggatgcggctcaaataataccgcagaagctatccgcctgactcaatttgccaaaaaagccggcgcagactgcggacttctcatcagcccctattacaataaaccaactcaggaaggtattttccagcattaccgcgctgtcagcaaagaagcctcattccccttcctggtctacaatgttccggggcgtacaggctccaatattacttccgataccatggctcgcttgtatcatcaaattcctgatatgatcggggtcaaagaagcaaccggaaatctggtgcaaatctccaatattttggaaaaaacagataaggacttcatcttgctttcaggcgatgattccacggttttgcccaccctggctcttggcggtaaaggtactatttccgtaacctccaatattttgcccaagaaagtgcacgatctttgtaaagcctgggaagacggcaatttcaaagaagcacagcgcctgcacttctatcttgaacccctgaacagagccatgttcattgaatcaaaccccattcctgtaaaaacagcccttgcgctcatgggtaaaatgggcggagaactccgtctgcctctttgccacatgcaggaaagcacccttgctgtcctgaaaaaagtaatgcaggatatgaaattgatctaagataatttttttattattttgcggggggaattatttcccccgcaccccctaaacgccaaaccgttatagacgttgtctataacggtttggttttttataatttgattttaggggatattattagattaaaacgttttgaaaggggtacggggaaaacttttggaaaagttttcccgtaagagtttttaatattacaaaataatattgtaaaaatagccgacaccaataaagcaaagtgccataaatataagatagcgggtaataagcgggcgtttcataacctttgaaagaataatcatttccggcagagacaaacccacaactgccatcataaaaacaagaactgtgccaatggcagagcctttgcttatgagaacttcggcaatggggataatggttgtggcatcggcatagagcggtatgccggcaagcacagccagaggcacggcaaaaatattatctgcctgcatatggtgcaggaaaaactcttgcggaacatagccgtgcaaaaaagctcccacgccaacacccagcaaaatgaaaagccaaattttgcgtaaaagaacttttgtcttttgggcagctgtatttatacgtgcagaaaaaagtatttgcggcgcagcagggacagcgcaggtgcggggggtaaactgaatggtattgaggcgcaaataatcttgcaaatactgtgcatagccgagtttttccagaagatatccgccgagcatgccaatagtgatacctgttgcaatataaatgagcgtgatttttatgcctaaaataccggcgagcacaagcatggcaatttcattgatcataggcgatgtgatgagaaagctcatggcaatgccaaagggaatttttgcctcaatcaagccaataaaaacaggaatggatgagcaggagcaaaagggtgtgactgcgccaaaaagtgcagccagaaaatgagcaagaaattttggctgtttttcaatataggctttgattttttggggattgagatacgtttgcaaaaaagaaatagtaaaaataatcaagcagagcagaaaaagaattttgagcacgtcatacacaaaaaaatgcagagctgcaccaaaacttgtttcgggtgaaaggttcagtatattgtaaacaagatagtcagcaatagttaaaaacataaaattctccgtattgataccgttgaaatttgacaaaaagcactttatatgccaatattggaatatataaagaataaatatgccacttttggcatattgtcaagtccctgggagcagagcatggataaaaaatttttgtatgagcaaaaagcgcagatattcaaagcgttggcaaatcctgtgcgccttgaaattattgattttttagctgacggagaaaagtgtgtctgtgaaattgcggatgcacttcattatgagcagccgcatatttccaaaagcctgctcaaattgaaagaagcgggtttaatcggtcagcgcaaagaggggctgaatgtgtattattctttgcaatttggctgtatgcgtgaatttttgcattgccttgataccgcactttcagagaagagtttacaggaaacaaaggctccccgtgcagtgaattttctgtgtaaaagaaagacaaaaaatttttttgaaaataaataatcgttatattataagcagttacgaagtactctattacggattacaggcttgattaatctttttgaaatggtataattaagcgttcaattttttttggaagaggttttatatgttgaaaaaaattgcgctttttgcgtttatggtaatgagtttggcaatggttcgccctgcctcctctcttgcaaacgactggtggatttttgtcggtgcaggaacaggaacagaagatgcggcagtcggcgatttgaccctgcggacaacttttgacttttttaactatgaaaatgactggatttcaatacagcctttggcagagctttctttgaattactggcatcatgattctgacgatgaaattcttggcggaaccttgtccggcggtcttttattggttttcccgcgcgaaggctggtggcgtccgtatatttccggtacttttggcggaagtttccaaggcggaacatctattggcacgcatgacctgggacagcattttcagttccgttcaaaagcagcgcttggcgtgcagtttggtgaaactttcagacacagcctgcaaattgacgcagctcatttctctcatgcgcatatgaataatgataatgacggcttcaatatgttcatggtgtcttatggtttccgtttctaattgttaattatattgaatacgctaaattttattgttcgttaattgcaaattgcggagaactgtttacaaataacgaatttttttatctgcaatatactatttcattctgccttttattctgtattcataataatacgcgcaggatgagatgaaaagaaggaaataggaaacaagttcaatgccttcttccataaagtttttcaaggcaaattggcagtgctccggagcaacaagttttataagctgcatactgccaaagatacgtgaaacaaataataataataataagcttaatattaaaaacggataggattttttgcgcataaaggctgctaaatcttcgataaccggggatatgccattgcgcaaagctaaacagatgaagaaaacagcagccggcagggcaataaatttccaggcgccgtggaaaatcatatcaaaaagaatatcgagctcacgaacaagcatgcaggataaaaatcccgctacaagccatagtccccgaattttgtttttgtgggcaatacagcaaaaaatacccacacaaacaaaaagtaaaatttcctgcaaaatctcagtcagcgaaagttcaggaatatattccacccgcgcgaaatcaagatgggttatgccaaacataagcagtaaaagtaaaatggtgcttacagcataaataataaaacgcaaaaattcttttaaaacaaatttagtattatcttccataatgtcccccaaacaggaaaataaaatttataggattcatatttcttctcaaaatacagaattttattaatcaaacaatacttaaatttagacgagtaaaagctttctgtcaagctatagcaaggcaatatagcgcatattgttttttgggctttgacttgctaaagaataaatatgcggagtatgctatggaaattaaagaaatcaaagaaaataaaaaacagtttttgcctttgcttttgcttgcagatgaacaggaaagtatgattgatacctaccttgaacgcggaacgctgtatgttttagaggataatggcgtaaaaagtgtttgcgtggtgacagatgaaggcaagggaattttggaaattaaaaatcttgcaacagaatcggcttttcagcgcaaaggctatgccagggcattgctggattttattacgacaaaatataagaaaacacattctattttataagtgggcacaggcgacagtccgctgacgcttcccttttatgaaaaatacggctttacccaatcccatcgcataaaaaatttctttcctgataactatgatcaccccatattcgaggccggaaaacaacttgttgatatgatttgtttgcaaaagaaattgtaaaaaaaactcaaaaaatcaagtaatcccttcgggtttgatttttttcgctaccggaggcggcgaagccgtttctcttttgccgagtttacgaggtttagagaaatagacagcagagataggacgagaactttttgctttagtcgttgtgacgcaggaaactacggataaagacagcattagctggcaccaagttgtgcttaagaaccactgtcgctatccgtaagccaacaagttggcaacggctaccgcaactttttgtaagctttttatggcttcgccatgctagcaaaaagtaaaaaagcccccctgaaaaggagggctttaaacattttacatataatttcaaaagaaattatatttgttttattgcctatctgatttaatcctgctaaaataaaaatcagataaaatgtttataacaagaaaataaatagaatgcaaggagtttttatggcattgcgttatattttaggtatagatttagggattagctccattgaaacagcactttttaagattttaccagatgcaacagatttaaatgatattcattcatttgagaaaattttagatgcaggtgtgcggatttgtcctgtttcagagggagcagccaatcgccggaattttcgcagtcagcgcaatgctaaaaaacatagaaaagcccggaaaaaggctctcattgccttattgcaggagtataaacttttgccattggacaggtcagaactggaactgggcttgcgttcacagccatacgccttgcgggcaaaagccatgcaggagccgctcagcaatgcgtatgaactgggctattgcattatgaatattgcaaaactgcgtggagcaggttttattgacgaagcggaagaaaatgaggacgaaaaaaagaaaagcaaaaccgcaaaccgttatcaaattcttgagcaggagctgaaaacgaagaacattacgctttctgaatttttggcggatcatttggcgaaaaataactgcgttcgccagcgtttggattttatagctgaaaaagtgcctttttccgtgcctcgctatcttgtcaagcgtgattattatgcccttatggaaaaacaggcaaagcattttggcatatctgacgcacaggtaaaagccatttattccacgatttttcaggattttccaaaagctccctatgccaatgctccgtgttcgcttttgccggagacaggcagcagactgccaaaaatgcacagacttgcggaagaattacgaatttatcagcaatgcaataatatccgctataacacagttgaacatactgacatttatcagggattaacaagacaaatgcgggatgctcttgcggaaaagctcatgcagggtgaagggcttaataaaacaagtattaaaaagatacttcaaactttttgcaaagaaaaaattaaaagcattaattgttatgcccaggatgaagaaatcaccgcgattaagccttttgctcatgtgaaagcttttgcgggtatccccactttttggaaactgccgcagcaaaaacaggatgaactgattgaatttatcgctgatccgctggatgtcaaggcaaagtcagcgaagcctgttttatatgatgaagaaaaatttttgcagatttgtatggaaaaattacagctttccggacttgaaggcgaacaaaaactgtacgctgctttgaatttgctgcccaaagacagaaccatgcttggcaaggaggcgagcaagcaaattttacaaaagcttgttgatggcattgaagttgacggggaatggaaagcccccacttattatgatgcggttactgcctgcaattttacgagggcaagtgccgagcaaaaagaatatgatttcttgccttattatggggaagttttggtcaatgatattttgcccattcatccctggcatctggaacgcactgcagaagaagaaaaaattggacgaattgcgaatcctgttgtgcattccatgctcaatcaactgcgcaaggtagtcaatgaaataattgccttgtatggcaagccggaaatgataaaactggaaattgcccgtgattttggtttgtcaaaaattaagcgtgataaattagaaaaacagcgtcaggctaatgaaaagtacaatcgtaccattgatgcggagttattgcgttttggttatgcttcaacgccaaaaaatcgtttgaaatatcgcttgtggaaagaacaaaacggcaaagatatttattcccggcaagaatttaaaattgcagattttaatcgctatcaaattgaccatattattcctcaggaagcaggcggtacaaattcgttctgtaacttggtattgacggataaaaataatgtcaaaggaaatacctttgcctatgattttattcaggcgaagtttcctgactgctgggaatccataaaaaaagagatggaagaaatgcctaaacacaaagcatggcgtttcacggctgaagcaaaaacacgttatgccctgtatggtgacgaaacagacgaagactatgcagaccgtcgtttgcaggatacacgctatatggcaaaggcggcacttcgttatctttcctgtatttgcaaaaatattttggcaattcgcggcggcatgacggcacagctgcggcatttatggggttttgacggcattgaatatgaactcatgggcttgaatgtgccaaaggaaagaatagatacggaaacaggggaagtttctgtcgacagtaacggtgatgcggcgattaatcctgattgggaggcaaaaccccgtattgaccaccgtcaccatgctgtggatgccatggtgctttgtgcgattacgcgttctttggctcaaaaaatgtacagggcagataatcgtaataaaaaaattgatgagtccatagcagacatgccctttagaaaatctcctaaaaattcagagttgaaatcttttagagaacttgtgcttgaaatgctgaaaacgattaaaatttcccataagccggaacacgacaccaatacgcagctgcataatgaaacagctattcgcattcttgattatgatgaaaaagatcagctttatattgcaaattatatgcgttcgctcagtaatattgatagtttcagtaaattagaaactattgctgttgctgaaaatttaggcaccagtccaacggtgcggaaaatgcgggagcgctgtgcccatattattaacgatgtgagtgctcagcgttttgccgcagaaaaaagtctcaagcaaaaaaataccgataatgctgcacagggattaaaagaggtaaaaattactgatcaagctcttgtgcaggaggcaatacgccttgcaaaggtggggaacaaatatcctcgccttgaaaagttcacccttgtaaatatccgcaaaaaacagcaatgcgggtatgagccggccagcaatcaccgcgtggatttctttgtgtatacagacggtaaaaagaaagatgaaattggctgggaatgtataaaaagcattgatgccgccaatcctaattttaagccaaaatggcaggaatatggagaacttgtttggagtgtatgtaaaggcgacattctggaactgcactttgataaagagacattgctaaaagaaaaaattcctatggcgtttgtaaggcaaaatgagcagcaagaatattgtatgcttgcaaaagtgttaaaatttacagctacatatattgtctttgtttcagcttttgatgcacgagctgatcaaaaaaatgctttgaaggaaaatccggaaccatttatgcgctggaaaagcggtaactgcggattatctttttactgcaaagcaaaggctcgtaaagtgcttcttagtccttttggaaaggtaaacaagaaattgcaaagattatggcatggcaagaaagtataagcgtatcaacaaaccgacagagtatactattatgtggctgctcgtgatgtttgatttgcctgtaaccacgaaaaagcaaatgcgtctggcaacccagtttcgcaacagtttactcgagctcggttttatgcgcaaacaattttctgtgtatatgcggccgtgcgaaaatatggcgtcggctgagcgtatggcagaaaaagtgggcttgtgtttgctggaacagggagaagtttctgtctttttcattacagacaggcaatacggactgacaagaaattattttggcaaaaagaaaaagaaaaatgagcagcaggaattccaagccatggagcagttatttctgttttaattggggaaattccaaaagaacttgtttggtgcagtaacttttatagagagcttgagccgctttgagtactatgggtagcagcgtgctttcttcctcttgtaaataaaggggacattgcaaaattgttgaaaggtggcgttttgcttttgtgtctaataaagggatctcattttctttaatgtattcaaaaacaaggcaatccaaaaatggtcgaaaaggttccataagatcatctgccagacaaaaggcgttaaactggttgtggtgatgaaccccaaattgaggcaaaagcccgcttgcgcaaattgatctggcacaaacggcacgcacaacagcatagccataatttaaaaatgcgttgataccttcttcgtcctgatctcgataaaagctttttccaaagagagcttgccaataaatttgcgctgcttgtccttctttattgtccttatcaccagaccgaacacgctgagcaaggaatttaagcttttcaatatgcttcattacgctgggatctgcaggcagaacacatttttccagagcttgggcctgattttgtattttactgataataattttttgccagatttgttttttgataatttcaccagctttgacttgttcttcggcaatggtgagctgcttgtaatgggagctgacgggcagggcaatggatacaggcaaatagtttttccccataatgagtacgggaatattttcctcgcccattacggttaaaaattgtttgctgacggtaacacctggagcagtgagcataacacaggcaagtagatcaaggggaatttgcccaagcgtcttatctgcttcctttatgcaaatatttccatgggcaatggaaagataacgattattttctgcaatttctaaaacatggcttgccatagttactcctgaaaaattcaaaaaaactcaaaaaacagcagtattttttactgttttttgagttttttaatagtatgtttcattgaaaaagtaaatgtttccaatgaaatacgtctgaatatttagcaggattaaatcagacaggcaagtaaaaccgttatccaactggataaatggaatttttgatttagcaggattaaatcagacaggcaagtaaaacgtcagggcattagcgttcgtgtcctggttgatttagcaggattaaatcagacaggcaagtaaaactaatgtgttattgttaaacttaacttctgtaatttagcaggattaaatcagacaggcaagtaaaactttcgtaaatgctccacatcataataatacaatttagcaggattaaatcagacaggcaagtaaaactcagacggtctgccgcagcgtatcaaaattaatttagcaggattaaatcagacaggcaagtaaaacctttttccttttccgataaagggcaaaagaaatttagcaggattaaatcagacaggcaagtaaaactgtcacggcgcattatatctagataatgaaaatttagcaggattaaatcagacaggcaagtaaaactaatccacataacttattattttgctccgtaatttagcaggattaaatcagacaggcaagtaaaaccgtgaaagtcatcctctttcattgaaaaaattttagcgggataaaaccaaacaaacaaaacaaactttgcgtttgcacgtattgtaggcgtaacttagcataactagctaatttattgcagtatgttaattaccgatatttttcgtttgactggtagtaaatgcgtttgcggtggaacatcttttcatcagcgtgtttgatacattcgtctatttcaccgttttcgcaatagtgttcgccgtaggacatatcgtatttgccctggtgggcattcagtttggttgtaaagcgctttaaaaagtcttcaaaagcatttttaggaattgttctgagcaggacaacaaattcatcaccgccgatacgatacacgttttcgccaaaaagctgcttcaggaaattgcaggcgttgatgataaattcatcgcctttttcatgcccctgaatatcgttgatttttttcagaccgtttaaatctacatacaggactccgacgttttctttccttaatttgattgtttccagaagttcaagatatttattcctgttgtagcttcccgtcagctcatcaatattgctcaaataattgaggcggtttataagtttgctctgctgtaaatgggtagtaatgaacatggaaatggagctgagaatttgttggaattcaaggttaaagcgtgggttgtcaacgccaactaatcctataaattcattattattatagatagacatgagaagcatatttttgatatttttttcatcaaaagctttttttaattccggcatattggctaaatcagtttgtacattttgtaaaaaaacttttgatttatccgcaaaactttttaaccataactgcaaaattttttcatttgcttctgataaaatgtctttaaaagaagagacaaaaggacgaacaaaggaatagttacattttaacttggtagtttttggattgtattcgaataaataggctctgtctgcttcaaaaaattccacaacgctttcaagaataatttttaaagcattatcaatgtcgtctgatcggcaaagggtatccgcacatttcaccagcaattgctccgtggaaattttatcgcgtaaattttccatttttttttggtattcccaaaaatcaatgccaaattccagacgaaatctctttccctgccattcaataagggaaatttgtgattcaaaggggcggtctaaaatttgtttttgaacttggaacgtactgccctttccggtacataattgattatttatacaaaaatcacagggggcagattgtttatgcaggacttcatagcattttttattaagataagaagtttcgtcaatattcaataattttctgaactggttattaatataaataaaatcataagaatctatatctgaaatgtatgcaatgccttcaaacttatcaagaatttcttttgaaaattcgcttcccaaactcgctaatctgtccatgcagccaacctgaaatcacctatatgtgttgccatatatctctttgcatgaggagactatactttagacaaattgtcaacaaaaaaaaattttttatcgcaggattaaatgcattttaaataatttcttttgtttgcggtaacttattttattgtttgaaaataaacagctgtacgaggtataggcaatgcttgttcatgaagatgtgaatgtatgcatagatgagtcctttttgtttagaaatgctgcttttgatttgcattgataaaatcgggtaaacataataaatatagaaaaatttcttaatagctgagataaaaaagtggacaagaaaatttaaatacggtattagttaaactcgctttaaggctttgcaacgggtgaaaacagaagaataaaattttttgagtctgttttcctgtactgtctttcaggcatagttaaaatatataaaaggtttgtcatggaaacatttttaaagcatgctttttcaaattaccgttcgcatattatcatatttattatctattttatgttaactgttgttgcatatactattatgcggcaaagtacaatagataatttcagaaatttgggcaatgaagttgcttcgttctataaaatggaagaagaaaaaagtttctcctattataaaacactgctgaaccatcttgcaaatttgattgaaaaagatgcggccatacttggcaaaaaagagcaaattgagaatattctgtctcttttgggaagttttactgccattgagagttttcacccatacgttgtgatggacggggaaattattaccggtaatgcagaagaatcttcttccaaaagcatcgatttatttgggtatgttaataggaaaaagatagaaaaccaatttgttatttctgatgtttatcttgataagtttagcaaagttccaaccattaccattgcccgctatttgaaaaatatgaaagatgccattgctgtggatttttctgtggcaagttatgtgtctccgattaaaaacacctttttgcctcccaacagcaattattatctttttggcgtaagcggcaatcttttttattatgacgatgaccttgggctggcaggcgaaggtatcagaagaaatgcgcaaattctttatgatatcgtcaccaataatggtgtgaacaaagaagatggtttgtccttttatgatgtgagagggcaggaaaaatttattttctttgacaggacaaaagataatttagttgttgtcgttaccattccctatacaatgctgctgtccaaattgaaccagttattgtatatagccattgcatttgtattttgtattggtttaatgacctttatgaatatctggtttacctacaacaataacaaaaaatatcttaacatacaggaaacattgacctttttgggaaatatctattacgcaattatccttattaatattgaaaaggaaacctattccattgtaaaaattccaaagcgccttgctgatcagttggaaaatggcaatgcgtattcacagttcctcgaagttgtcaaaaagaaaatggagcccaatgttgcagaaacttttgaacaggccttttcaatggacaatgtgcataagcttgcccgggaaggcattaaagagtttggcggtgaatttaaaaccaaagtggaagatcatgaagtctggatttctgtgcgtatcttccttgaccatgtggaaacaacacaaagcgcaattatttgcctgaaagaagtcaccaaggaaaaagaacaggaagtccgccagtatgaactcttgaaatcagctgttgaaaacgcaaagaaaagcgaaaagtcccgtaatgatttctttgcccgcatgtcccatgatatgcgtacccccctcaatggtattataggttttaccgaacttggcatgaaccatgcctttaccattgaagaaacaaaggaatatctcaataaaattaaattatccagtcaccagctgctggagctcattaactatatccttgaaatttcacgtattgaaaacggcaataccagtgatgtcaaaacaaagatgaatttgcgcgaagtgatcgagcattccgtgcagcctttccacagccttgccatgactgaaacgcgtaatttctcagtgcattatgatatccgcaatgagtttatttttgcgcctgcctttaaattcgtgcagattatcaataacctgttatccaacgcctttaaatattccaaaaagggcgactccattaccgtgtctgtttcacagctctacggcagcaccaatgagttcaaacaaaccaagtacttgtttgtttttgaagatactggtatcggtatgtccaaagaatttttggaaagaattttcattccttatcaacgggaaaccatgtttgcctcaaaagatattattggcaccggactgggtatggctattgtccagagcattgttaccggtctcaacggggaaatcaatatcagcagcgaactgggtaagggaacaaaaatttcaattgttattccttttaatgtggtcgataaagaagatatccccgttgaggaaaaagttcctgttgaaacgaatgatttggatttggcaggactcggtgttctgcttgttgaagataaccaaatcaatatggaaattgccacaaaactgcttatgtttaaaggcataaccgtggataaggcatacaatggcgaagaagctgttgagcatttcctgaagagtggcgaaaataaatatgatgttattcttatggacctgcaaatgccggtaatgaacggcttggaagctgcaaaggcaatcagagaatccgctcatccaaaagcaaaatccattccgattattgcggtttcagccaatacctttgctgaagatattgccaaaagcctgcaagtgggtatgaatgaccatatcagcaaaccgcttgatgtgcagaatttgtattatacgatttatacccacacacggggcaagagaaaaacatatctcaaatctaagtagtatgaataattttatataacgaaaaaggcaggaaactgcctttttttgtgcctgaaacaaggctttattttgcagaaatatcttccctgttgtttggctgcttttgcgggtaagaaataatacatcaaattgaggtgaaaattttaatgcctttttaaagggtgcattacgtataaaaatagtgtatactctcttttagcagataaatgcagcagacatgggggaaagcagatgaaaattctcgttaccggcggactgggatatattggttcacacactgtggttgaattattgcaaaaagatcatgaagtgattattttagacaatttatataattccagcctcgatattttagccagaattcataaaattacaggtaaaactccaaatttttatcagggaaatatgggggatgaagctttagtccaacgtattttttcagaaaatggtaaaattgactgctgcattcattttgctggattaaaagttattaatgaatcccttgaaaatcctcttggatattattccaataatatttcctgcacattgactctgctgaaagtcttaggcaaaaataattgccggaattttattttctcatccagtgcaagcgtgtatggcgatgccgcgcatgttcctgtttctgaagaaacgcctaaaggtgaatgctccaatccatacgcctggagtaaaagttttacagaacaaattttattcgatttataccagtcagataaaacatggaatattgttgtcctgagatatttcaatcctgttggtgcccatccctcacatttaattggagaaattcatcaatccacccccacgaatttaatgccctatattactcaggttgccttgggacaacgagaaaaactctttatttttggttctgactatccaaccagagacggaacaggagtaagagattttatccatgttgtggatttggcaaaggggcatattgcagctttaagagtatttaatacgcaaaacgcttcccccgcgtatcgtatatacaatcttggtacaggggaggggcattcagttcttgaaattgtgcagacttttgaacgggtcaacagcgtgaaaattccttatgcattggtcgaaagaagaccggcggatattgccgtgagctttgccgatgtcaataaagtatataatgaactgggctggaaaagtacattaaatcttgaggatatgtgcagagactcctatctgtttgcaaaagagtatctggagagtataaaataaaaggacagcctatgtgccgcctttagagcatttccctataaattcgtaatttttatttttcttgggggaaatgatttcccccaatccccctcatctcctgttatggatgttgtccataacagggaatcaatattcttgatattaacaggaaatgctctaaacaaaaagacttacagtgcgattactgtaagtccttgaaatatctggagccaactgcgagaattgaactcgcgacctactgattacgaatcagttgctctaccatctgagctaagttggcacaacaattttttactcaatgttttgctcttctgtcaagataaatttgcattcattttattttagtataatattctctaccggttatttccaagcagttaaaaattattttattctgatgagctaaatgagaaagtagttgtttccaaaatggaaactactgctttgacagacggggtgctgaaattaaagaaatttatgttttcttcaaaaaatgcttgactattccataatgaaaatatacaaatttcaaatacggatcattagctcaataggtagagcagctgactcttaatcagttggtttggtgttcaagtcaccaatggtccaccagtttttacagggacttatgaaaatgcgaaaaaatcataagtcctttttttattttaattcttccgtcctaataactgcaaagtggcaatgagttccggcgcagagacttcggggctgacgtaaagggctgttgggtttagataggttccgccgcggggattgaattctccgcgcacgcgcaagtattttggctccagaagggtaaccaaatcatttttgatagtattaacaatggtttccataaaggacttatgattgcgataagccactaaatacagtttcaagcttttggattcaacgcatttttggccgggaatataatcaatatgaatttttgcaaaatcgggctggccggttttagggcaaagggatgtaaattccgggtgctcaatttcgattaaataatcggtctcaaagagattgggaaaagtttccaaaatggcaacggaaggttcatccgttttatattctgttttaccagcgccaagcaaggtgagtttgctgacatcgtcttttgaagaagtagtattcattgtttatccttttaatattttttattgaagaaccaggaaagggtggggatgagcggcagagcaaataagctgcacacatattttacaagagcctgaccccataccgcgtcggaattccatgccacatggaaggcaaggggcacgaaaataagggagtccaaagggcaggaaaccaggttactgacaataacacgtgtttttaatgatttatgcttgagaatataaaacacagtccagtcaaccgtttcgctgccaataaaggcaagcatgctggcaagagcgacatctttattccaaaaataggtaatagttccggcaataatcatccaaatccagcatttttggtgagaccagtagcgctgtacaaagtcgcgaaaactgaatgtcagcccaatccagagcgcacccagcggaaaggtcagggagaaatagatcttttccgggtcaaaggcatttgccagagtcagtgtgcctataccaaaatagataacaaaaatgtttccaagagcaatactggataaatataaaatggcacttgaccatttttgccagggcgtgcctgacatggtttgtgaccattgcaagttctgttctgtgttttccattctatttcaatcagagagcgtttattttcagctcttctttttcgtttggagtctgttctcacgttaagattttattcttcttgaaatcctgcatcctcagcaaggtattcggaaccggcactagtgcgggcaagttcgtcgcagcgttcattttcagggtgtcctgcatggcccttaatccagtgaaaggtcacattatggtgactaagggcagtatccagcgctatccataaatcctgatttttgacaggctttttattggcagttttccagccgttctttttccagttttccagccagttttgtttgatagcttttgccacgtactgggaatcggtataaatattgacattgcaggcttctttgagtttgtttaaacctgtaataacgccgagcagttccatgcggttattggtggtgcgggcaaatccagcagtaagttcctgctttttgcctttaaattccaaaatagctccatagccgccttttcccggattaccaagacaggagccgtcagtataaagattgacgactttttcagctttaagggcatggtctaaaacgctttgttccggcatatctt

SEQ ID NO: 3600 - DNA, 23441 bp, synthetic construct
  source 1..23441: mol_type = other DNA
  misc_feature 1..23441: note = Synthetic
aagcacgaaaagaaaatattgcggcttttcctcacgcaaaatcttaaaaacggtttttcccacaatatgtatcgaaccggtaggaaaagaatcggaacgagccatacgctggttagcgaaaaagccccggaaaataaaagcgtttccgtccataacatagagaggttcttctttaaaacctaatttttcacgtagagccataatattgtccttttccgcacgatatgaaaaatgatagcaaaagaacacataaatttcaacatatgcgcagcaaggaaaatttttaaccggacagcggtttttaaaacaaaaaaacttctcagaaccgagaagtttcatcgtattttcacaagaacggacattattgcggcgacattattgcaacatcattgcatgaaaggaatgattttcgcccgctgaacaggtattttcgcagtttcgacatccacatcgggttctgcggcaaactggcaatgggggcatatccacttggtttttggagtaaattcatcttttttctgaacagccatacggatcaaatcaccgtttgcgtgatagcatttgggacagaacggaccttgcttctccccgccggaaataagccaataggcgtctccgtcaaaaatgatgtttcgcgaaatgcttaaaatttcttccaaatcatgaagctgcactttgagtttggaattttcctgcgcaagttccagatacagtttctgcaaagcgcgcagttcctcaacagcttcctgaacttttccctgtgaaattaaagtttcaacttcataaaagcgatagtattctatcatggcgctgacctttattgttaaactttgaaatagtaccaaattcatatcggcaggttcaagccggttctttagggctgcttttcattatggttccatgaaccgtaagggctctgcacaagcgaggcattaaaatattttgatattttgctgacttcctcgccgacccaagcgggcaattccacttcttcctcttccgactgcagttcaacctccgcaatgacaagccctgaattagccccgagaaattcatcgatttcccaaacatgcccgcattcagaaaacgtatacctatacttttcaatgatttcaacgggagcgagcgaatttaacaattcattggcatcatgcagggggatttcatattcaaattcatgtctggaaatgggaccgactttgacttttacggtgatcatgccttgattgccggcgacacggatacgcacagtcctgtccacagtccgtgctatatacccctgacggaataaaacaggttccgcttttccccgccagccgtcattcctcactaaaaatttccgctcaatctccctgtgcatattctgcgctcctgcgaaaaacatcattcttctttttcgtcttttttagcggcggcatcaatggacgctctgaactttcttgccttttcaacacgttcctgctgttttttctgacggatattcttcgccttatctatcatttcttttcttttccgttcaaaaataatcgttgttttcagcgatgccaaaccaagggacaacatcaaggtgacactgagcacaactttcatcaatgcccaaaaatttgttttgataataccctgcatatgccccatgcctatttccgccccgaaaaagacgctcacaaaaatacccactatgcctaacggcataaaaagcatgacaagctttacaaatgtgcgcatggttaaaaggaaaaacaaagtggtatcgcggaccatttgcaatgctttcaattttttctcaagctccgcgacctgtgcctcaagcgtcacaaggttctctttcgcctctttaaaaatcttaggattggtgaaatcggagccgaacgcccagtttaaaattttggcgcagctgttgaataactgattgaaattggtgagtgttttctgcaaggcgaaccagctcatttcgtcgcggataaattccagtttgaacaaacacttttcatacgcgtctttcatccgggtaatttcgccattaatggcttccataacttccgcttcaagagcaggtctttgcttgacgacatccaaaaaaagcaaatagttttttatttcgccgtatttgagcaaagtccgcactttcgccgcctgcttcgcaatgggattgtcatcgtccttgaaccagtcttttatgacggcatccaagtcttccaacgccgccttttccacaaaatatctgttataggcttccttccacatccgctgcaaagaggaaatcaaataaagctgcccgcggataagttccgggtcgaaaatgaccttatgaaaaaatgagggatttttattgatgacttcaagaagttccttggagaccttttccgtgaagccccgcttcatattgcagaccaaaccgcggtaatacgggtcttgccatgtcggcagcgtacgcatgatatgctgatacatctcaacagcttccccatagcgcccctgaatttcctttgcccgtgcgataaggaattttatccatgcctggtgcaaggttatggtgcaaagcttgtcagcgtccatccaaagctgcacagccttgtcaagatcccccctttccatgacgatgaaacccaaaaggcagtgaagctgccaatttttagggtcgttatgggcaagctggacacattcgcgttcaaaggcatggctgtcttgaggcgaacattttataaaacgctgcagcaagatatgcatggggtcggaagcgtggtcatgcggaaaatccggttccgcctcgatgtcgcggcttgttatccgccaaatacggcagatattgggtaattgaacaatatggttgatagcaaaaatagcttttaaaacctgtcccgccgtttcattttccgccatcatctcatcataggctttcacgccgtttcttgtgatccgcgtgtcaatttcacgaaatgcgctgttgatgtcggcaagattgatgtggctgagcttttcaaaataattcgcgcctgccggagcgatattccggctggggcagtgacggggaccatgattggacgccccgcagtaaaaacaaggcgtcttgttgggcacaaggctttcgggcaaaagcacggtgaaaggattggcttccgtgttttgcgttttgacaacaacggtgcacagcgtatccacgcttgttttcgcactggaatacaaaatgtccttaataatgaaatcttcgcccaaaataaaagcgttcttatagctcaaatacggaatatcggggcaaagatcggtccaatccacattgattctctgcggcagatcaggcgtaaagttgagattgttcttatcgacgacaacgttcaaacaaggccagtaggcatcggaatgctgttcatggataatttcataaatagacgcggttgtccgcatccattcgcgaaaaacaagcaaattatccaaaggaacgataagaaaattatcttctatggaatatttcagcttatgttcgcggataaattcctcaagatagcggaaaagggtttgccagccgcgctggaactgcttatcgaggggattgcccaaagggtgcacgaaagcgtaccagccttgttccacggaaaaaggcaggcgcctttcagccacaaccattttccagctgatatcgctttgctggtcaagcccctgcatttcgtaaacgctgatgccgggaatgcttgccgccatggaaccgtaactcggatgtatgtagatataacttcttgtgttcgctatttctgtttttaaatgccggtattccgcagcaacattgataaattttatttgattgacatcgacaatcaattgaccgggaaacgtgaacgccgtaatgcccacgctgaactgtttcccccaaaggtccaattttgccagactgttgactgcgacagccgcattgaagaaataccatatggattgattgacaagagtgacaatattcagaccgccggcctcaagcagaatatcggtcgctttttgcggacggttcgcctgtccccacacgatccaaacgcacacaccctcggatgtgagcatttcatcctgtatcacaggctggctgtctaaaatattgcgtatttctaacatacaactctcaacacattactcattacttgccatatcggactaaagcaaaaatttaatatattgaaaaagaaattaaaagcccgcagcgggcattaatttataaaggacaaggtccgtaattctcctgataacgggctctgtaactttcaatatcaaaagaatgctcctgcgttccatatttttcgatacaaaaagcggagcagacgctgcccatttttataccggtttcaacatcaaagcccatggttaagcctttcagcaggcctgcgcgcaaggaatcgcctgcgcccgtggggtcgaccaatcctttgatcttcggagcaggcacggcaatatccgcctttcctttttgggaaataaggcagccgccctcgccaagggttgaaaccacatagtttgcacggctgagaagctcgtctttggataaacccgtgcgttcagaaataagggctatttcataatcattgccgataagaatttcagccccgtcaatgcctgcaatatgattttccttgcttacagcgggaatttgctgacccggatcgtaaatatacgggatacctttttctttgaaaagctttggaaatttgcccatatcttcggcgtttccgggggaaacgataccataatcgcctgctttggcaacgttcagcctgtctgcgtcacaaggagtgttcatggcggcggggcaaaaacagttgatcaaattgcctttggaatcggcaaccgcatgacagcaagccgtcaattccttttcaagcgttcgcacaccgtcaagattgatttgcagggcttgcagcttcttttcatatgaggctgcgaaatcatagcctacacacgtataaatatgcggtttttcttgaagcatggcaaggttatatgcgatattcgccgctgttccgccttgtttttcctcaattctgtcaataagcataagaatgctcaacgtattgaatttatctttcaaaagcagatcgttgatgtcgcccttataggataaaattctgtcaaacgccaccgaacccatgatatggatactcatgcccgcctccctttatttcgtattcgtttttatccagtgaaaaaaatccttgctgccgccggcaagttccaaagaaactatacaaggaattttataactatgcaatgttttcacccattcttcgatttttgcggaattttctttcacgctttgcatgacaagggcgtattcctctccctcgcaaatttccccctcccaccaataaaggctttctatcggaaagatgttcgctcccgcaatgcagttctcctgcagcagtttacgggcgattttttttgcctcttcctttgttttcgttgttatgtaatataatcggggcataaatttttcctttgcttttctgctgcgatagagtaaaattctttttggaagaacaaagagcctgcgaggtattttatgctgaactattcaaaaattcaagatattatgcaagacattaaaaacaataccgccatagacttacgtatcgacaacgcccaaatcgccgatgttttcagcggaacgttttttcatggctccgtttgcgtccataaaggaattattgtcgggttcagcgaagacatgtacgcaaaaaaagttttggacgctgaaaaagcctatcttctgcctgcgttttttgatgcccatgttcatattgaatcttcaatgctttgtccggaaaaatttgcggagctggtcattcctttcggaacaggaaccgttatcgccgaccctcatgaaatagccaatgtcaagggaacagacggcatacgctatatgcttgaaagcgcaaggcaaagccttttggatgtgaaaatcatgctcccctcctgcgtgcccgccctgccctttgaatgttccggcgcaaacctttccgccctcgaccttgcggaactcatcacggaagaaaacgtcctcggtcttggcgaaatgatgaatgttcccggtgtgctcatgcaggatgaaagcgtccttgaaaaacttgaactggcatataaaaacggcaggattatcgacggacacgccccgcaggtgcacggaaaagaccttgacatgtatgttctttccggggtgagcaccgaccatgaatgcaccacggcggaagaagccgcggaaaggatacgccgcggcatgtacgtgcttctccgcgagggttccgccgcccacgatttggtaaatcttctgcccgccgtaaacagccataccattcagaactgccttttctgcacggacgacaagcaatgtatcgacatcatgcgcagggggcatatcaacaattccgtcagcctcgccattgaacacggtatcgcccccatcgacgccgtccgcatggcgaccataaacacggcaagagcttacggaatacggcacaaaggagccatagccccgggcatggaggcgagtttcatgctggtgaaagacatgaaaaaatgcatgccccatgccgtttacatccaaggcagactggctgccgaaaacggaaagtatatcgccgcaggcagcaagaaatacaatgcgaagctggagcagctgaccgacaatatgcaggacagcatgcatgcggaactgcccaaggttctgacattgcatattccttcaaaaaaagcccgtgtcatacgccttttaccccattctttgctcacagcctgcgaaatcgcggacatcgccgttgacgcggacggcaattttgatttcagccgaaacaaaggcatgctcaagcttgccgttgtggaacgccacaaaaaaacaggaaaattcggtttgggacttctgcatggcgaatacggactgaaaaacggagccatcgccacaagcatttcccacgacagccataatattgtcgccgcaggcgataacgatgaggatttgcgcatagctcttgaggaaatcgaaaaaatgggcggcggaatcgcaatgatcagccaaggaaaaattttgacgaagctggctttgcccattgggggacttatgagcatgcaagaacccgaaatcgttgcaacggcgttgaaacatctttataatctcgccaaagaccactatcagatttgggataaggcagacgcgttcatgtctttaagtttccttgcgctgcccgttattcctgacttgaaacttaccccgcaagggcttttcgacgtcacaacattccaatttgtcagccttgacgcggaagaatgaaagcccacggcaaaaagctgacaaaacaatttttaaagcagtatcccggagcatttctttctaatatcaagaattaacgatacaaaatttaaaccttcaaaggaaagcttttccaaaggttttcccctgccctttcaaaacgttttaatagcacaataacctattgataagattaaataataaaaaatccgttatagattttgtccataacgggtttacgttcagaaagatttgggggagcggcagccgtcagcgggtttgcgagctttacggacagcggcagagctataattcccccaaaaaataaaaagtgatgatccagagcctaaaaaaatttatgaatgttatgcaaaactgcgttggtgcggttccgtttgacattagcgaacgttccacacagcaggcttaaacacgaacaatacagggttacccgtattttcagcgaaaaaccttattcaataccaatactccccgccgattgcggaaaaattcaggcaaaaaccgtaactatcctttccggcataaaatgaggattggatacatgtatccaatcctcacaaacaaacctcacggcagattttgcccatagcccgaacgctattttcaaaaaacaacactcaagcgcaagcaacgtttttattttttcttgccttttttaatttcctttatcctttcttcaagcacgcgtttataggtgcgcagaatttcaaggcgggcataaagcttattctcgccgggaatgatgaaccaaggcgcctgcacggtatttgtgcgtaaaaacatttcattggcggcaattttgtattgatccgctttttccctgttacgccagtcttcttccgtgattttgtgccgtttccattctattgcttccctttccttgaaacggcgcagctgctcatccaaagaaatatgcagccagaattttatcagaatatttttcttattgataagctcgttttcaaaagcgttgatttcggaaaacgcccgcttgcattcccattggctcgcaaatccttcgacacgttccacaagaacgcgtccgtaccaagacctgtcgtaaatcgtcacaaaaccggcacgcggcacatggcgccaaaaacgccataaatagtgatgagcggcttcctcgcttccgggggctgaaatcggaataacctgcgtgatacgggaatcgatggactgcgtcaggcggcgtatggctcctcccttgccgcttgcgtcatacccttcaaaaacaatggtcgaggaaatgccaagctcataagctttataggtaagcttataaatatctttctgtaatttttccagctctttttcatattcatctttcggcacggacaagcttaaatccacttggtcaagcacggaaataccggaaagcgcctccatgttgtccggcatggacggaaattcttccacaactgtttttttcacgtccaaagcattttcaatgcattttgaaatggcttccacagccttgatattgcggaatttctcatcatacgcgtcaatgatgtaccatggggcgaaatgtttatcggtcagcggcagcatttttcccacgacactgttcagattttcaaagttttcattgctttgttcatcataggtcgaaaagccgatctcgcctttgttattgagtttttttctggctttcatgcgtttcttgtgttcgtcggcggtgatgtggaaccaaagctttacgatgacatatcccgattgcgccaaagtacgctcaaactccacacggtcgtgcatgatttcgttaaattccgtttccgtgatttcttttgcggcgagcttacgcatcggctcgtcatacatacccgcgataaacacggcaaattcaccggctttaggaattttcatccaatatttccaggcttccggacgaagtctttcttcgtcaaaagaaaaccagaaactataatttttaaggtgcttcacatcacaccattcggacaataaattcacaaaagaaccttttcccgtgccgctcacgccgtcaacataaataatcacaggaactttttgcgtcatgcactgctgctgcaaattaaaaagcttaatacgcgcatctctcgcaagtgctttgtactccttttgagtgtaagactggcaaaaattcatagttgataacatggtatcgccctttgctgaaaataaaaaatgttgaaaataaaaatatcgaggtgtaaaaacacgctcccccgcaacatgaaaagtatcccgcactgttttttgcgccatctcatatttcaaagaataaaacccaaaacaaaaagcatatgaaaacggcaaactcattcaaaaacaagcgttcaaaaaacaccgccgaaaaagcctttcattccgcatgcccgtgcatgcaaaacaaaaagtctttcctaaaaaatactatccttacctttatttttgtcgaaaacgcattcattgtcaagcaggctgataaaaaaatcaataactatccataaaaaaaacgcataaataaaaatctgcgataataccccgcagcaatccgccgaaaatcataaaaatacccaaaaccataaaaaaagaaagccccctcggggactttctaaattttacatgtaatttctaaaaaaaattacatttgttttattgcctatctgatttaatcctgctaaaatcaatcagacaacttcttataacaagaaaacagatacaaagcaaggaaaatttatggcattacgatatatcttaggcatagatttaggtatcagttccattggcacagcccttatcaaaatagctccggaagcaaaagatttaaacgacatcaactcctatgaaaaaatattggatgcaggcgtacgtatctgttcttgcccggagggtgcggaaaaacgccgtattttacgttcccagcgcaagagcaaaaaacacagaaaagcccgtaaaaaacagctgatacaattactgcaggaatacaatttactgcccaaagagcggtccgcccttgagctcggtttgcgttcagctccctatgccttgcgggcaaaagccatgcaggagcctttaaactccgcccatgaacttggcttttgcatcatgcataccgccaaacttcgcggagcgggctttattgaagaaacagacgaagaagaaaaatcagagaagagcctcaaccgctatcaactcttagagcaagctctgaacaaagaaaaaacaaccctttccgaatatatttacaagcatttgcaagaaaacggctgcatacgccaacgcaaagaatttattgcggataaagtgcctttttctgtaccccgctaccttgtaaagcgggattactgtgacttgatgagcaggcaagccccgcatttcaacatttctgacgaacaaatcaaaaaaatttatgactgcatttttatggatttcccaagggcgccttatgccaacgccccttgttccctgcttcccgaaaccggcggcagactgcctaaaatgcacaggctcgcggaacagctgcgaatctatcagcaatgcaacaacatacgctataaaaccgaaaattccacccaaaaactcaccaaagaaatgcgggataaactggctgcaatgctcatgcagggtgaaagcctgaataaaacccttatcaaaaaaacgctccaaacctacacgaatgaaaaaatcctcagtatcaatgtttatgccgaagacgaagaaataaaagcagtcaagccctttgcccatatcaaagcttttgccgatattcccgcattttggcgcttaccggaagaagaacaggacagtcttatggaatttattgcagaccctgtcaatcccaaggcgaaccccgctaagcccgtgctttacgacgaagaggattttttgcatatctgcatggaaaaattgaatttatctgaaatcgaagatgaaagaaaactttatgcctgcctcaacagcctgccaaaagacagaaccatgctgggcaaagaagcaagcagacaaattttggaaaaacttatcgaaggttatgaagaaaatggaatttggcaggctcccacctattacgaagctgtcaaagcctgcggcttcacccgggaaaaccaagagcaaaagcgttatgacgaactcccctattacggagaaattctgcacgatgaaattttgcccatacacccatggcatttggaaagaacggcaaaagaagaaaaaatcggacgcatagccaatcctgtcgtccattccatactcaatcagctgcgtaaagttatcaacgaaatcatcagattatacggcaaaccggaaatgataaaactggaagtcgcccgtgatttcggaatgtcgaaaaaaaagcgtgacaaattggaaaaacaacgccttgccaatgaaaaatacaataaaatcattgacgaggaactcctgaaaaacggctatgcggtcacggacaaaaaccgcaaaaaatataaactgttaaaagaacaaggctataaagatatttatacgcaggcgaacctcagaatttcagacctcaatgcttatgaaatcgaccatatcattccgcagaccgcaggagggaccaattctttctgcaatcttgtgctgacaacggttaacaatgtaaaaagcgatacgtttgcctatgattttatccgacaaaattttgcggaccgtgaagaggcaatcaaaaaacacttggaaacactgcctgaaaacaaagcttggcgtttcaccgccgaagcaaaagaccgcttcattcttttaggggacgaaaaagacgaagattatgccgacagacgcctgcaagattcccgttacatggcaaaagcggctttgcggtatttacactgtatttgccccgatattttggcaatccgcggcggcatgaccgcaaagctccgccatttgtggggctttgacggcatggagttcgaactcatgggactggatattcccagatacctcaccaataacgaaacaggcgaggtatattgcgatgaaaacggcgagttatccaaaaacagcgactgggaaaaaaagccccgcatcgaccacagacaccacgccattgacgccatggtgctttgcgccgtcacccgttccctcgcccttaaaatgtacaaagcaagaaaacagggcaaagaaatagacgaaagcattatcaacatgccgttccggctttcccctaaaaatccggaccataaaagcttccgcgaacttgttttggaaacgctcaaggaaatcagaatttcccacaaagtggagcacgataccaatacgcagctccataatgacacagccatccgaattttagattatgacgagaaaaaaggactccatacggcaacctatatgcgttctttgggaaatatcgacagtttcggcaaactggaaaaaatcgctgttgcagaaaatttgggcacaagccctgaggtgcaaaaaatccgcaaacgatgcgcggaaatcataaaagcggtcaatgcccaaaaatttgcggcggaacaaagccttatggaaaaaaatgccgaaaaccgcctgcaaggccttaaagaaacagccatgacagaacaaaaccttgtgcaggaagccatacgtcttgcccatgtcggaaaaaaatatcctgtggggaaaaaattcacccttgtcaatatccgggaaaaacagcaatgcggctatgaaccggacagcaaccaccatgttgatttttatgttcataccgaaggcaaacaaaaaggaaaaatcggctgggaatgcataaaaagcattgacgccgccaatccgaactttaaacccggctggcggcaagaaaacgcaaagcttatttggagcgtctgcaaagacgatattttggaactgcgtttcacagagcagcagcttcaagaatacaatgttccaaaagcgtttgtcagcaaaatcagcaaacacggacagcaggaatataccatgcttgccaaaattttgaaattcagtcccggcatacttgtttttgtttccatatacgatgcaagaacgggaacaaaaaacgccctcaaagaacatcctgaaaactttctcctttggacaagcggtggtttagggctaaactcctactgtgagctgcaagcccgcaaggtcagcctcagcccctttggaaaaataaacggcaaacataaaaaattatggaatggcaagaaaatataaatacatacaaaagcccaccgagtatacgatcatgtggatattggtcatgttcgatttgccggtgctgacaaaaacacaaatgcgaaaggcgacgcaattcagaaacaatttgctcgaactcggctttatccgaaagcaattctctgtttatctgcgcccgtgcgaaaacatggcggctgcggaacgcatggcggaaaaagtgggactttgccttttggaggagggtgaagtttccgtctttttcatcacggacagacagtacgggctgacaagaaactttttcggaaaaaagaaaaagagaaatgaacaacaagaatttcaagccatgcagcagttactgctcttttaaatgcggaaattccaaaagaacctctttggcgcaataacttttataaattccctgtgcggctttcaacacaagaggcaaaagagtgctttcttctttctgcagataaaacgggttctgcaaaattgaggataaaaaacgctttgcttgcgtatccagaacaagcacttcatttttttgcacatattcataaaccaaacaatcgacaaaaggacggaatggctccataatgtcatccgcaaggcaaaacgcattgaattggttatggtgatgaacgccaaaaagcggcaaaagcccgcttgcgcataaagcccttgcacaaaccgcccgcacaacggcatagccataattcaaaaaagagttgattccctcttcttccacatcgcggagaaatcctctcccaaataaagcctgccaataaatttgagccgcctgtccctctttattgtccttatccccggaacgcaccctttgcgctaagaattttaacttctcaacatgcttttttacagcgctgtcatggggcaaaacacatttttccaatgcctcggcttgattacggattttttcaatcactattttctgccatatctgtttttttattacctcgcctgcccgcacctgctcctgcgcaacaattaaatgccgataatgcgagctcacaggcaaagccatggacacgggcaaataattgcttcccataataagcacaggaatattcgcctctcccatgctcattaaaaaagtcttgctcaccgtcaccccttgtgccgtaagcatcacacaagcaagcatatcaagaggtatacgcgctattattttttcctgctcttttacgcaaacattcccgtgagcgattgaaagataacgattattttccgcaatttctaaaatatgacttgccatagccctctcccaaaaataaaaaaactcaaaaaacaggagaaaaaatcccttgctttttgagtttttaatagcatatccccttgaaaaagtaaatattttcaagggaatatcttagcagattttagcaggattaaatcagacaggcaagtaaaactataactctgggcagtgcacatttattcttattttagcaggattaaatcagacaggcaagtaaaacttggaacacaaacagtatcggattttcgcaattttagcaggattaaatcagacaggcaagtaaaaccgccatctttgagggatggtttggagaggaattttagcaggattaaatcagacaggcaagtaaaactattttttgaaacactatacaaaaccattaattttagcaggattaaatcagacaggcaagtaaaactcgtaaattcacggtttctgctctcaatttattttagcaggattaaatcagacaggcaagtaaaacataatagcttcccaaaaagacattttaggcattttagcaggattaaatcagacaggcaagtaaaacatatcaatttaacgattgtaaagtctttttattttagcaggattaaatcagacaggcaagtaaaactccacgggatgtctaattgttgaaccccatattttagcaggattaaatcagacaggcaagtaaaacatggagttccgtcttggtcgtcaaaattttattttagcaggattaaatcagacaggcaagtaaaacgataactatatgcttcattttcatttttagattttagcaggattaaatcagacaggcaagtaaaacattgtgttggttatgcaacgtctaggcataattttagcaggattaaatcagacaggcaagtaaaactatagcgtctattgtacgttcatccctcacattttagcaggattaaatcagacaggcaagtaaaacgggatgttcccaaaatggtcgtatgtggcgattttagcaggattaaatcagacaaacaagcaaaaaaagccaaacgattttacggcgcacaatcccggcaaaacatccggcaaaaagcgttaagacttagcgccattttgcatggacttcataatactggcgtttgcggttgaacatcatttcatcggcaagctgcacgcattcgtcaatcttgccgtcgtcgcaataccgttcgccataggacatgtcgtatttatccttatttttttccaaatcgtttttaaacgtgacaaactgttcctcaaacgcttctttcgagatattccgcagcaaaacaagaaactcgtcgccgccgatacggtaaacgttttttccgaaataacgctggatgaaattagcggaattaataataaattcgtcacctttatcatgtccgtacacgtcattgatttttttcaagccgttcaaatcaatataaataacgcctgcgcaatcgccgcggcgcttgatgtcttcgtgcacggcaatatatttgttcctgttgtaaacgcctgtcaattcatcaatattgcttaaataatcaagatgttggatgagttttctctgttccagattgttgacgatgaacattgcgatggttccgagtatttgtgaagcggaaacattatagcgggggttgtcgacacctatgagtccgatcagttcgccgccgtcataaatgggcatgaacagcatctcacggatattcctttccttgaaagcttccgccaattcgggcattcctgcgaaatccacatcgacatccttatggtagacgacagattcctcggtaaacatattaagccattcctgtaaaagaacgccgctcgcttccgataaaatgtccttgaacgctttcacgaaaggacgcacaaaaaaatacgagcctttcaacacgtttgtttccttattatattcaaacagataagagcggtccgcttcaaaaaaatcaaccacattttccaatatcttattgatagcgaggtcgatatcgtcatgcttgcaaagggttccggcacatttcaccaaaagctgttccgtggaaaccttgttttccagttccgtcatattgttttggtattcgctgaaatccatgccgtattccaaacggaagcgcctgccgtgccactccacgatggaagcctgggattcaaattgccggtccagaacataattatgcgtattccactgatagaccgcgtctttttttaacatatgatttatacagaaatcgcagggacttgactgcccctgcaaaacttcataacattttttggtcagataagaagattcagaaatattgagcaaatttctgaaaaatttattgatataaatcaattcatacgtgtcaacatcagccaagtaggcaatcccgttgaacttatccattaaaacttttgaaaagcccgaaccaaatctctctaatttgcacatcgcatatcccaaaatttttatatcagttctttctaaattatcctgcataattgtcaagcaatattttattttttgctgcaattaaataaacggttacacgttccaaaaaaatacttgccaaataaaaatttcatatatatatatatatataacattactccaaaaggttccctatgcattcatcgtccaaacaaatattgctgtcttaccgttcacacatcatcatgctcatcatatacagcattatcacttttttcggctatgttctggtccgtacaaaccttattaacaatttcacaaaaatcggcaaggaagttgcgaatttttacgcaatggaagaagaaaaaagcttttccatttacaaagcgcttcttaaccgcatatcacttttaattgataatacctccggacttcccgacaaagaaggctggatggaagacatattcacaaaagtaagcataagcgagtttgaccaaaatctgaagctttacgccgttattgatgataaattcatcacaggcagagggtgggaacatttcaaagaccccgattaccaaaatgcggaatggtaccaaaaagcggcgtccgccccgaacgaaatcatttttaccgatgtgtatattgacaactttacccatcttcccactatcaccattgcaaaatcgatggaaaattccaacgacgtaatagctcttgatatttccgccgaaaattacacccctcccgcaaaaagctcattcctcccccacaacagcaactattatctttacggggtcaacggaaaccttttctattacgaaaatgatctgggactggacaccagcgaaatagcagaacatgcggaagacatttacaccaagataaaaaatcaaacgctcacgacagaccgttacatcatcgacccgcacggaataaagaaactcgtcttttacgcaaaaaccaacgataacttactcgtcatcgtcaccattccccatgatacgcttctgcatgaactcaaccaattgctcgccgtcactcttttaatcatattcatcttgttcctgatcacgttcatcaatatttatttcgcatacaaaacaaacaagaaatatgagaacatcacgaaaaccataacgttcctgggcaatatttattatgcgattttccttgtagacaccgcccaaggcacattcataaccataaaataccctgaagatttaattaatgatttcagcaagtcaaacgattataacgacttgatcaatattacaaaaaaggctatggaagaagatgttgcggtggaattcagcaattcgttctcgcttgaaaacatcctcaaagtggcggaagaaggaacggacgaattcggcggagaattcaaacgtatcctcggcaatgattttgaatggatttccatccgcatgttccttgaacatatcagggacaacaacaccgccattctttgcttcaaaaaaatcacacaggaaaaggaagtgcaggtgcgtcaatacgaactgctcacttccgcggtggataacgccaaaaagagcgaaaaagcacgcaccgactttttcgcccgcatgtcccacgatatgcgcacgcctttaaacggtatcatcggctataccgaacttggcatcaaccactccacgacgatggaagaaacaaaagactaccttaataaaatcaagctttccagccaccagcttcttgagcttgtgaactatattttagagctttcccgcattgaaaaaggaaatgtcgacgaaacgaaaacaaaaatcaatatccgcgaaatcatcacccattgcgctcagcctttccattcactcgctcttacggaaatcaggaaattttccgtgcagttcgacatacagaatgaatacatactcgcccctgcgttcaaactcattcaaattctcaacaaccttttgtccaacgcgttcaaatattccaacaaaggagacaatatctccgttctgctcaaacagctgcaatccaaaaaggaagaccagaagcaaatcaaatatcagcttattgtcaaagacacgggcagaggcatgaccagggaatttttggaaaaaatcttcattccttatcagcgcgaaaccatgttcggagccaaggatattctcggcacagggcttggcatgcccatagtccagaatatcgtcacaagcttaaacggtgaaatcaatatcgacagcgaactcaatgtgggtacgaaagtttccgttgtcattccttttgatatttcggaagaagtaaccgcccccaaagacatggtaaaaatcaatgcgaacgaaatcaatttggaaggcgttaccgttcttcttgtcgaagacaacaaagtgaatatggaaatcgcccaaaagctgctcacattcaaaggcatgacagttgaaaaggcatggaacggcgaagaagccgtcgaagcgttcatccattccgaagaaaaccacttcgacataatccttatggacttgcaaatgccgaaactcaatggtttggaagcagccgtgcaaatcaggcactccaatcatccaaacgctaaaaccgttcctattgtcgccgtttcagcaaacgcctttacagaggacatagcaagaagcctgcaagccggcatgaacgaccatatcagcaaacctcttgatattgcgacgctttatcaaaccatttacacccacacgaacggcaaaaagaaaaaatagtttttgcggctccttgccaaaaccgataaataaaaacaataaaaattccgtaaaaaagggcagattttctgcccttttttattcattcagcacgcattgacattgccccggcgcagtcatacgcgaacatttattctttgaccgaacatgaaaattaaaccccataaacacaaacaatatgataagagccattaacttttcttatcaagcggcaaaagccaagtaactgaaaactgctgttcacccgtggaacacaaaaacattttttccataaagcgcaatgcaaaatcaaacgcaaaaaatgcaatgcctgaatacggcaaataaaaaaagttgacatgcggtatgcccgtgaaccgaatacggcatacccccgtcaccccccggcaaaaacaagaacaatgttaaaatttaattgtacggggcacaggattcggctgtcttacatacaatatgcctcttttagttgtacttgctgaacatattgaaatatacaaagaaaaacaaccagctatctgaaataattcgccgtttcacctgcttactttttatgcaaaaacggcaaaaaaaaagaaagtttttcccctttccctgattatctccggacaaaagaatagaccatacgtcaaaaattcattacgctaacttttaaattccaaaatgaatttcgtgccttttcccggttcgctttcaagcttaatctgaatatcatgaagcatggcggaatatttcacaatgctcaagcccagaccggaaccgctgattttgctgttatggcttttatccacacggtaaaaacgctcgaaaatccgttcctgatgctgctcgtcaatgccgattccggtatcttcgataatgattttattcgccagcatgacgtttccgagccaaattttcaccgccccatgttccttattgtattttatcgcgttttcgcaaagattgtacagcatttcatccaaaatgtaccgaaaaccgaaaatacggacatgttcgccgcagagttcgatatgcacgtttttttcaagggcgaacgggttcagcctgctgcaaatttccaaaagcaaaggatacagctcaacctcttccttatgcaaagcgagtttttcctcgtccagctttgaaataaacatgattttatcgataagcacaatcaaccgctgcgcttcatgataaattcgccctgcaaaattttcaatatccgctttctgcacaatgccgtctttaataagctccgcatagccggaaatcgaagtaaggggagttttcagctcatgggaaacattggcggaaaattctttgcgtatggtgtcgattttttctttctcgatattgtgtttttcaatgctgaccaaaagaggcgttatttcatcgtaattttttctttccaaaggattggtcagattaatttggttgataggcacaatgattttgcccactaaaatttttgccagcatataggcgatgatgaacataatgcacgcagtgcccaaaataacgggcaaaatccgcaaagcgattatccacaccgtatcgaactttttcgcaacacgcaaaatgttatcatccaccatttcggcatagtaaaacattttcgtcccaagcgtttcggaagttctgacatcctcgcctatttcgcctatgagggctttctgcacttccgggcgcagaaaatgattttcaaaatccatgcccgtattggaatcgtaaagaacattgcccgccttatcgataatgctgatacgcgtattggaaagcactatgtcgatggtatgcaaaaatccgctgcctatgcttgcgagaagccgttttatgtactgggcttcttggcgcacctcatgaatgctcatgttcacggtctgacggtaaacaatatacgtgaacgtgctgtaactgatgagcaaagtcacaacaatcagcagcagcattcctttatgtattttggtttgcagtttcatatcatttgcttattttatagcctattccgcgtatcgtttctattttgtttccgttttctccgagtttttggcgaagggttttgatgtgggcgtcaaccgtccttgtttccccgtaaaaattcacaccccaaacttcctcaagcaggatattgcgggaaatcacgcattcggggttggatataagttttttcaacaattcaaattccttagaggtaaggaccaccaattctccgctgcttctcgcttcatgtttttccaagtcaagaacaatatccccgaaacttaagacatgttcccgttctttctgccctgcgcgcctgagcaccgctttgaccctcgccacaagctccatgatgctgaaaggtttggtgatataatcgtcagcgcctaagtccaaacctttgactttatcgcattccgcacctttggcggtcaataagataatgggaatatgctttgttttgggattatccttcaactttgtcagaatttccaagccgtccaaatccggaagcatgatatcgagcaaaatcaatttcggaaaaacattcttttccaaggcttgaaaaagttcctttccgtccgcaagcccgcaagcttcaaaacctatcgcctgcatggaatacgtgatcaattcccgaatattgtattcatcttccacacaaaaaatcatgcattatcccttattgacagtatggctatacttgcctgcaagagccgccccgcagtttcggctgcgcggcagccaatgctcaagatattttgcaacagtgattaaatcaacagataattttcccgttccgcaatatttttatccgtgacattccgtcagtgatataacagcgcattctctgcacaattcacgcaatgaccgcgcatggtattctgatttttcacatcagcaatcaagccttatgctattcgaccaagcttggcagccacaaggaaagcgtagggaacatcactatgatgatcacagccacgatattgatggcgacaagcggcaacgccttgacggaaatggcttccaaactttcgtttgaaataccggaagcgacgaacatgttctcaccaagaggcggcgtcgcgaaaccgattgcgcagcagcaaatcagtacgataccgaaatggatagggtcaacgccgaacgctgtcataagcggcaagagaaccggcgttacaagcatgatgatagcaagcgtttccatgaacattccgaggaataagaggaacacgaccaccatagcccaaaccagataggcgttgtccgtgaaattgagcatccaatcggcaatgaaaataggcaggcggtatgcagtcaaaagatagccgaaagcggttgcggtgaacaccaaaacaagcacacggcccgtgagccatgaagttgttttcaaagagttcatgaacgctttgaacgtcagttccttatgaatgaacacgccgacaatcaccgtatacacaatggcgacaacggcggcttccgtcggtgtgaacgtaccggcgtaaataccgcccagaatgatgaccggagccataatggaccaaaagccttctcttgtcgcctgccttaatgcggcacgagaccaggcgagcccttcggttttaagattacggcaaagaagataatgggctatgctcaaagacagggcgatacaaattccgggaataatgcccgcca

SEQ ID NO: 3601 - DNA, 21824 bp, synthetic construct
  source 1..21824: mol_type = other DNA
  misc_feature 1..21824: note = Synthetic
tcctattaagacgatgacgccacatccttgtttttcgatgacatgcatcgcttgggacagcacatagtcgttatccccacgcaaacaatcgaggaggtcatagagcccccgatagcgatgcacacgcacaggcaatccctcctttccgagacggttgtcatctttcaccaacgccatatgctcgctcttctccccatagccacccatatagacatgcaacgtccatgaagaaccagagcgggtgcgaaatgtctcccgatggatggatgtcaccaatgtctcaaaacgcaaacgccatgcaatcaatcgggctatggtcgtgatacgtaaatcatggcgacgagcaaaaagggctaaatcctttccctttgccatcgtgccatcatcgttcatgatctcacaaatcacgccacaaggagaaaaacccgctatgcgcgcaaggtcgacggcggcttccgtgtgtcccgccctgacaaggacgcctccttcacgcgccacaagaggaaagacatgccccggactgacaatgtcatccttgcccttaagggagtcgatggcaacagcgatcgtccttgccctatcggcagcggaaatccctgtcgtgataccctcctttgcctcaatagacacggtgaaggctgtctgatgacgagagcgattcacagcggacatcaaaggcaatcccaacgcatcgacgcgcttcttctcaagcgccaaacatatgagccctcgcccataacgcgccatgaaattgatggcgtcggcatcagccttctgccccggcatcagcaaatccccttcattctccctatgttcgtcatccgtcacaatgaccatatgccccccttgtaacgcacggatgatctcctcaatgggcgctacgggaagggaagagacatcttgtgccatcacacgcatccccgtatctccccaagagcattcacaagataacgcgccatcatatctgcctcgatatgcaccttgtcgcccgcatgtaatcttgccaatgtcgtctgctgtaacgtgtgcggtatcaccatgagagcaatactcttctcctctttatgaacctccaccaccgtcaatgacacaccatcaaccgccacagagcctctcgccaccatcaacggcatcaaagaaccatctagcgcaacaacaatacgcaaacacgccgactgcttatccacagagcgaatcatgcccacaccatccacatgcccataggtgatatgcccccctatggggtcacccatacgcaaagaaggttctacatgaatcctatgtccttcctgccaagactcgacacgacttttagacaaagtctctggtgacgccataacacgaaaccacgatgcccctcccttctccccactctctaccaccgtcatacaaatgccatggcatgcaaccgatgcccccgatgccaaatcgcctaagggaagacggcacgtcacggtgatgtccatgcatgcgcccctcccataagagcgcgaggacaccataccaatatccctaatgataccactaaacacgatgatagcactccatgctgtgagcgccaagggtcacagagcgtgataaaacatactcccgtaacattgcctcaccgccccaccccgcatatccctcctcccccagcatatggtcgccacgaaagagaatgatgtcatccacataaccacaccgcacaaaagaagagaagagcataccgcctccctccaacaataagtgtgtcacccctctttctgccaaagtggacagaatatcttgaaccgccacatgatggggaggcgcaacatcatagggaagagccataagaacacaccccttatctttccacgcatgccccttttccttgatggcgcgttcttccgccataatccataggggcgtctcatgggcatggcgcacaagcgctgaatcctgtgagagcgtcaaccgcctatcaaggatgacacgcgcaagatgacagcgttcgccatgactgacaccttctaaacgacaatcgagacgcggcctatcgacacgccatgtgttcgcccccaccaacacggcatcacacgtcagacgtaacatatgcccataacgcaacgcctcacgattgctgataagtgtcctctcccctcgcttgcgggcagtcatgccatcacgagacaaagccaattttgcggtcacatagggacgcccatgacgattcctcatcacatagccacgatagaggcgttgtgcctcctcttccatgacaccacacgtcacatggatgcccgcatcccgtaacagagcgatagacgccccccgcatacgctcatcacaatcctccatcgccacgacaacacgcctgacacatgcgcgtataatcatatcggtgcaaggcggcgtctccccctcatgacaacatggctcgagggtcacatagagtgtgccaccttccgcccgtttccccgcatggcgcaaaagacgcgcctccgcatggggacgcccgccaagggcggtgacatcaacggcaatgcacgtcccgcccttatccacaagaaccgcccccacacatggattaggccagcaacgacccgtgtgacaccatgccacatggagcgccgctgccatcatctgtctatctttaggaagagtctcgttcacgctttttctctaaatccatgacggtcttgcgaaaatcactgatggctgtgaaatctaagtagacagaggcaaaacgcacataggcaacatggtccaatgaccgcaacatgtccatgacatacccacctatcaccttgctcggtacgggattatcgcctaaacgttccaattgcctttggatagtgctcaccatgtcctctagctgttcttcgtcaatggggcgcttacggcatgcgatggcgatggaacgataaagtttctctctatcaaactcttggcgtgtcccgtctctcttctctatctgtagaggacgtagctggacacgctcgaaggtcgtaaagctgccggacaataacggcgtctccgtatgacatgcccttgctcgctggtacgtgaatccttgacacgggtaccctcaaaagagcaaaagggacaacgcatcagtcatcctacaagacatgcgggtaaatgggcgggtaaatggggtagcgggcacagaggtctttgacacgttggagagtctctttttcgacggcggcatgagcatcaggagacgaagaacgcaccaaactatcaagcacatcgcctatcatcgcacccaccagacggaatgcctcgccgtcaaaacctcgactggtggcagccggcgtgcctaaacggatacccgatgtgacaaaaggcttttcagggtcaaaaggcacgccattcttattacacgtcatgcccgcccgttctagactcgcctccaccacgtttcccgtcagctttttcggacgtaaatcaacgagcatgaggtgcgtgtccgttcctcctgtgataatatgcacgcccctctcctccatcaccgatgcgagggtgcgcgcgttctctacaacgtccttcatataggccttgtatgactcccctaatgcctcaccaaaggcaacagcttttgccgcaatgacgtgcatcaacggacctccctgtagtcccggaaagacagcggaattaatctttttagcaatgtcttcgtgattggtgagaataatgcctcctcttggcccacgcaatgtcttgtgagtcgtggaagtgaccacatgggcatggggtaaagggtcgggatgtaagccacatgcgacaagtccagcaaaatgtgccatgtccaccagaagataagcgccaacagtatcggcaatggcacgaaaacgctcgaaatcaatgggacgcgaataggctgagccgccagcaataagcaacgcgggtttgtgctccttggcaagagcctctatcgcatcataatcgataaggtgagtcttctcatcgacgccataggaaacggccttgaaccattttccagacgcattaggcggtgcgccatgggtcaagtgcccccccgccgccaatgacatccccataatgacatcgcctggacgaatcaacgccaaaaacaccgcttgatttgcctgcgagcccgaatggggttgcacattggcatagcgacagccaaacagctgacagacacgctcgatagccatcgtctcgagctcgtctacatgctcacagccaccataataacgcctccccgaatacccttccgcatatttgttcgtgagtaacgtcccctgggcatccatcacagcctgcgatacaatgttctcagacgcaatcagttctatctgttcactctgacgcctatgctctttactgatggccccgaacacaggagcatcagagtcctttaaccgttgctgaaaaaaagtctgtgtcatgcgtctctcctatcataaaatgttacatgcgtagcgagtcgatggagtcgatacgttcacaatgacgcccgccctcaaaggcttgggtgagaaattcgtgtaagcacgcctttgccacatcaacaccaaccagacgcgcccccagcgtgatgatattggcatcgttatgttgtcgcgccaaacgcgcgtccatcatagcatgacaacacacagcacgcacacctttatagcgattcgctgtcatgcacatgccgataccactgccacagaggagaacaccccgccatgccttgccaagagcaacatgagacgccactttgtgagcataatgcgcatagttgctggaacgatgaggcgactcgacccccatatccaccacatgataccctccacccgagagcataggccataatgccgactttaacggatagcccgcatggtcacatcccaccgccacaatggcacccccttgtatccctgtatcacccatcatcggtttcaccctttcatctcaccatctttgccgtcaagacatatatatggcctatcttgagtctatatatggcataagacgtgtaaaacactagaataaaccatgtcccttgcgtaaaaaagaggtaaaccttgacaggatgacgatggcacaagaccgagaccttttcccccaattcactatcggacaaacggcatcacgcgacaataccgtcgagcgacagcatatagagcaatttgcccgcgtcagtggcgaccataaccctctccatacccatgaggattttgcaaaaaagacacgcttcaagggcattatcgcccacggcatgctcacagcgtcctttatctctgctgttatcggcaatgacttaccgggggcgggatgtgtctatgtcagtcaaagtctctctttcaaagcccccgtgcgtatcggtgacacggtgaagagcctcgtgacgatcacccatatcgacgagaaaaaacgccttctccgtctccatacccaatgctcggtcgagaaccatgtcgtcctcgatggcactgccgtcatctatatcccgtagtataacacacatatatatatgtcatgtcctcattgactcttgtgagagatattgacacgctccccccgactctcaaagggggggttgtcgtcatgggcaattttgatggcatgcatcgaggacatcaagccctcttacacaaagccagtgctttagcgcgcgccacgtcatgtccgctcatcatgctgacatttgaaccccatccgcgccaattattcaacaaaacagaaccctctttccgcctcatgcccctgacagcgaagatagcgtgcctacagcaattcaacgccacctgtggtcttgccctcaaagccgtcattgccttgcgttttacccatcgtttagcgtccatgcgcgcacaagacttcatccaatcgattctctgtcatgcattacgcacaacccatgtcttcacaggaagagactttcgatttggcaagcaacgtcttggcgaccgccatatgctcgctgcgtgccatgcgttttcctatcatgccatcgatatcgtcaccatgtctgatgacgagacgcgcgtctcctcctccctcttacgcgcatggattgcggcaggggatgtcgaacgggcgactccctttctccaccgcccatggacatggcgtggccatgtgatacggggagcacaaagaggccgtaagattggctttcccacagcgaatatgcgtccgcctcgccatagtcttcaacccccctacggggtctatatcgtcaagacgcgcgttccctctctccaaccagaaggatggttgcctgccatcgccaatatcggcatgcgcccgacgttccaagggaccatgcctctcctagaaacgcatatccttgatgacaccgtggcggcatcacttcctcccctttacggacatatcatgtatacgtcctttatctctttcttacgccaagagcgcgcctttccatcgcctcatgcgttgcaacagcgcttacaaaaggattgtgaacaagcacgccttttctggtatcatcatgccgagtctctctgacacacctacggtatgatggcacaaaaacactcgttccacctttttctgccgcgcacatccttccccatgaaggctcaattgccgaaaacagaaccgcacaggctcaaacgttggcagaagagtcctgtgacacgttccccctcacccacagcacagcgttttaccctccatgatgggccaccctatgccaacggacatctccatatggggcatgcgctcaataagattctgaaagacatcgtcaaccgacaaaaacaacaggatggattttttacccattttgtcccggggtgggattgccacgggttgcccatcgagtggaaagtagaagaagagctgaaaaaacaagggattgataaaagcgcgctcgacatattgacatttcgacgacactgccgtgcctatgcccaaaagtggatagacatccaaaaagaagaatttcagcgtcttggtgtccaaggcgattgggctcacgcctatcacactatgtcgccaaaaaatgaggctgctattgcccgtgaattcgcgtcctttgtcctcaatggctatgtctatcgagggacacgccctgtcatgtggtcggtggtagagcaaacggctctttctgatgcggaaatagactataaggaacatcgctccaccacagcgacggtgcgctttcccattcaccatgcgcccttcaacgccctgatgggtacgtccgccatcatctggacgacaacgccttggactctgccagcaaaccgcgccattgcctatggcgataccatcgattacagcgtgatagaagtcgataaggttggcgagaacagcctcgcctcgccgggggagcgcctcctcctcgcccaaaggcgtatcagcgccatcacccagcatgcccatatcaccgattaccacgtcctcctcaccatcaagggagaagccttgcgtggcgccatcgcccatcatcccttagcctcatgtggttatccctttcccgtgcctatgcttgccgccaattttgtggatacagagacaggaacggggcttgtccatatcgccccgagtcatggcgatgacgactttcagctcagtacacagcacgggatagaagcgcctgagacggttctccgtgatggcacatatgctccttccattccgctctttgcgggacagcatgtcttcaaggcggacaagcctatcatggagtcgctccgtgaacatcacgcgctcttgatacaaggcacgctccgccacagctatccccactcttggcggtcggggaagcctcttatttttcgcgtcacgccccaatggttcatcaacatggaacatcacgggttgcgagaaaaagccatccgcgccattaaggaggacatcacatggtatccccctactggtcaagcgcgtatcctctctatggtctcccaacgccctgattggtgtgtctcacgccaacgtctttggggtgttcctctatgcctctttacccataaggacacgggggatctcttgtgcgacgcccacgttacagagcgtatcttaaaggcgatggaaaaagacggtgctgattgctggtttgatggcgacccacgccgatttatagcgccagactatgacccacaagaatacgactatgaaaacgacatcctcgacgtatggttcgactcaggggcaacccatgcctatgccctcaccccccatacccaccaatggccggcggatttgtatctagaggggtcagaccaacatcgcgggtggtttcaatcatccctcttggaagggtgcgggacaagaggcaaagcgccctataaaaatgtcctcacccacggctttgtcctcgaccaaaaagggtataaaatgtcaaaatccgctggtgatgccctctcgccacaaaagattatagaccgttttggcgctgatgtgttgaggctatgggttgccatgtccgattcgagcacagacctacgtataggcgagtccatcatccaaagccacgtggacaactatcgtcgcctacgccattgttttcgctttattcttggcactctaggacaccacaccatcaataaacaaccatggacaacattaccggccatcgagcgtttcatcctccatcaattggcccatctagaggctctccataaagagctgtgctctcgctatcgccttgcctccttttatacccaattgcaccatttctgtacgaccgatatatcggccttctattttgacatacgcaaggattgcctctattgcgacccgtgggactcaccgaagcgccatgcggccttgcaaacgctggacatcctcttcctctgtttgcaacgctggctctcacccgtcctctgtttcacatgcgatgaagcatgggaagcttactgtcagcaacagggaaaaccctatgatcatgcgcacaacaacatcatgccccatgccgaccccgcatggcatgacacgacactagaaacaacatggaagcatatacgcaccatacggcgcgtcatcacccatgccctagaacgagcccgtgaatccaaccttttaggctcgagtctagaggcagacgtgtcggtttttctcgacaaggattttgccgatgtagagagcctcaaaaccctacaggctgttgattgggcggaaatcgccatcgtctcatcctgttgcctcacgctcacccacgagcagaaggatgggtatcgcatggaggatgtcgcaggcgtctctgtcgtcgtacgccgccatcgtggcgtcaaatgccctcgttgttggcaatatatcacagtcgataagggcaacaccctcccccacggcctatgcccacgctgtgtgctggcagaggaaaaaaatcgacccttcttcacatcacaagcccaaaagcgtgccatgccatgatgacccctctgacacacagacgctatggcgcgattcatggcgtgatagcactaggcatagcggggggagtcgtggtggcagactatatcagcaaagtccttattctcgagacattccttccccgtcccttcatggcgatagacgtctttccccatgtcgactttgtcttcgtcttaaatcggggtgtgagttttggcatgctggcacaatgggcgattcccccgtgggcgttgggcgcttttgcgtggggggcagccttgggactcatcctgtgggcagccatgcaacggcacaaacccttcgtctatgccctcgccatgatcgctggcggcgcgtttggcaacggcatggatagattcctctatggcgctgtcgttgacttcatcgatgtcaccttatggggagggtatcactggccagcctttaacattgccgacaccgctatcacatgcggcgcgctcctgttcgtcatccacgacatacgtatgcgtcacaccaaacactaatgcgcgccgcccgaaggggcggcgcgcatagactccagggaccagagcaatgtcggatggagcgccgtacggaggccccgaagggatgctcatgcctcacttatcatagcaaccattcaacataattttgcaattattggttgttcccacacggaagctaaggtatgagtatagtaacaatccaacagaacgtcaaggattatttcaaggcagatagacccatgttacgcattctagggttagacatcggcattgcctctataggctttgccctcatcgagatggaggaaaagggaggagagacaggcgcaattctctgttgcaattcccatatcttttccaaggcagaacaaccgaaaacgggagagtcgctcgctgccccacggcggctggcgcgtatcacacgccgccgcctctctcggcgcagccaacggatagagcagttacgccgcctcctacaagagcatggctggactgatttaggcatgtatgacgacaagatcacagagccagagaggtcaaagataaacccgtgggcattacgggtgaaagggctgagccaacctctcgagaaaggcgagcttgccaccgtcttaggccatctctgtaaatatcgaggcttccgctccaccgctaaagccagtgaagaagagaaagccctcaaagaagagagcaaaaagaagagcaaggaagggaaaagcgaagatgacgaagagcgtcataagatgctggaagcaacagcagcattgttcaaggagctcgaaaagcacggcatcacctatgggcaatatattgcgcgcaaaatggaggaaggggagaaaaaaggtggagagagaatacgcaacacgacaggcaattaccaccatacgcccttacgcgaaaaaatgattttggtggagctcaagaaaatatggacggcgcaaaaagaaacattcaacaaccatgccctcacggatgacctctataggaaagtccatgcgctcatatgggagcaacgccccatcaaaggcgttagcaagatggtcgggccatgtgtgttttacccaaaggaaaagcgcgccgcaaaacatgcgccctccgccgaggaattcgtggcatggtcgtccatgaacaatcataagatacgccaagatgatggtggcgagagagacatcaccctcgatgaacgtcttgccctctatgaaaaagccatcacctcgaagagtggcattgtcacatacgcccaagcgcgcagaatactcgatatggaggaaaatgaccaattcaacctcttgaactacaggcagaaacccaagcgcaaaaagaaggacgagaaaaaaggacaagaggaggtggaaggcgtcgaagactttcaaacgaccgtcaaacgtcttgaggaaaagccccttgtgtctctgaagggaacggtcacgatgcgcgccctcttcgagacgcatgcgccctcattatggcacaaggtgcacgaagaagacccgcaagcgttggataccatcgccagcatcctcgccttcgaaaaagatgaagcgaaaagagaagacaaactcaaaaaacagccatgtcttgcagaccaatccagccttgtgcaagctctcggtgaagagattgatgatttcacgggcaccatcaatctctcaggcaaggcatgccgtgaactcatcccccgtctgagggagggactgacatacaaagaggcatgcgaggaagcaggcatgacagaagcccacaagaagcgcgacaagaccgatgatggcaagcgcataccgccctttgaccccacccgcaatcccgtggtggacagagcattggcggaaacacgcaaagtcatccatgccatcgtgcggtgctattgcgacaacaagatcagcaatatcgacagaatccatatcgagctagcgcgggacatccatagcgccaaagaacgccgtgagatcgagatacaaaacagaaaaaacgaagcgcgtaacaaacaagccagggaaaaagcagaggaaatcttcggccctttacatgagaacgacccacgtatttacaaatatcgactatgggacgaacagcaacgccgttgcctttattcaggggacacgatcagcggagaagacctcaagaatgaagggagaaccgagatagaccatgcccttcctctcagtcagtccttcgataacagccattcgaataaggtgctgtgctttaccaaagcaaatcaagacaagggtaacaggacaccctatgaatggcttggcggggaagacgacagcgaagaatggcaaaaatttacccacctcgtgtcgagatgtgtgaaagcaggcctgatgtcaatacataagaagaaaaaattgctgacaaagcacgtggatagggatggctggctagagcgttccctcaataacacccgctatatggcgcgcgttctgtctcaacatcttcgggactatctccccagacgagaaggcaataaagacagggtgcaggtgaggaagggttaccacacatccttattgcgtcaaagatgggggctcaattttgataaaaaggacaaacaaacagacaagaaacaacgggatgacaaccgccatcacgccatagatgcccttgttgtcgccgcctccacccaatctatggtgcaaagagtagcagaatggaagcgccgcgcaagaaaagacgacccgttacgtttcgcgcatcccccgtggcctcgtttccgtgaggatacgaaggcacaacgtgaaaaaatgttggtccatcatcgcccagaacgcaaatatacaggcgaaatccatgaggaaaccataaaatccatacgccacgacaaggagagcggcaccacctatacggtagagagacgccctctccataaattgacggagaaaagcctcaagcatatcgttggggtgcgtatggaaggtgataaggtgaagggacataacgcatggctctacgaactgctgaaggaacgcttggaggctcatagagaccctacaacgaaaaaggttgacctcaaaaaggctttcggcgaccccaaaaatcccctctacctacagaagaagaatggcagtcaagggcccatcatccgttccgtacgcctacgtaccgatgaaaagacgtggattcccgtacggcgaggtaaaggagacaacatcaaagaaggggccgctcaacatggggcgatggtgcgagtcgatgtgtatcatggcaaggacgaaggctatcgcctctgtcccgtctatctgtgggacgtcacgcaaggacagctccccacaaaactcattatcaacggtaaagaggaaaaagattgggacagcatcgacccccaaaaacacacattccttttctccctccattccagagatttcgtccgcatcaccaagaaaacaggggaggtcgtgcagggctactattgcggcacagatagagctacgggagttatcgcccttcttgaccccaaggcgagcacacagacgacaacaaagggcgatgaccaaactgtttatagggttggtgtcaaaaccctgctgcggatacaaaaattccatgtggattactttggtaacatggtagaggagaaggagagagaggggaagaagcctcgtgacttagcgtgacgtggcgcgtcgtcagccttagtcagcgggcatatctgtccgtcaaccatcgccaattgcgtatcgccctcaaaaacacggaaggggaggaggaggacatccaccatgtgcctatggaggacatcctcgccgttgttttagacacgccccaagtcaccatgtcatccgctatgttaggggacatggcgcgaatgggggcagtggttgtaacaagcgaccccacccatatgccgaatggcatgttgctccccttccaccagcattcccgccaagccgccatggcgtggcaacaacatgcatggtcagcagcctttcgcaaacgctgttggcagaccattatccgcgccaaaatcacgaaccaaagccatgtcctgcaacgtttgggcatcaaagaccatgaacgtttaaaaaggatggtgtcccatgtgctgtcaggggacaaggaaaaccatgaagcacaagcagcgcgcctctattggcgagtattgtttcccgatggctttcgccgtcacggcacgtgcagtttgaacggattattgaattacgcctatgctattatgcgggcgttggtggcgcgcgcattggtagcccatggctttctgcccgcctttggcttacatcatcgcaataaattgaatgcctttaatcttgccgatgatatgttggaagtgctgcgtcccttctgtgacatccttgcctaccaccataaggttgacacatggcatggacatgtgcctgagaccctcagccgtgaggataggcatgccgccctctccatcaccacacaacaatatctgttggcgggacagctctattctttggcagagaccatcgagcgtatggtggaaagtttgcaaaaggcgagtcgcctcaagactgctgatgccctccacatgcccgccttcgccttatgaacaagagggatgacgtatgccacacccccctatatttccgtgtatggtgtatttatgtcgtcatatgtgccatgatatgacgtgacggacgatgagcattcgcggagatcaattcatgtggttattggtcatgttcgacttgcctgtgaaaacaaagcaagagcgtaagcatgcgacacaattccgccaatttctcttgcgtgatggttatatgatgctacagtggtcgaactatgtgcggatatgtaacggattggagcgaagccagaagcacatcgagcgtctcaaagcccatgtgccgcccaaagggtcggtgcgcctccttcacatcacagaccgccaatatggacgcatgcagattctgttgggaacaacgcgagaaaaaagacaggaacgccatgagaaaaggggacatcaactcgttttattttgagcaatgtccccattttccctgtgctatcaaccccttaccaccctctagtatagcacagccgtgtgggaatggaagctatgacgcgggctacgagcgctataagcatactaagagtatagcacagccgtgtgggaatggaagctatgacaagtgtaccgcttctgtgtgttgccgtcatagtatagcacagccgtgtgggaatggaagctatgaccaagcccccgatagtaagcatataacgatgagtatagcacagccgtgtgggaatggaagctatgacttgcattcacgtaaaaaatgcatatgatatacacagaacatgacaaccacccatgaagacccatagaccgatgaccaaacacgcatactaccctcacccatataccttgatcgccatcatctgcaccgccttcatcgtccagggatgtggtaaagatatgcgtcaagctgtcggactcgataagccagaaatcgaaaacaccattaaacgcgtccctcccctcacgatacccccagaatacaccctcaaagcgcctagaagcggtaatccaccatcacaagaacaaatcgaggcttatgaaaaatatcaaacgcgcaaaatacaggacatcaaaaagaagcgacaagacgaacaacgctcccaacaatgacatggcgacacacaaacgtcacacaaaaaaaccctctggttgccttacaagactcacatcttgcacatccacgcgcgcccttatgggcttttatcgtcttttcctcttcacttgcctcatgataatcccttacacgcccctcaaagcctctcccacaatgtcaggatttggcgcacaacaatggacgcttcataacggcatggatgtcgttgtcatccccaacaagagaagccccgtcatcgcccatatggtctggtataaaataggcgctgccgacgaaccagatggaaaatcagggatcgcccatttcttcgaacatctcatgttcaaaggaacgaaaaacctcgaaccaggggaattctctaaaattgtcgcccgcaacggaggacgcgataacgccttcacatcacaggattacaccgcctactttcaaacaatcccaaaaaatatgctggataccgtcatgaaaatggaagccgaacgcatgcatcaactcattcttaccgacgacacagtctatcccgaacgcgacgttatccttgaggaacgcaagcaacgagtcgataatgaccccacatccatcctcgatgaagccgtcgatgccgccctctaccctaaccatccctacagcgaccctatcataggatgggaacatgaaattcagcgcctcactacagacgatgccctcgccttctaccgacaacattatcaaccccataatgctatcctcgttatcagtggcgatacatccatagaagaagtcaaaaccctcgccgaaaaacattatggcgctgttccaagtgtgaaaaagacaccctcacccgccatacgcccacgtagtgtctcgccgccccaaaggacagagcaacgtatctctctcaaagacccacgtgttatgcaagaaaaatggcaacgcctatggaaaatgcccagcatgaacctcgatagcgaacgcttacctgaagaagtctacgaccttcttgccgaagtcctagggggaggaagcacgtctttcctctacacacgcttagtgcgcgaacaaaagcatgccgttgccgtctccgcctatttctctcacgccctcgactatgatcatttctctattgtcgccattcccgccgccaatgtctccctcgacacactagaggacgccatctcccaagccctcgatgatttcctcacaacccccctcgacacacaacaggtcaaacgcatcaaaaatgcctatcttgcacaaacactctttgaccgcgatagtctgatgggacccgctatgatcatgggacacgccctcgtccttggacataccatcgatgacgtggaaacatatccacggaaagtctctaacgtcacagaaaaagagctcatgcgcgccgctcagagcctcttctcaggcgaacataaagccctcactgcatggctagaaaaagaagacaaacccccaaacacgccatgacacgccaccgccccataacctcctttttgcttcgtttcctcctcactgccttctttatgctctctccgacccacgacacacacgccaaagacagcggtatccacatccaagacgtcacaagtgagaaaggcgtcaccgcatggcttatccaagacgatcacctccccattgtgtccatccaattcgccattgaggggggaagcgccttcgacccccaaggaaaaaagggacttacatccctcacgatggatatgctacgggaaggcgccggagacctcccaagtaaagcctttcaagaggcgctagaagaacacaatatctctctgtctttctggacatccaaagatagaatcgggggaagcatgaaaatgctcaagaaagacatggaaaaagggctggaactcctcacgctggcaacaacacagccacgattcgatgcagacgccatcgaacgactgaaaaaagaacgcctcgcctccattcgcctacgccgagaagaccccgcaaccgtcgcccacgagcaatggcaacgtgtcgcttttccaaaccatccctatgggacaccatccattggtgaagaagaggatattgcgcgactcacaaggaacgatatacgctcttttttcacagaagccttcaatcaagaaaccctccttatctctgtggcaggggacatcacacaggaagaactcgcacccatccttgatggactcttcgcccattggactccccatgccgtcaggcgtctcgccgaccttcccgaagcgacattgccagcgccaacactccatgtcgtggaacgccctatcccgcaaacggtggtcgcctttgggaaaaaaggcatgccacgtcaccatcccgattattatgcctattacctcctcaactacatccttggcggtggcagctttagcgcacgtttgatggacgaaatacgggaaaaacgcggactcgcctatagcgtttatacgtctctatgggatagccacgccattcccttgctccgtggcgcccttgccacctccaacgaacatgtgcaaacaagcctcgatatccttaaagcggaaacacagcgtatcgccaacgaacccatcacccaagaagaattggatggcgctaaaacctatgtcatccatagcctctaccttaaccttgtgcgcacctcgtcccttgcgcgctttgcccttaacctgcaaatgacgggtatcggtaaggattatccgcaaaaaagagagcaactctttcatgccgtcacaagagaggatattcagcgcgtggcgcgctccatcctccatgacgatgcgtggcttatcacagccgtaggacagccagtcttgcgtcagtgaactgccgccgctgacatctctaccctagaagcaacacataaagagcaacgccacagagcatgcctatggcaacgctcagcaagagtggagtcaagcgataagctggcgtcacacgatgggaaggggaacgattcctcctctgcatgccttgtgccaatgcctctatggtctcaggatgaagttttatgccgtcccgtccaacagactctatatccttcgcccacgccataagacgtcccgggacgtcatcacgccatagggataaacgatgcgccatgcgctcgacccttttcccaatgcgccctctgtccttctgccatttctcaatgagaggacgcaccaatgcccacatattcaccgaaggacacatggcgcgcgtcacgccttccaccaacaacaagcccttttgcatcatcatcaggggaggttgaatcgccatctcgaattctgtcgccacagaaaataaatgcgctaacaaatcactgatgacaatagagtccaatgacttgccaacgatctgctcacccaccacacgcaacgccgccacgaaggcatcctccgattgctccagaggcacccaacccgccataaaatgtaatctcgccacgcgacgatagtccttctctaggaaggcgcggaaaatttccgctaaataatggcggttgcgcatatctaaacgccccgtgataccaaaatcgagcaagacgatacgcttcttgctatccactaagacattgcccggatgaaggtcggcatggaatagcccatgaataaagagctggtgaaaaaaaccttctacatacgtcttcgccaatgtctccatagaaagccctgaggcctgcacaaattgatgattgtcaatacgcaccccctcaatacgctccatcgtcaacacccgacgcgatgtcctcgtccaatcaatctcgggaatataaaaacgcttatcatcagccataaaacccttaatatcgcacgccatcgatgcctcgatacgtaaatccatctctcgccgcacaatctcttccaatgtttccacagcttgcggcaaacataagcgccttatcaccagatgacgtttgtccagccatgccgctagccaacgaaaaagagcaaaatcttttgcaaaaatagcctccacatcgggacgaatcaccttaacagccacatgcttgccatcggttgtgaccgccgcatggacttgggcaatggacgctgccgccataggcttctcttcgatatgggcatagagctcacgccatggcctgccaaattctgtctcgatgctctggagcgcccgcttggtggaaaaaggaggaagattgtcctgcaacgccatgagctcttccgccatatcacgcccgatgatgtccgcccgagtcgccaataattgtcccaatttgataaaacccgggcctaaacgagtcaaggctgtggcgatacgcttgcctcgaaccttgcctcccgacgtaggaaaacggccacgccttgacaccatcgacatctttgtgggaagcaatctcacgatgtccacaataaaggcgctgtcgtgccaagcaaaaatccaacacatacgcaacaaacgcccccatcgacttatgaacgttgcctttgtcacgtagacctgccaccatctaaagagaccatcgccctattcctccttccacccttcatagagatgaacaacgcccatccccatgggacaagccgttgccctgacaaaacctacctcttccatagacgccctgacacacgctggcgagtcaaagcgctcgatgctctcggctaaataacgataggcagcctcacgccccgccacaagacgccccatcgctggcacatgacgaaagacataccaacgataaacatcctcgagacacgcagcgcgcacagcgctcaactctaaggccaacaattgccctcccttcttgagacaacgatatatctcacgcaacacgtcccgataatccgccatattacgcaaaccaaaccctatggtcacacaatgaaaatactcacgcctaaaaggaagggcatcagcagacgcattaacccacgtcacagacctgtgacgagaagacgccttcttgtatccctcatgtaacatagcaatattcacatcacataacgtgacatgacggccatcaccagcacgcgccacacgcattcctatgtcgccatcaccgcatgcaaggtccagcacatgaagaggggacggggggataggggacgataggcggatacgcccgcataatatggtcttccatatcctgtgcatgcctagcgccatgacgtcattcatgaggccataacgatgggctacgtcagaaaacacgctatcaacgagagatggcttctcctccttcgtaacgtcgcgaaagccaaagggaacaagagacggggacatcatggcatgaacggcaaaacagaggcgctggcatagaggttataaaaagaacaaggcgcatgggacggacatggcatgggctctatgtgccatccgcgcaccacacacttttgccttgccttctctcttcctccatagtaaaaagctgaaggacattttgcaaagggcttttatcagggcgcgtagctcagcgggagagcactacgttgacatcgtaggggtcgctggttcaatcccagccgtgcccaccatcgcctgttgtcctcctgacgtcaccgacgacagccatggcaggtcataaccgaacgtttctaactctacggcataattctttttcacctttgctatcccctctggaaaaccctcgaaacatgcgcgcgccgtgagctgtggcggacgtacacctcccttcgcccgtgtccccttgaatatatcatagatattctcggctagtcctaacctgcgtgaaagcgctgtgaggtcctcctcgaaatgctcgaaacgaatcataacatcaacggcatcataggggcgctcgagtgtcaatgttgcatagggcgcatacagagtcttttggcacataaaccaatttctaaagtcagagactgagcgctcttgaacactcctcgacctacaacgccaagcatagtcactgacagctctatcatacgggttgcgggtcacagagattttgagaaaagagaagaaagtatcatcccccatgtacttccgagccggtatcggtgaatttatcttaaccttgcgtactgccccatttgtcaccacatctaagaaggaacgcacaggatacgggtagtgacgctcccttaacgtattgcttctaggaaatgcaaacctgctcatgatgtcatccttgccacaaaaatgggagagagcaatctctaaacttgtccccgccaccttctcactcttaaagaaaatgaatctgtgtttgaaagaaataatcgtcatacccgttgctcttcctcagcagagagccccccagagagcccctcagacaaccatggtaggtcataaccgaacgtttctaactctatggcataggtcttttttatcttttctataccctctggaaaaccctcgaaacacgcacgcgctgtcagactcttcgggcgcacagcgcccttctctcgtatccccttgaatgtgtcatagatattctcgg

SEQ ID NO: 3602 - DNA, 23297 bp, synthetic construct
  source 1..23297: mol_type = other DNA
  misc_feature 1..23297: note = Synthetic
atggaggttccggttcacaggccagatcggttgtggagggctgtaatgcagatgttgtcacactggcacttgagcatgacattgacctcatatcagcaaatggcctgatagattcaggctggatagatgaatttgacaagggctcggcgccgtacacatccacgatcgtctttctggttagaaagggaaatgacaagaacatacaggactggaacgatctggtgaaggacgatgtggaagtcataacacctgatccgaagagcagcggtggtgcctgttggaatttccttgcggcacttgcgtatgcgagggagacgtacagtgatgaaaatgatatatggcagttcatgaagaagctttatcagaatgtgtcggtcatggattcgggagccagaggttcgacgaccacatttgtggagaatggcaagggtgatgtgcttatagcctgggagaatgaggcgatagcaaccctgaaggaatatccggaggattacgagatagttaatccgtcggtgagtatactggctcagccgagtgtggcggttgtcgatgacaacgcaaagctgggtggaacagaggaggtcagcacagagtatctgaagtacctgtacagcgatgacgctcagaggcttgaggctgagagcggctatcgcccgacaaatgagaagatacttgcagagtatgcagacgtatttgatctggacatcaagcagtggaccatagatgatttcggaggctggaacaaagcctatgaggatttcttcgacgacggagcaaagtttgatgaaatttacgattattaaaatggattggaagacgagatggcagcagaggaaaatggcaagaaggacaaactgaataatgcaaagaagaccagagttatcccgggatatcatctgacgcttggaatagtcattgccatgctgtcgctgatagttctgatcccgttggcatcggtgctggtgtcatcgctgaagctttcgccgggtgaattctggcatctgcttctgaagaagaacgtgctgaatgcatttaagaccagcatcggctgttcgttcatagcggcgatagtcaacacggtgtttggtctgataatagcgtggacactggtcaaatacgattttcccggcaagaagatactggacggattcatagagcttccgttctgtctgccaacggcggttgccggtatcacactgtcgagactttacagtgaggatggattccttggaaagccgcttgcggctcttggaatagatgttgcatacacaaagatcggacttaccatcgcccttgtatttgtggggataccatttgtcataagggcggtgcagccgatacttgagaagatggacaaccagtacgaggaggcggcctacatgctgggagccacaccgagaagaacattcttcatggtcatacttccagagctcagaccggcactgctgaccggattcggattagcatttgccagaggaatcggagagtatggcagtgtcatctacatatcgggcaacagcgcaaaggagcagacgcaggtcatatcatacgtgatcatgcagaagctcagctacatagactatgccagcgcaacagccatagcactggtgatgctggtaatatcatttgtactgctttttgcgatcaacatagtacagcttagacagtccagaagaacaaatttattataacttttcataaggaggggcccgcgttaagcgggaggaatccttgtgaagcacgcagacgccgcgcgaagcgcattttaatgcgtctgctcaataaggaggagacacggaaaatgagcgagcaggaaaagctgcagcgcggcaagcgtaggacaaagataatactgataaccgtgacggtgcttttcatagtgctcatgcttgttgttccacttatatcggtgataacaagtgcgctgaaggagggctttaagttctacctgcagtccatcacgacagagtacgtgataagcgcgcttggagtcacacttattgccacagtcatagctgtggtggtaaacacatttttcggaatatgtgcggcatggctgctgacaaagttctccttcaaaggcaagcaggtgctggcaacattgatagacattccgttttccatatcacctgtcatcgtaggtcttgcctacctcatgacatttggaagactcggatggacgtatccggcgatcagatggatcaatgatatgctggggacaaacatcaggataacatttgcagttccgggcgttgtgcttgctaccatattcgtgacattcccatttgtgtcaagggagcttatcccggtgctgaacgcgcagggtaaggacgaggaggaggctgcggcgctcatgggagcgaaaggcttcacgatattcagaaggataacacttccccagatgaaatggggactcatatacggaataattctctgtaccgccagagcactcggcgagttcggtgcggtaaatgcactgtccaagacaaggggcgggacatttacacttccacttgagattgatgcgctgtacatgtcgggaacggaggaatccatcacagcagcatttgctgtatcgtccatactggtgatcatagcggtcataatattgttcctgagaaatctgcttgagtacagagcgaagaggaaacgcgcttatgaacgaagttcataactctcatgcgcgtgacgacctgccgctgagcggaggcgagggggcgatacccgaaaaagggcgatatccgataagggcgaagtgagatagtctgcatatgggatggcttgcaggagtttcgaaagatagatcaggtgcggaagaataagagaacaaaaaggaggctgacgacatgtacgtcgagatgaaaaatatatataagaaatatggagattccctggcgtccaacaatgtcagctttggtgtggagaagggcaagctggtggcgcttctgggaccgtcgggaagcggaaaaacgacacttctccgaatgatagccggacttgaaaatccaaattccggtgacatatacatagacggcaggcgtgtaaatgatataccagctgcgaagagaggaataggatttgtattccagaattatgcactgttccgttacatgacggtatttgacaatgtggcatttggacttgaactcatgaaggttccaaagaaggagatcaagaagagagttatggagcttctggagcttacagggctgtcaggtatggagaagagatatccgaatcagctctcaggcggacaacggcagagagtggcatttgccagggcgctggcaccgaatccacaggtgttgctgctggacgagccatttgccgcgatagatgcaaaggtcaggacggagcttagaacctggctcaaggagatggttgaaaagcttggcataacgagcatatttgtcacccacgatcaggatgaggctgtggaggttgcggatgagatcatcatcaccaaccacggacagatagagcagatgggatcgccgatggagatatacaagacaccgtccacaccgtttgtggcacagttcatcggaaggtcaactgttgtggaggactacgagaagctcaagggttttgacagggtgccgggagcggacagggcggtcatcagaccggagttcgtcaagatatccaagagcggcaggctggatcagtaccagagtgcggcggagtcggggatagtcaaggatgtgctgttccgcggaagccatctggacgtcacggtggatgtcaacggagtggagatcgtcgccgagagatccatggagaaggatgtcgtaaagccgggggagcaggtccacgttctcatctacaggctgtatgtatttgatgagaatcagacatatctgctggagaacaaggcaatgcaggataacgatgtattctacatctaattataaaagtgattggagagaaaatatgggtattgcaaacaggaaaatacttcatacggacattttgataatcggtggtggtacggcgggctgctatgcagcgctgactgtcagagagcattctgattattccatcatcatcgccgagaaggcaaatataaagagaagtggatgtctggcggcgggagtgaacgccatcaacgcatacatagtgaagggcagaaagcctgaggactatgtggattactgcaggacagacgctgacgggatcgtcagagaagatcttttgctttctatgtcacaggggctgaaccgtgtaacagacaagatggagaagctggggctggttatcctcaaggatgagaatggagagtatgttgcaaggggcaacagaaatatcaagataaatggcgagaacatgaagccactgctggcaaaggcggtggaggagcttgacaactgtcagatactgaacagagtcaacatcacggactatatagttgaaaataatcagatcctcggggcatttggattctccatagaggataaaacagcctacgagatcagagcaaagaaagtgctctgtgctacaggcggtgcggcgggactttacagaccgaacaatccgggattttcgagacataagatgtggtatccgccgttcaacaccggagcgggatacgcaatgggaataaatgccggagcggagatgaccacatttgagatgagattcatagcactcagatgtaaggacaccatagccccaactggaactatagcccagggtgtcggcgctaagcaggtcaactcactcggtgaggtatacgagaacaaatacggactcaccacgtctcagagagtgtacggaacggtgagggagaatatagagggaagaggtccatgttacctgagaacagagggcatcacccctgagcaggatgactcattgaagagggcatacctcaacatggctccgagccagactctcaaatggcttgagtccggtaagaatccgagtgagcagaatgtggagatagagggcacagagccttatatagtcggcggccacacggcgagcggttactgggtggacaacgacagagagtccacaatacgcggactgttcgcagccggagatgtggcgggcggatgtccacagaagtatgtgaccggagcgatggttgagggagagatagcagccattgccatggtaaagcagcttgacgagggataccttgatcctgagcttgacgaggagacagcatttgacagaaagatagaagagtatgaccatttcctcgataccgacgagaagatgttcacatacgaggcgatagaggaggccatgcagaaggtcatggacaactacgccggaggaatatccacccattaccagttcaacgagaaacagcttgagctggcaaaggagaagatagagcagctccagaagcttgtatggcacataagtgcccatgacatgcacgagctcatgtttgtgtatgaggtgaaggagagactcacagttgcactctctgtaatcgcacacctgaaggacaggaaggagacgagatggcacagctttgctgagaatctggactacccggagaagagcaaagactgggagatatttgtcaactcaaagatggtggacggcgagcttaagatgatacatcgtgagctaggcaatatgtgccagatccccgaaggaaatctggcatgcagcgtcagcccctcgccgaaggcgacttcaaatgggctgatgttccaaggaaagggggatgtatatgagcatagtgataaataaagagctttgcaaaaactgcggcaaatgtgcaaatgtctgcccgggttccctcataaagagagatgaggatggacagatattcatgaaatacccaaaggattgctggggatgctcatcctgtatcaaggagtgtgcatttgacgccatctcattatatctcggagctgacatcggcggaatgggaagccggatgtcggtggagaacaagggagatctgcttctgtggaatatccgaaagatggatggcaccacagaccagatagtgatagacaagaaggaagctaataaatattaaaagataaaagaagaaaggttggtatagatatgggtacattatcacatcttgacgaactggaggcagaggcgatatacatcatccgcgaagttgctgcggagtgtgagaagcctgttatgctttactccataggaaaggacagcttggtaatgcttcatctggcactcaaggcattctatcctgagaagccgccatttccatttttacatgtaaatacaacatggaagttcaaggaaatgatcgagttcagagacaagacagcgaagaaatatggactggacatgatcgagtacatcaacgaggagggtgtcaagaagggcatcaacccatttgaccacggctcagcatacacagatatcatgaagacacaggcgctcaagcaggctcttgacaaatacggtttcacagcagcatttggcggcggacgtagagacgaggagaagtcccgtgcgaaggagagaatcctctcattcagaaatgctcagcatgcctgggatccaaagaaccagagaccggagatgtggaagctgttcaacaccaagatccagaagggcgaggaggtcagagtattcccactttccaactggacagaggctgatatatgggagtacatagagcgtgagaacatagagatcccatcactgtactttgcaaaggagagacctgttgtatatcgtgacggaaatatcatcatggtcgatgatgacagaatgaaactcagacctggtgagaagatagagtacaagagtgttcgtttcagaactctcggatgctatccgctgacaggcggcgtggagtccacagcggacacactccctgagattatcgaggagacgctcagtgcggtatcctcagagagaaccaccagagttattgacaacgaggcagcaggcagcatggagcgtagaaagagggagggatacttctaagatgagtggattacttaaatttataacatgcggaagtgtagatgacggaaagtcaacacttataggacatatattatatgattcaaagcttttatatgcagatcaggagaaggctctggagcttgattccaaggtaggaagccgtggcggtgccatcgactattcacttcttctggacggactgatggcagagcgtgagcagggtatcaccatcgacgttgcatacagatattttacaacggacaagagaagcttcatcgtggcagatacaccgggccatgaggagtacacaaggaatatggcggttggagcatcatttgccgacctggcagtcatcctcatagatgcaaagcagggcgtgctggtgcagaccagaagacacgcaaggatctgcgcgctgatgggaatcagatactttgtatttgcggtaaataagatggaccttgtcggttacgatgagaagcgtttcaatgagatcgtagagcagataaatgagctgtcatcagagctcagcctgccaaatatcactatcatcccagtgtcagctacagagggtgacaacgtgacaaagaagtcagagaacataccttggtatgagggcccagcactccttacataccttgaggatatagatatcgcagaggataacacagaggcaggattctatatgcctgttcagagagtgtgccgtcctgaccacacattcagaggttttcagggtcagatcgaggatggtgagatccacgtcggagacgagatcaacacactcccaagcaacgagaccgcaaaggtcaagagcatccatgttggatttgacacagtggactcagcacagaagggacagcctgtaacaatacagcttgaccgtgaggttgatgtgtcaagaggatgtgtgctcacagttgattcaggtgcaaaggttgcatcttcaatcaccgcaacacttctctggatggatgacgatgagctgtacaatggcaagaacttcttcgtgaagctcggaaccaagatgatccctggtacagttacacacatcgattacaccatagatgtaaatacaggtgagcagaaatcagcagacaccctttccaagaatggtatcgcagtctgcaggatcgcatttgccgacaggatcgtggttgacgagttcaagaaacacaagactcttggagaactcatactcatcgatcgtgtaacagacatgacaagtgcctgcggtgttgtcgaggaggttcacgctgaggagaccggactttacgagggacgcgtggatagaaatgtgcgtgcagcaatcaagggacagaaggctgtcatagttccatttgctgcaggcaatgtcacaagagattttgttgagtcggtagagaagaagctcagcatcgacggacgtcatacatatctgtacgctccagatatccgcgaggatgtaaatgctgtattaaagcatcttcaccacgcaggaatcatcgtacttctcttcgcaagcgagcagcagatcgcaggaatcaaggtagaaggcgccgaggtctacagcggcgattggaatgctgacggcgagctcgacgcagacgagattgcagatgagatccgcaaggagtctgtatacgatgcggctcaggttcacgatggaaactacatctaaaaaagatcgcgtagtaatataataataaagcgaaggacggaggtgttttatgccttcgtccttcgcttttgtatagaaagtagtaatatgaaatatttatttgtcagaacctttaagtctggctatttctgcccttaattcggcaagctcgttgtccttgtcggcgagcttcttgtctttgtcggcaatctccttatccatctcagccatacgtttttccatcctggctttctcttcccgaaaaacatccacaaatgtaataatcgactgttccaccatatccgtaacctcctcggtctcttcaaactgggaatataggcgagtataaagcatctgagtaaatctgtatagttgtgctccatcctcagctgttatattcccaagttccacgttcttgtctatgctacccattatatctgttttgatgaggcttttcaatgaggctatattctctggtgtacgtgctttcttattcctcagcttttcgcggagtttcagaatgtagaatggaatcaggatgatcattttcctgtcgtttatttcctttacggagcaggacgtgagttttgtaacagggacgttgtaggttatgttctgggtatgcccgaatcccacctgcaacgaatatgtatcaggtactgattttggtacattgctcagatatatcacacagggttcaggaaaatgaattcgatatacctgacagccctcttcgtcctgcagtatctccttagtctgatctgcatatcccgctccatatgaaaatacacggaatacaatagaatcatcctttttcatctgcgcttccaaatgatatgcatcggaattgttgattacgagtatggtgtcggccagagttgtggtcatagaattctgattatcgtgaacattttcagtccagtgataagatactgttgagttttccggatcgtaaaacatgttgaacaggccgttaatcatgttgatcacagctttcgaggacagcgtgagaatcttcttgaagatgctgtcataaagttttcttgttgttggcaagagtgttcctccttagtattttatccggccggtaggcacactttagaccattcaaatcgctgtgtcaataggttttggcaaatgcgtttataaagcgcagagtgacgctgtgagtggaaaaataagggggaaatgggaggtgattttactatttgtatagtagacgagggaatatgttttgctcctgttttgtttgattttctttgattgacatggtgctctatgttagattataataatatatgtcataataactattataacataccaagaataaaaaggttaatgtgacaaggctgcgcattcgtgcgtatgccgaacctatcccattcattcgttatgagtgaatgggattttttgcaataatgacagagggaggagaaaagtatgcgaaagaaaattagatatgtattggggctggatattggaattgcgtctgttggatgggcagttcttttactggatggagaagacaatgtatgcgggattgtgcgtgctggagtacacacgtttgatgaggttactgtagggaaagaaaaaataacggcgacagcaaatagaagagggtatagatctggaagaaggcttgtacgtagaaaggcacatagaatacagcgagtgaaaagcctattgcaggaaatgaatatagtctcaaaaaaggatatggatgagtattactcaggagcagttgaggatgtgtatttcctcaggtgggctgcaattcaggatgaaccagtatatatactgaataatagagaactggcacagcttcttatatattttgccaaacatcgtgggtataagagtactgcagtgcatgagcaggaggatgaagacgacaaaaaagttttatcagcaatttctgaaaacaaaaaatatatgcatgagcatggatatcgtacagccggggaaatgatatataaggatgctaaatttagacaaaaaaggtgtggaagcagtgaagaaaatgaattgctagtggcacgaaattcggagggaaactatagtaattcgattagcagagatttgcttgttgaagaggttcggataatatttgaaaagcagagggaattaggtaatactctcgcgacaaaagaattagaagaacgatttttaagcattatgcagagtcagaggaattatgatgaaggaccaggtgaaggaagtccatatggaggtaatctgattgaaaagatggttggtgaatgtacattcgagaagggagagaaacgagcatgtaaagcctcgtatacatcggagcgattcgtactgcttgaaaaaataaatcatctgcgaatttgtactgccgacggggatgagagaccacttaatgaggatgaaaagagtgcagtaataaagcttgcatataagactaaggtggtaaaatataatgctatacgaaaagaactaaagcttgatttggaagaacgatttggaggcttgacatattctaaggttaataatggtgactttaagcaaaggatattggatacagaaaaaaagagcgactttatttcgcttaaatattggcatgaagtaaaagatattttgaatttatcttataaggatttgacggaagagcaaaaacagttgatggattctgtgggtaaggtgttgacatattacaaatcggaagaaaaaagacgagaagaattatcagatttatcggtaaatcaagcgcagatagaaaaaatgttaaagctgaattatgcaaaatttcataacttgtcgtttaaggcaatgaagaagctgatgcctgaattggaagctggttattcatatatggaatcatgtttacgggtgggatatgacagcttaagtacagacggcgtgaagacaaaatatatttcaaaagaattattgaatgaggcagtggacaaaataatgaatcccacggtcaaacgtgctgttcgtagaactgtacggattctaaatgaaatagttaagctatatggtagcccggtagaaattcacattgaaatggcaagggatttgccacattccggggaggtaaaaaagaaaattgccactgctcaaaaaaataataataaagagaagaaagaggcaataaagttcataagtgagaattttggaaagattgaaagtgatatacgtcggaaagatatactgaggtatcgtctttggaagaatcagagtcagatggatctgtattcggaaaaattaataccagttgaggatatactggattatgaaaaatatgaggtggatcatattatcccatatagccgttcgttcaacgacagctttaataataaggtgctcgtaaaaaagaaggataatcaggacaagaaaaaccatacaccgcatgaatatattggacatgacgatgaggcatggaacaaattcgtaaaaatggttaataattatgtgttaagtcctggaaagagaaaaaatgcgcttacaaagtcatctgattctgatgaatggcgatctagaaacttaaatgatacgagatatacaactaaggtagttgcagatttgattcgcagacatttggtatttgaaccatattttaatggggctagaaataaacatgtatatcctctaaacggaggtataacagccagacttagacatgaatgggggctcgaaaaggatagagagaaaagtgataaacaccatgctcaggatgcaattgtgattgcgtgttgcacggaaaaaatgatctggaaaatgagtaatatatataagcaagaagagttgggtggcgttgttcgaaaagggaataagcttgttgataggagaaccggcgaaatattagaaacaacagcactgccgtggaaatggtttcgagaggaagtagagatggttatggcagatcatccagaagattatatcgagagggcaaaagatagaggctacatgggtgatatacctaagccgatttttgtatcacgacttccagtgaagaaaaagacaggggtaataagcgagaatactattcgggctgttgatgaggcgagttcaagaactgtagaaaaaacaagccttgacaagctaaagctgatagcggtgaatggcaaaaagcagattaaagattattatcgaccagaagacgacgtgctactatataataaattacttgatagactaattcgatatggaaatgcaaaagatgcatttgcagagccattttataaacctaagaaggatggatctgatggcccgattgtaaaaaaagttaaactctatgtaggagtagctgatgatcaggttaaggttagaggaagaggtgaagatatagatagagaaggagtcaaagatagaggagggatgtaccgatgcgatatattcaggaaagatggcaaatattatatgattccggtatattataaagatttatatttgcacaggatgccaacaaaggctgtagttgcccataaggagactgctgattggaagaaaatggatgataaagatttcctgtttagcttatatccggatgaccttataaaagtacaaaagaaaaataaagaaatagaaaatggttattataaaaccagtgatcgctattctgcagggataagctatgtacaacatgatctcggcgcgaagacttatgtgaggttgtgtatacaaaatctagcaatttttgaaaaattaaatgttgatatacttggaaatatatattcttgttccaaagaagaaagagagtggttataggtggcatatcgtaatatcattgtgactagaaatatagggatttctgttcataattatcaattggcaatcggaaatgaagatatgtgtgtgccgcttgaggatataaactgtcttgtgcttgaacatgcgggaattatgatttcaagtggagtcttgcagcggttaagtgagaatggatgtctggtttatatatgcgatgaaaagcatctaccatctacagttgttcttcctatggcaagacatagcagacattttaagatgctcactgcgcagcttgcgataacaaaaccaagacaaaacaggatatggcagcaaattgtaaaacaaaagatagctaatcaggcgatgtgcttaaaattgtgcggcaaaaagaatgccgatcaattatacaatatgacaaaaaaggtgcagtctggagataagacaaatgtagaagcgcaggcagcagcattgtactttaaaagcttatttggcaacgactttactcggagagatgacaacggaataaatgcggcacttaactatggatatagtatattgcgaggtcatatatctaggtcaatagtatgttatgggtttgagccttctattggaattaatcatcatagccagctgaacaatttcaatcttgcagatgattttattgagccgtatcgagcaattgttgattattttgtttatacacagctgcatatggaagaaggaaaagagctaagcaaagagatgcggtatcaattggtggatattgtgaattatgacatggatatacatggagaaaaacatgtaatacatcatgccatagataaaatggtagcgagttataattctattttgatgggtaataaggatgaacttgagatcccagaattgatagagctggaaagacataattatgagtaaatttatgagattgattgtattttttgatattccaacaaagacgaagaaggatagaagatgcgcatacagtttccgcaaatttctgttgaatgatggatattgtatgttgcaatattcggtatatgttcgtgtgtgcaatgggatggatgcggtaagaaaacatgaagggcgtctgaatgaaaatcttccagaaacgggttctgtaagaatgttggttctcacggataaacagtattcttcgatgaaaatactggtgggaacaagaaaaaaagaagaaaaaggtagcacaaatttgctggatatcatatgattttttaacgtgaaaaagctaggatttgttgaaaatcctagcttttttgctatcctattataacataccaagaataaaaagggaaatatgacagggtaatcatatacttgcgtgtattcgtcattataacataccaagaataaaaagggaaatatgacgagcatcggacaggtgattgataagatcaattataacataccaagaataaaaagggaaatatgacaaaagcttgcaaataatatagtaggaagtattataacataccaagaataaaaagggaaatatgactgattggtttaaattcatcaagtgcaagaagattataacataccaagaataaaaagggaaatatgacatcggtgattccactccaaggaacattagaattataacataccaagaataaaaagggaaatatgacttccacaatgtagcattccatgaaataataacattataacataccaagaataaaaagggaaatatgactttgacatgtacatgtatgccaagtgattattataacataccaagaataaaaagggaaatatgactgaggtcgttttgccatcttatgagaataattataacataccaagaataaaaagggaaatatgactataagtggtacattgttcgatacattttcattataacataccaagaataaaaagggaaatatgactcaccaccctgtttaataactgcttcttgcattataacataccaagaataaaaagagaaatatgacatcattcacaatgcaatagatacaaagaaagccggaacttatgaagtgacatatcaggtaacagatagtcagggtgctactgctacaaagacggttaaagtaactgttaaggctgtaccggttaatccagatacagataaaccgaataccaataagccaagtaatgataaaggcagtgtagaaacaggcgatagaaataatcttctattgtgggaagtcatgttgattggttcaagtatccttctgttatacagtctgtatcgtaaaaaacgaaaaacaaatcaataacaacttatgagggtagttgcctaaatacaggcactgttcatgggtccaggcacctactaggactccagaaaacagatagtacagcaaatgccagtgcttctagtggaaatgtcggtggtaggcctgtaaggaattctgaaagggaaaagcctaagtgggaagatactattacaaatcgaatgctgcactggtcatatacaccggagcagaaagaggaagtgaagaaagcacttgctgcaggagttccccaagcaacaattctgacttatttctatctggaggttactgtggagaagatgagttcttatcggcaaaaacaataaaaaagaaatcgcatagatacaggagctgtggtatactgtgtctatgcgaatttataatagtcttaggacaatgtattggaggtaatgcaatggaatttgagctgcttgcagatagtattaagcaaataaatgataaagcaagttcagcagcaaaaagtgctgtaaatcagctcatgacattgcgtaattgggcgattggttactatatagttgaatatgaacaagatggcagtgacagagcagaatatggttctcatcttttgaaaaatttggaaaaacagattgatcaaaaaggaatgaattatacgctttttaaggcttgtagacaattttataaagtatatcctcaaattggttcgacagtgtcgagcgaatttaaattaccggattttggaaaaagttcgacagtgtcgaacgaatttgtcacagatccagatgttttagttaataacttgtctttttcacatattcgagaaattatggttttaaacgatgcgtttgaacgatttttttacgaaacagagtgtatgaaatgtaactggaatgtaagagaactccgcagacagataaaaactaacctttatgtaagagctggcataagtaaaaaaccagagcttttattgaaaaaatctgctgatagtgcaaatggaacaatgctatcaataaaagacccatttacatttgaatttttgggacttgatgcaagggatgctgtgtcagaatctgatttagaacaagctcttatggatcatttgcaggagtttatgttagaacttggagagggattctgttttgaggcaagacaaaagcgaattataatagatgataaatattattttattgatcttgttttttataatcggcttttacattgcaatgttattattgaacttaagaatgatgagttcaaacatgaagatttgggacagcttaatgcttatgtaggatattataagaaaaatgagatgacagaaggagataatccaccagtaggaatactactttgtacagataaaggctcacagatggtagaatatgcattatcgggtatggataatcaattatttgtatcaacttatatgctgcatttgcctgataagaagaaattagaagaatttatgctaaaagagatagaagaaatgggaatgtaacgacgagcactttagccaataacaggttaaggtgcttttttcatgccataaaaggaggtggttaaggcacaacgcatcggggaaagtcctgtcttttttatgtgtaaataaacgacatagacataaaagttgacataatcaggcaaagtgtataaccttatgtacataaagaaaatgatattatgtcgaaagagtctgaggaaaattatgagttctacaataaaacaaaataaatatgaaattgatatgtgcaacgggacgatcatggataagctgatctcgttttcgttgccgcttatgctgtcgggaattttacagcttatgttcaatgcagtagatatcatcgttgtcggaagattcagtggaagtcaggctctggcggcggtcggttcaaccacagcacttataaatgtatttaccaatttgttcatagggatatcccttggggcaaacgtgcttgcggcaagattttacgctgcgggaaaagataaagaaatgtcagaaacagtacataccgcgatcacgttagcgctgatcagcggtattattatggcctttgtcggactgatatgtgcaaaaccggcgttagcgcttatggatacaccggatgatgtaattgatctttcgtctgtatacatgcggatttactttctgggaatgccgttttttatgctgtacaattacggcgcggccatactaagagcggtgggagatacaaagagaccgctccttttcctggttatttcaggaattgcaaatacaggtctaaacctatgctttgtgattattttcaagcttggagttgccggtgtggcaatcggaactgttatctcacagctgatatcctgcgtgcttgtgctccgctgtctgtatatgtcggagacaagctatcagcttagattttcaaagcttaccatcaagggggcatatgtaaagcagatcttttcggtcggagttccggcgggaattcagagcacagtcatcaacttttcaaatgtactgctgcagtcgtcagtcaactcgtttggctcggttgccatggcgggctacacgtcggcaaataatatatttggctttctgtatgtgacggtgaatgctgtaacgcaggcgtgcatgagttttacgagccagaactacggtgtcggaaaatggaaacgtatggagagagtactgatcgactgcctgatattgtcatttgcggcaatgatggttctgggcaatggagcgtatttctttggtccacagttgctgcacatatatacgagcagcgaagcggttataaagtgcggaatggaaattctgctatatacgacagtcacatatttcctgtgtggatttatggatctgtttcctggcgcgcttcgagggatgggacattccggagttccgatgctcctctcgatcataggaacggtgggaaccagaatcgtgtggatatactggatttttccgagacacagatctctggcggttctgttcatctcatatccggcatcctggatcataaccctcgctatgcagatagtatgttatttctatgtgaggaagatgctgtataagaaaattgcaaataagaaatgagtgaaaacgtatggggaagctgccagagaaatggggctgatccatacgtttttatttgctgttgtttaagaagatagaaatgtcgtataagaataggcccatccgaattaaaataagccatgcttcccctcgccactgacgtggctcgtgaggaggggctgcatgaacgaagttcatatttaatcagccccgacgacctgccgtctggcgaaggcgagggggcattaccagagaatggcatgtgccgtgtataccgtacggaattataaaataagcaatgccctccccttgccactaacgcggccctgaggatggcatgcgccgtatagataacaaaaaaacaccagttgattgtgagcaagctcccgatgactaccactacaaaataagcaatgcccccctcgctgctaacgcagctcgtggaatggcatgcgccatatacataacctcaaaagatgatctgaatgtgagtaaactcccatcagatcatttttttcgattatgtgcatggcttattttataattcctattgacatagtagggtataagggatataatcctatcatgttcgtaggaattataggaataacgggagagtcacccgatttgtctggtgacaatatttattttagtgaggcatagaagatcatgagatttaacacagcattattacacagcgcaaagcttggtgatgagaatacaggcgccacacttacaccgatctatcaatcaagtgcattctatcagccttcggcggagcagcatgagaagcttttccacaacaaggcgacggggtattcttatacgaggatcaataacccgacgatagttgcatttgaggagcggatgacgaatcttgaaaagggagtgggttcggtagcgtgttcttctggaatggcggcactcacaaatgcactcttaaatatagtaggagctggcggagagatagtctccagcacaggactctacgggggaacgatagatctgtttcacgatctggaggcatttggaatcaagacgacatttgtggagatatcggataaggaagcggttgaggcagcgataaatgagaacaccagagtgatatttgctgagacgatcggcaatccgaagcttgatgtggtggatataaaggcgctttcggagctggcacattcacacaggcttccgctcctaatagacaatacagtggcaactgcatatctggtcacaccactgacacttggagcggatatagtcatcaattccacatccaagtacatcaatggcaacagcgatgccataagcggagtcatcaccgacagcggcaatttcaaatgggacgcagagcgttatccgcttctgcagcagtacaagatgttcggaaagttcgcctatatagcaaagctcagaaacggactttttagaaatacaggagcctgcatagctccgcagacggcattttacaatatgctgggcatggagacattggggcttcgaatggagcgatgctcacacaatgcacttgcccttgctcagttcctggaaagtcaggagggtgtaaaggtcaactatccgggacttgaatccagtccttggtatgacatcgcaaatgaacagctccacggtggttatggtgccataatcaccatcagagtcggcagcaaggagaaggcatttgcggtgatgaacaagctcacaataccgcagatagtgtcgaacataggagacacaaagacgctcatcgtgcatcctgaatcaacactgaatgcgcacagcacagagcaggagaagcttgacgccaacgtatatgatgatatgattcgtattagtgtcggaatcgaggacgtggaggatctgatagaagatttccagaaagcccttgccgactaatacacaaatgatttggaggaactacatatggcagtagattacgcggctctgaaaaagggcggattcatgagacagaagcagaagaataacttttctctgagacttcaggtggtgggaggaaatcttaccgcagagaatctcaagaagatagcagaggttgccgagaaatacggagatggacatgtacatctcacatcgagacagagtgttgagatcccatttgtcaagcttgacgatgtggaagaggtgaaggaggaactggcaaagggaggctgtaagccgggtgtgtgtggcccaagagtaagaacagtcacagcgtgccagggaaatcagatctgtccgagcggcaatatagatacttatgacatagcaaagaaactcgatgccagatattacgcaagggagcttcctcacaagttcaagttcggtgtcacaggatgccagaacaactgtctgaaggcagaggagaacgacgtgggaatcaagggcgcaatggtagtagagtgggatgagccatcatgcatcatgtgtggcgtgtgcgtcaaggcgtgccgtgagggcgcgatcaccatggcggacggcaagatcatcctcgatacagacaaatgtaactattgcggtcgatgcgcaaaggcatgtccaacagatgcatggaagggcgagacaggataccttgtctcattcggaggattatttggtaacacgatccaccgcggcgaggagttacttccggttgttacatctgaggaacagcttttccgtattacagatgcggcaatacagttctttgcagacaatgcaaagccaagcgagcgtttccagttcaccctggagcgtgtgggcttagacaaattcaaagaagtattaaaggaggcttacaatggctgattatgaaatcaatgacagagtagatataactgatgtggtgtgcccgatgacatttgtcaaggcgaaggtagccatggaggagcttgagataggacaggtgcttgcggttaccatgaacgacggcgagcctgtacagaacgtaccaagaagcttcaaggaggaaggacagcagatcctgaagctcatcgacaacgagaacggtacttatgatcttatagttaaaaaactggaggattgatcagataaggtaagccggatgtttcactgcaataattcatactatgcttacatgttctgtcttaacatacctatcatgggtcgtttccacttaactcagtctgcagcggtactatcgctcgcaagctcgctgagtaccggcgacttcgtattcccatgatatggtaatgttaagcagaacatgtgataaatatataactcaagcagtgaaaacatccggcaggaaaggagaaaatgaatggcagtaagagttagtgcagaggatttcgatgtgaaggttcttcagtcggagatcccggccatcgtggaattctattcggacagctgcataccatgcaagcagctttcacctatccttggcggcatcgaggatgactacgaggacaaggtaaatgtatacaaggtaaatgtaaacttcgacgcagagcttgctgagaagtacgcagtcatggcatcaccaactatactcttcttcaagggtggtgaggaggtttcccgcatccgcggtcttgtgaagagaaatgcgctggaggaggaagttggcaaaatattgtagaaattcgttgataaagtgacacaatggagtatttgactgtagtcaattacttccggtgtacagaagaatgaaactatataattaaaattataaagtatataatcacattttatgtcagtctggcaacgtcggacaggcaaatgaatcgtcaggaggaaagaaaaatgacagtcacaatagcaggaaagaagaaagagatagcagagaagacaacaatagctcagatcatcgtatcagagaacgttgagaatccggactatgtcacagtaacagtcaatgatgagtttgttgactcagatgcatttgcaacaacagagctcaaggacggcgatacagtagagttcctctacttcatgggaggtggcagcttctaatggcattcacaaacgaacagatggaacgttactcacgtcacatcatccttcaggaagttggcgtgaagggacagaagaaattgttaaatggcaaggtgctgatcatcggtgcaggtggactgggagcgccagccgctatgtacctggcagcagccggagtaggtacaatcggtatcgttgatgccgatgaggtagatctgtcaaatcttcagaggcagatcattcacggaacagcagatgtgggcaaggcaaaggtcaaatccgcaaaggagaccatgaacgccatgaaccctgatgtaaatgtgatcacatacagagagttcgtgacatcagagaacatcatggatctcatcaaggactatgatttcatcatcgatggaacagacaacttccctgcgaaattccttatcaacgatgcctgtgttatggctaagaagccattttcacatgcaggaatcatcagattcaagggtcagcttatgacatatgttccagatgagggaccatgttacagatgtgtattcaaggatccacctccaaaggatgcggttcctacatgtaagcaggccggagtcatcggagcaatgggcggtgtcatcggaagtcttcaggctatggaggcaatcaagtatctcattggagttggcgatcttctgacaggaagactccttacatttgacgcacttaagatggaattccacacagtaaagctccctcacaagaagggctgtggatgtgctgtatgtggaccgaatccaaccatcaccaa

SEQ ID NO: 3603 - DNA, 23216 bp, synthetic construct
  source 1..23216: mol_type = other DNA
  misc_feature 1..23216: note = Synthetic
gacgcgtaatttaataacataactgtttgagctggggccggctttaggagactaaagccggtgccagcgtcagcgcgtttaaggtagtatgttatcttggacgatccagttcaaacacaaccaccaaggtcgccggtcctgtaaggctaggcgaaaccaggcgagaaagagaaacaaatatgactatgacagatccggtcgcagatatgctgaccagactgcgtaacgccaatgcggcgcatcacgagtcagtttcgctgccaggctcaaaacttaaagagggcattgctgcgattctgaagcgtgagggttacattgctgattggaaagttgaagacgcacgcgttggaactaccatcaccatgaccctgaagtacggtccaaaccgtgaaagctcaattgagggcatcaagcgtgtatcaaagccaggtcttcgggtttatgcacgttcgacagagctgccaaaggtgcttggcggcctcggtatcgctatcctgtccacttcctcaggtctgttgaccgaccgtgaggctgagcagaagggcgtaggcggcgaagtgctggcctatgtgtggtaattccgaatgtcacgtattggaaagcttcctattgccgtaccgggcagcgtcactgttaatattgacggccagcaggtagcggttaaaggtcctaagggcgagttgtcactcaccgttgcagagccaattcgcgtagctctggaagacggtcagattcttgtgacccgtccaaacgatgagcgagattcacgtgcgctgcacggtttgactcgcacgctcatcgcaaataacatcatcggtgtaaccgaaggttattcaaaatctctggaaattgttggcactggttaccgtgtgcagcagaagggcagcgatattgagctggcgcttggcttctcacacccagtattctttgctgctcctgagggtgttaccatcaccgttgaaggcgcaacaaagatccacgttagcggcatcgacaagcaggccgttggcgaggttgctgcaaatatccgtaagctgaagaaaccagagccatacaagggcaagggtattcgttacgctggcgaggttgttcgccgcaaggcaggaaaggctggtaagtaacccatggctgcatcagttaagcgcgcagcgggtcgctcagcggcacgtgtccgccgccacacccgtctgcggaagaagattgtaggtagtgtagagcgtccacgtctctcagttacccgcaccaaccgtcacgtattcgtgcagattattgacgacaccaagggtcacaccttggcatcagcgtcaactatggaagcggattttagctctttcgaaggtgacaagtctgcaaaggctcgtaaagttggcgagctcatcgcagctcgtgcaaagagcgccggcgttgaagcggttgttttcgaccgcggtggtagcaagtacgcaggtcgtgttgctgccgttgctgagggcgctcgagaggcagggctgagcctgtgagcgaagaaacaaaggagcagcaagtgtctgcagaggtacagtcaactgagaacactgcacagcaggagacccgcaccgagtcacgcgagggtcgcggtcgtggcggccgcgcgcagcgtggtgagcgtcagagtcgcgatcgtgcagaaagccagttcctggagcgcgtagttaccatcaaccgcgtatcaaaggttgttaagggtggtcgccgcttcagcttcaccgcgctagtggtggttggtgacggcaacggcactgtcggcgttggctacggaaaggctaaagaggttcctctggctatttctaagggcgttgaagaggcgaagaaaaacttcttccgtgtgccgcgcgttgcaaaaaccattccacacccagtgcagggcgagaaggcagccggcgtagtattgctgcgtccagctgctgctggtactggtgttatcgccggtggtccagtgcgtgccgtgcttgagtgcgctggtatccacgatgtgctgagcaagtcacttggttcatcaaacaccttgaacattgtgcacgctactgttgccgcgctgaagcagctcgaagagccacgctcagttgctgctcgtcgtggcctcgacttcgatcaggtagctcctgctcgaatcgtgcgtgccgaggctgaagctgcagctgctgctgcggctgctaagaaggcaggtgcgtaacgatggctaaagcgctgaaaattacgcaagtaaaatcaaaaattagtgagaagcagaaccagcgtgacaccctgcgcagcctcggcttgcgcaagatcggtcagtcggttgtgcgtgaagacaatgcgcaaaaccgtggctacgtgctagcggtgcgccacctagtaaaggttgaggaggtggacgcgtgagcgagaaaaccgaagagcgttcacagattctaaaggctcaccacctgcgtccagcaccgggtgctaaaaaagcaaaaacccgtgttggtcgtggtgaagcttctaagggtaagaccgctggtcgcggtaccaagggtaccaaggcacgttaccaggtaaaagctggtttcgagggtggtcagatgccgctgcacatgcggaccccgaagctgcgtggctttaagaacccattccgcactgagtaccaggttgttaacgtgagcaagcttgctgagctgtacccacagggtggcgaagtaactgtagcggatctggtagctaagggcgcggttcgcaagaaccagcctgtgaaggtccttggcaacggcgatttgtcagtgaaactgaccgttgctgttgacaaggtatcaacctcagctgctgagaagattgctgctgctggcggcgaggttaagtaattaaccccaccctgtcagctgttagctgattgcgtttaaacgccaaaatgcccggaggcacaagtcttccgggcattttgctgtgtgaaaagcccagcacgcgtgcatcacgggcgacattttggtggtgccgggttgtaattgatttgcgttaccgtgtaggctggattagttaaatctgtgcattttgcacaccccaaaagtttcggaggacaatttgttcagcgcgattggtcggatcttccgcacgcaagacctgcgacgtaaaatcctgtttacgcttgcaatcatggcagtgttccgtctgggctcgtttgtgccagcaccatttgtaaacttcaacaacgtgcaagcgtgtctcgcgtctgtgcaaaacgcatctgggctttaccagatgatcaacatgttctccggtggtgcgctgttgcagctgtccatctttgcgctgggtatcatgccatacatcaccgcatcgattatcactcagctgctgcgcgtggtaattccacactttgagacgctgcacaaagaggggcaagctggccagtctaagctgacccagtacactcgctacctcaccctgggcctcgcagtgctgcaagcaaccaccctgattgtaaccgcccgcagcggcctactgttcggtgcaatcggcaacgtggcttgtgaaaacattgtgaacccaagctggtgggcgatgctgctgcagattgtgaccatgaccgccggcacctgccttgtgatgtggttcggggagctcatcaccgagcgcggcatcgggaacggcatgtccttgctgattttcacttctatcgcggccggcttcccaggctcactgtgggcgatccagcagacccaggggtgggagaccttccttttcgtaaccctcatcggtctgctcgtaatgctcgcagtggtgttcgtggagcagtcgcagcgccgtgtgccagtgcagtacgctaagcgcgtggttggccgccgcacctacggtggcaccagcacctacattccgatcaaggtaaacatggccggggtgattccggtaatctttgcgtcatcaatcctgtttattccgatgctgattacccagttcaacactccagccccgggcgagaccgcgcctgattgggtggtgtggatccagaacaacctggtttcaggtgatcgtccggtgtacatggcagtgttcttcctgctggttatcgcctttgcgttcttctacgttggcatcacgtttaacccagacgaggttgccgataatatgaaacgctatggcggattcatcccaggcttccgtgcgggacgtgagaccgcagatttcctgcgttacgttattaaccgcatcactgccgcgggctccctatacttgggtattattgcgttgctgccactaatcgccctagcgctgtttaacgctaaccagaacttcccgttcggcggagcctcgattctgattatcgttggtgtaggtttggaaaccgtgaagcagattgatgcgcagctgcagcagcgtcactatgaaggactactgaaaaaataatgaccgcacgtctactgattattggagccccgggcgcaggtaaaggcacccaggcaactatgctggcggagcgctacgccgtgccagcaatttccaccggcgacatttttcgcgccaacattaaagaacagaccgagctcggcaagcaagtacaggcaattattgagcgcggcgaactggtgcccgatgaggtcaccagtgccatcgtagctgaccgcctgaaccaggaagatgctgctgcgggattcttgctcgatggctacccacgcaccgtggagcaggttgcagacctcgatagctacctgacggcgcaggggcagcagcttgatgcggtggtgctgctggaggccgataccgaggctgttattgcgcgcttgctcaagcgtgctgctgagcagggacgcgcggatgacaccgaagagactattcgtcaccgccaaaacgtttacgctgcgcagaccgcgccactggtggagctgtttgctgcacgtgatttgctggtaactgttgatggtatgggcaccgttgctgaggttgcggagcgtatcgccactgcgttgcaagcgaaaatcggtcgctaggggagagtatgcgttcgatccgcaaatcaatctataagtcgccggcgcaactgcggctgatggtggagcccaaccgcatcacctatgaagcgttgcaggctgctaaggctgctgctgttgctggcgcaactttgcttgaggtggatcgcgcagccgaggcgaaaatccgggaactgggtgcggagccaaactttatgctcgaaccgggctaccgtcacaccacctgcaccagcgttaatgatgctgttgtgcacgcgattccaaccgactatgtgctgcagccgggcgacattatttcgattgactgcggtgctatcctcaaaggctggaacggcgattctgcggtaaccgtggtgattcctgacgacaataacccggagctcgtggctgagcgtgaagcgcttagtcaccacacggagcaggcaatgtgggctggcattgccgcgctggcaaacgccaaagaaattaacgaggtcggtgttgcggtcgaggactatattaagagcaacaccacatactccatcgtgcaggactatattgggcacggtattggccgttctatgcatgaactaccgcaggttttcaactatgcggtggcagggcgcagcgcccaggtgaagccgggtctggttgtcgcaattgagccgattattgccgccgggcgcaacgccacaaaggtggatcagcaagacggctggacggtctacatggctgatggtaaagacagctgccagtgggagcacactgttgcggtgcataaagacggtatctgggtgctgaccgccccggatggcggtgccgcggggctggcgccgtacggtattgtgccgcagccaatcgcgtaactagggcggggtgatccaccccccatgaaggtgcgctttgaaaagttgaaaactcaactagacaaagcgcacttttagttatatgattgttttttggtgctttgcgcctattttatgcttgctaaaagcaggaatggtgctttgcattcgcatgagtagaacttacttgaatcgatagtgaggatatggccaaaaaagaaggcgtaattgaggtggagggccgcgtgattgaggcgctccgcaatgcccagtttcgtgttgagctgaccaacgggcacaccgtgctcgcgaccatttcaggcaaaatgcgcaagaactatattcgtattctgccggaagatcgcgttgttgtggagctgacaccctacgatttgactcgcggtcgaatcagctatcgctacaaataagtctacgaagtaacggtttgcggcatcccgcattcacgaagacagcgaaacattaaggaacatcatgaaggtaaagccaagcgttaagaagatttgcgacaagtgcaaggttattcgtcgccacggccgcgtcatggttatttgcgaaaacccacgtcacaagcagcgtcagggctaattgcggcgcggctaccgcgtttaataactaaataaacaacccaagcgtatcgaagcacccggcaagcccggggaacaccttgagacgggggctcaggcacccgatacgctccacacctccgactaaacccaaggagaagccaccatggcacgtctcgctggagtcgacatcccgcgtgaaaagcgggtagaagttgctcttacttacatctacggcgtgggtcgcacccgcgctctgaaaacccttaaagaaaccggtatcgacggtaacatccgcgtgaaagatctcaacgacgatcagctcgttgctttgcgtgactacattgaaggcaacttcaaggtagagggtgacctgcgtcgtgaggttgcagcagatatccgccgcaaggttgagatcggaagctaccagggtctgcgtcaccgccgcggtctgccagtgcacggccagcgcaccaagaccaacgcccgtactcgcaagggtccaaagaagaccgttgctggtaagaagaagtaacccacaatcgtttttagctttcaggagaatctgtaatggctgcaccaaaagccgcggcgcgtaaaccacgccgcaaagacaagaagaacgttgttgtgggtcaggctcacatcaagtcaacgttcaacaacaccatcgtttcaatcactgacaccaccggtgctgtgatcagctctgtttcttcaggtgctgttggctttaagggttcacgtaagtcaaccccgttcgcagctcagcttgccgctgagtcagctgcgaagaaagcccaggagcatggcctgaagaaggttgacattttcgtaaagggcccaggctcaggccgcgaaacagcgattcgttcgctgcaggcagctggtcttgaggttggttcaatcaccgatgtgactccgcagactcacaacggttgccgcccaccgaagcgtcgtcgcgtctaacgtgagcatacagcgcactttgcgctgtgtccctattaaacattccctgtaaccgcatgagtcaaattgtggactcttagcgaaaggaaacaaatcgtgctcatcgcacagcgaccaacactcacagaagaaacaatttctgagttccgttcgcgttttgttatcgaaccacttgagccaggtttcggctacaccctcggtaactcactgcgtcgcaccctgctgtcatctattcctggcgctgctgttaccagtgtgcgctttgagggtgtggcacacgagttcactactattccacacgtaaccgaagatgtgaccgagattattctcaacatcaaaggtctggtggtttctagcgaacacgacgagccagtaaccgcttacctgcgcaaatcaggtgccggtgaggttaccgctgcagatatttcagttcctgcgggtgtggagatccacaacccagatctggtcattgcaactctgagtgaagacgcagatttcgagctcgatattactatcgagcgcggtcgtggttatgtttcagcaaaccagaaccgtaacgaagatgcagaagttggccggattccggttgactccatctactctccagtgctgaaggttacctataaggttgaagctacccgtgcgggcgagcgcaccgacttcgatcgcctgatcgttgatgtagaaaccaaaccagcgatcagcccacgcgacgctatcgcgtctgctggttcaaccctggtagagctgttcggtctggcgcgggaactgaacaccgcggcagaaggcgtggaaattgggcaggcacctgttgaggttgctgctgagggcgagctttcaattccgattgaggatctcgacctgtcagtgcgcagctacaactgcctgaagcgtgaaggcatcaacaccgttagcgagctcgttgctctgtctgagacacagttgatgaacatccgcaactttggccagaaatcagttttcgaggtgcgcgacaagctcaccgagatgggtctttcactgaaagacgcagtgcctggtttcgacggcgccaattactacagctacgaagaagacaactaagcgagcaacagctcgaatataaacggagaacaaaatgcctaagccaactaagggtgcacgtctaggcggtggcccaacccacgagcgcatgatgctcaaccagatggctgcccagctctttgagcacaaacgcatccagaccactgaaacccgcgcaaagcgtctgcagcctgttgcagaacgcctgattaccttcgcaaagcgcggcgatcttgcagcgcgccgtcgcgtgatgcgccagatccttgacaagtcagtagtgcacgagctcttcaccgagatcgcaccgctggtagcagagcgcgagggtggctatacccgcgttattaagactggcttccgcaagggtgacaacgcgccaatggcagtgattgagctggtgcttgagccagttgtaaagaagcagcgtgctgcaaagccagcagctgaggaaaccgctccagcagctactgaagctgctgctgaggagaccgcagctgaagaaactgctgcggctgaagcaactgaagctgctgaggagaccgctgcagcggaagctccagaagccaccgaagaagcagctgcgtaactagcactcaaaacgcaatatgaaagccccggaaatttccggggctttcgtgtttaatgccgtatgtttggagtttagacttttggtttgcttttactgcggcgcgcacaccgtgccgcgcgggcactcgcagcggtacctacggaatagctcaaccagcatccaagacagcgcgagccctaaccctgtgaccgatactatgagccaaatcgctgtggtgtcaggattaactgcgtgggtttctgttgcctcatcgtagccgataagggaaaccatgagtgctgccccggtggaaaggataaaaaggcaattaactatgattgagagatagtagcgcatagtacctcctgtaactttttatgtttctctacatatcgttgcggctctgaggtaaatgttctttctgctggtaaagctaaaacttaacaaaattatatatatatatatattcttcggtacaacaactgtttgtttaatggtaaaaataaagcactcaaaagattcagttgaattaccgcgccagcgttactgtggtaacttcacggcgatgccgtagtaatctaccaaatttatattgagaaaagagggtatcatgctaagtttcaaaaatcgcaagactgcctctgaggtcttaactaccgcaggaattacactcaccacggcaggtttgcttgcaatatacctggtgtggttggtgaatttttctcgatatatgtatattgaagatttgcagttgggtttcaatgacgagatgatgcgtctaataacacagtattcaccagctgacaaagcgatttttctggcgggagcgataattgccttactgggtatagttgctgtaatcgccgcgcgcattagcgctcgaaaaaagtaacggggcccgaaggccccgtctcatttggtgaatctacctgcataacagaaatcttcttgttaatgtcagggctcatttcccatatttaatatgacaatagattagcataaaaataaaacttttgtgaaaattattgcataatgtcttgtcggaaagattgggaggcttcaatgcagcagtttcgataccgtttgggccttgatttaggaactaattctcttgggtgggcgatgatcctccttgacgaagataataagccttgtaaagttctacgcttaggggtgcggctatttgacacagggcgggaacctaaagctggctcgtcattagctgtaaatcgcagaggcgcgcgtcagatgcgccgtcgtttagaccgtgtaaagaaacgccgttaccgtttcctgaaagagcttatcagagcggggttgctgccggaaaacgaacaagatcgtaaagagctgctatcgcttaaccccctgcggttgcgcgctgaagcggtgaccaaagagctgtctgcatacgaggttggccgcgcgcttttccatctgcaacaacgccgcgggtttaagagtggccgcaagattgctattaaagacgttgaaaacgaagaaggcaagattaaaagcgctatatcagagactcgtagcatgcttgacggtcgcaccatcggtcaagaactttggcgacgtgtgcaaaacggtgaacccgctagggcacggctcgtaggagaaggccaaacagctagctacacttactatatagaacgcgatatgattgccgaggagttcgatcgaatctgggaatatcagcggcagttcaatcctgaaaaattcactgcagaatcagccgaacgcctacgtgatgttctgcttttccagcgtgatttgttgcctgccgtgcccggtaaatgtttttaccatccgcaggaagaccgattacctttggcaactaacacggcgcaggaatttcgcctttaccaagaggtaaataatttacgactcttagataagcgcacgttggagacgcgcccgctaactttagaggaacgcgaccggctgattgctattttgcaaatacaaaccgaggtgtccttttcggcaatgcgcagggagattttgggtaaagaatcgcgcgcttttgttttcacggttgaacaactggggcgccgcacgaaattgctcggaaacacaactgccgcagcacttgctgccgacactgcgttcggtgaaagatggtggaattttactgccgaagaaaaagattatgtggcagagctaattgcgcgagaacgcaaagaacgggtagcgatacaaaagttgagcggcgaatttggggtttctgagcttgtcgcacatactctgcttgtgaatgggctcgaagaggaatttttgcggatcggtaaaaccgcagcaacgaaaatcctagcggctctaaaaactgggtggaacgcagccgcagatgctcctttaacctatgataaagccgttgccatagctggttatgggtcgcatacagtgggcggtgccgcaggggtaatttttgacatgctcccttactacggtgaagttttgccactgcacacggcgccgcggccaaaatcacaggttcctgatgaacgacaatacggtaaaatcgcaaacccgaccgtgcatctcggcttgaaccagatccgcaaagttgtgaacgcgattatcgagcgctatggcacgcctgaacagatagttgttgaagtagggcgagagctgaaaaatggggaatatgtaaaaacccaaattaaagcagagcaggataaaaatgcgaaggctaatcaagaacttaatgacgagctagaagcctttggtgtaaaagttaatgcggaaaatcgcacacgcttgcggctatatcgtgaactcgccggtaaagaggaccacaaaacggcaaccattaggtgcgtatattccggcaaagtaattagctatgcaaaactgttctctaacgaatatcaggtagaccacgtgctaccgttttcgcgaacgctgaataacagttttgctaataaggtgcttgttcataatagcgcaaaccgctataagggtaataaaactccgtttgaggcgtttggcagctcccaagacgaatatgactgggataaaattcttgacctgattaaggtgcttcctggtaataaacaacggctgtttgcccccgatgtgcaggtcgaaccgcagggatttttggagaggcagttgggtgatacgcaatatctttcacgtgttgcagtacagtatctacagagtctcgatggcgttgatgtgtggagtgtaaggggtgcgctaacctcgatgctacgtcgcgaatgggggttaaactcattaattagctttaacaatcagaaaaatcgtgaggatcatcgccaccacgcaattgatgccgctgttgttgcgcttacagatcgaagcactctgcagcaggcaagccgtgccgcgcagagagctgaaacgcagcagtcgcaacgtgtaatgcttgagtttccaaatccgtggcagggtttccgtgcagaaatgcaagaaaaagtaaacagcatagtggtttcaatcaaacctgaccacggtgttgctggaaagctgcacaatgacaccgcttacggtatcgaacgtttgggtgagggaggaaagccgagtgttgtgcggcaccgggttccgttaacaactttgaaagcagcggatttaggaactcttaagcctgaatttggtagcttaccgattattgatgttgattctgctttctatgcgcagattgctgatgcgatcgagggatatgcagataaagaagagtggaaacgaaatctttcggctctggcccaaaaaaccggacggcgttatgtacgaaagcgagaagtgctcagcgttataccgatttttgagcggggtagtgagaatgatccgcaacgaaagccgtataagggtttgaagggcgatgcaaactactgtatggaaatttttgcggattctaaggggaactggaagagcgagattatttcgcgcttcaccgcaaacacggcagagtacaagagttatcttgcgggggctgaagcgcagcgcgttactttttcgggtaaaccacttgtaatgcgtttactgattaatgattgtgttgtgctcggtgatagtcccaccgtttataaggtgcagaaagtgtcaggggcagcgataactctatgcccagtgcacgagggcaacgccgatgcgcgcaaccgagacaagcaagaccctttctcctttgttaccaaaactgctaattctttgcgcacaagcggcgggcgaaaggttcttgtgaccgaactgggaactgttttagatccggggccgcttgaatagaggactccaatgtttgggcggattattgagataactgagacaggccgcactctgagattaaacctcggttcggttgaaatatttgattccaatggcgctaagctcgcacgtattgcattggatgaaattgcagggattatctgctacccgcacggatctttagttacggcagcactaatggctgaactggcgcgcagaaacattccacttgtcgttagcggtaacgacttttctcctgttggtgtgctaaccgcacttgacggtaatttcgagcaagcgaaacgcattgaggcgcaaataaattcttctgcgcctcgcaaaaagcagctttgggccgatgttgtacgtcagaaaatcgcgatgcaagctttggctttagagattgcgggaagccctaatctgacagttgctaatttgcgtacccaggtgcgctccggggattcacaaaactgtgaggcgcaagcggcacgattatatttcacaactttcttcggtaatgattttcggagagatagagatttgccggggataaatgcactactcaattatgggtatgcggttttgcgtgcaagcacagcgcgtgctttggttgcagctggtttgcaccctagtattggtatttttcatcggaatgcttataacggtatgcgtttagcggatgacattatggagccgtttcggccgcttgttgatttgcgggtacgggcgttgactgtggatggcgtggcagcggttacgcctgagaccaaaagggcacttgtggatgtactctcaactgatgtgccgcacatcaggggaatcactccggtgagtgttgctgtgcagtatgcggcaacttctcttgcaaagtgttttctcggagacgctaagaaaatagagtttcctgtggcgagcatgcaagatctttattttgattttatgtctttacctcgttggtggcagaatgtctgagctgagtggttatcgaattatgtggatgctagttatgtttgacttaccgactttaacccgaaagcagagaaaagctgcaacggaatttcggactgcgcttttgaagtctggttttcagatggcccagttgagtgtgtacatgaagtattgtcgtgataaggcagaagtggatagactcactatttggttgactcagattgtgccgtcagatggcaagcttgacataattatgattactgataaacagtatgaaaatattgtgacgttgtatggtgagcgtaagattgcgcgtgaaaatccgccaagcctgacactgttttgactgtattaggaagaaattgataacactctttccttgaatttccttgattttttgcggaaaaatcaaggaaagagtctatcagattgggaaatgagccctggccacaacggcagcataggtgcctttcttccattcagagtctatcagattgggaaatgagccctggccacaactgcagcggaatcacggcgcacacgccgcctagtctatcagattgggaaatgagccctggccacaacatagacatcgggcgaatttcgagaagagacagtctatcagattgggaaatgagccctggccacaacactaatgctgagcttgatgagtggcgcataagtctatcagattgggaaatgagccctggccacaactaagggctttctttgaaacctgcaataatgagtctatcagattgggaaatgagccctggccacaacctgtggcacaccgctgtgacaacagagtgaagtctatcagattgggaaatgagccctggccacaaccacgccaatcgcaaccagtacacctggcagagtctatcagattgggaaatgagccctggccacaacccaacgtgctcagggtggtgagccggtaagagtctatcagattgggaaatgagccctggccacaaccaacgagcaccgcgcatggcagcacgcactagtctatcagattgggaaatgagccctggccacaactttacgttcgacatgccgcgacgcgtcaacagtctatcagattgggaaatgagccctggccacaactaaagagtttatggcagcattgattaaccaagtctatcagattgggaaatgagccctggccacaaccggtcaccttttgcatcattaaactaacagagtctatcagattgggaaatgagccctggccacaaccacggtgacggcgtgtatgtgccttttgtcagtctatcagattgggaaatgagccctggccacaaccatcactgagactgggttttctcctggcttagtctatcagattgggaaatgagccctggccacaacttacgcgccaaacccaaaatgtgcgccaccagtctatcagattgggaaatgagccctggccacaaccttctgctgcatgcttgtccactccttgcaagtctatcagattgggaaatgagccctggcgacaaccgaaacactgtacagaataaatgcatggcgagtagattaacgctcgttttttggcgctttttcagctggttagcttgagggttttgttgggttggggatagttggtgatgaacatttatcgcaaaactcaccttgaagaatatgttaacaaagctgctttatcttgtagtcagcggataaattgtttttctttgttctgaataactcgcttgattaataatttcagcatttgctgcggcggctgcgtggtgaaaatatagactccacagacactgtgatcggtgattttatttctgcgaactttgctagataaagtgccctagttaggtgcttaagacacgtcaactgtgaagtaagaaagatatttcatacgagtgcattaggatatgttgagaaatgcgctaatgataaaggtaagggtcgaaaaaaatgaagcttctaaagggcggtgcagcgttagtcgccctgttaatgttggcgagctgcagcaatacaggcctgggtctaaatgtctccgatgtaagcggctcagccagtgacggtccacatgcagcagccgatcgtgtcattgatgctactgagattagcgccggtcaaaacggtacaaagattgtgcgcctagaccttggtaacagcgaaatcggcgagtatgcagtgcctgttaggggcacactggtgctcccgacctcgacgtcagcggcagaagctgctccagcagaatcgggcggtgcagctgcgaagcaaccgctgattatcgttaaccatctgcgggcaccgggatgcagcgacgacacctttgcctacccctgtacgaacagcacagagcggcgttttgacatcggtatgacataccttggtgaacacctggcagagcagggatatgctgtgctgatccctgatttatctccggtgtgggttggcgccgacgtcgcatcgccctacgaccagactaagctctggcaacaggtagtatcgcgttttgtagccgagtttgaaaatcaaaatagcgcagcgttgcaggggatagacacctcgcagcttgacacctcccagctgggattggtgctgcactcgcgctcaggcatcttggtgaatccagctgttgaactatttggtgctgctcggattaaaggggtgcttgcctacggcgcagcatacgatacttttgatgcagaaatgttgagcccggcaccggctgatgtgccttacctcgcggttagcggtgacctagacgctgacgttggagcaagtgcgaatttgtggctgggggcgcatttggggctgccgcgatccacccctgcgattgcagcgactgttccggggcttgggcacatgtatgtcaatagggtgctgtcagatgctgggctcgatgaccgcatcggttgcgaagaactcgactgtcctgatgccgcggaacacgaacgttttctgcgcgaggttgcggcagactggtttgggtgggcgttttatggcgcagatacgagcatcccggttactgcgggagaatttgacggtgcggcagaactggcagaactggcaggattgccggcgcgctggctagctgcgagtccggctgcttcgtcagagcagcgcgtgaccctcgacgcagcagcttttaaagcttttgatgggggatcggcaaccctgtgcgtgcacccggatccgatgcaaccaggccagcctgataacgcctgcccagagccaactaaaggggtgacagaagttgctccggtgacaccggttaacgtgctgcagcgggcgcgggcggaaaccacggtgaccgaggtgcgaacagtggctgtgcacgtggctccgcacggtagttctgagcttgaggcggatgccacagcgttgttaatgacactgcgttttgccgacggtacaacttgggagcagcagcttactccggcgcatccggtgctgcgtaatcgtgccacagcgaccgataacggccagtatctgctgggcaccgtcaggcttgtagtgcccgctgagtacgcagggaaagccgtgaccgcggtggaattgcgggccccggcagcgccggtagagttgcgcgcggtggatctgctgcgctgagtttgctgtgccggcagaggttgctgccggtgagcaatgcagcagcagtgtttgctgctgcggtttagaaattgtatgccgagtgctcagcctgctgtagctcgcgcagatattcgcgcagatggggcagtgcaaaagtcactttgccgctgccagccgtgaggatcatctccgcgtctattaagcgtttacggtagttgttggtgtactgcggtgactgccctaagcgattagcgatatcgctgattttagaggggccattatcgtgcgccatcgcctgcagaaaagccctgtcgacgtcggagagatctgccaaagagggctcatgcacaagtttgttgagacggcgctttgcggttgccaccgcggtttcagcgagctgcatagtcacatgtttggcatttgctgtacggaacgcctgggacccgatgagctgaatcataaagggataaccaccgcactcggctgcagcgtactgtagcgcctgtgaatcccagacgatgccagcttcctgcatcggttgctgcagtcctgccattacctcttgttgggggatcggctctagctcgataaggttggcgcggcgcagaaaggttaccgggtttttgcctcggtctgcggctagcagtggtttgattgcggaagggatgcctgccattacaaccgcgatttcgcggtcttcacgcactaaatgctgggtgatggcgccgagctcaatcacctcattgttgcggcggtgatgcagctcgtctagtgtaatcaacacgcctgagggttcgagattaaactgttctgccttgacggtttggagctgtagtagatctgtaagggcatcgcgcagatcgtaggtatcgcgaatattggggttggtgtcccaggttaagtagagcccgagcgagaaaaactcgatgccgaaggatgtcagtgttttaccgcccagctccttttcttcgcgttgcagttcacgcaccactcggcgctttaatcgctcagtgaagccactggttgcggtctcggtgaaaactagccagccacgttgttgcgctgacagcgcaaagcggtctaacatcacggttttaccgctgccgcgcgcccctacaatcagtgacacgcgctcgtgtgatccgggaccggagtccagagctaattcaaaatcagctacctcctgctggcgccctacgaggagtggcggggtggcgccgagggtggcggtgaaaggattcttgctgctgcccattgttgtttaaccttgtttattttatttacatgatgtgttttgtaaatgttaccgctgcgtgctggaaatttgtttatttagccttatttattttatttaagtaggtaatttgtgcgccttaaaacgtaataatttggtaagaaaatcacccctagagcggtaacatgtgtcagacatcctagaactatgaacaaaaaaacaacagcaattgtgtccctgctcgtagcttcaactttcgctctcaccggttgttccggaggagacaaaatggaagcggacaaggcaatgagcggtgacagcatgatgactgaaagtaaaaccgactccatgcagcacgatgccatgagcggcgacgcgatggagcacgatgctatgatgggcacctcgtttatcacctacaaagaatactcagagtcaatgagtaaatacgatggtagcaaggtggtgctgttctttgctggagaagatgcaaccagcaccgcgattgaaaaagagttcacggacgatatggccaaagtgcctgaaggctacacagtggtgcgcgtgaagcataccgcgcatatggatgtggcgcagcagtatgcagtcaccacaacacctaccttcgttgaactagataacaccgggaaagccaaagcaagctggcagccgaaaaccgccgctgacctggtgatggatgctatgagtaactaattccaaggagcaatgaacaattaaatcatgctagtaacaatagtactttcactctttgccggggtgatttcggtactagcgccgtgcgtcctgccttttctcccagttattgtgggaggaagtctgggcgcacgctcgcgtcttaggccgtacctcatctctctcggactcgtagtatcgctactgcttttcacgctgctgttaaaagtgtcgagcctagcaatcggcattgacccgcgattttggcaaatcgcctccggggtgctggtgattattcttggcatcttcatgctcttcccagatttgtggaccaaaatttccattgcgctgcggctgaacgcgggctctcacaagctgctaaaccgggcccaaaacagtggcaacggtgcagtgtctgcggtgctcacaggtgcggctttggggccggtgtttagctcctgtagcccggtgtatgcgtgggttatcgccaccattttgccggtgcagccgttcgagggtttcctttacatcagtgcttactgcatcggtatggccggtgccctattggtgatttcgctggcgggacggaagctaattagcaaactagggtgggcgagtaatccaaagggctggttccaacgaattattgcgattctgtttattgccgttggtgtctttgtggcaacagggctcgataaaaaagtgcaggcatggacggtggatcacctgccacttatctctgacatcgagcatcagctaattcccgatggcggcgggcagtcggcatccggttcacagcaaaatcccggtactggcccggatgctccagaatttcgggggattgcagagtggattaacagtgatccgctaacccttgagagtctgcgcggcaaggtggtgctggttgatttctggacatactcgtgcattaactgcatccgcacccagccatacctcaatgcctggtacgaccggtaccacgatcaaggttttgaaattatcggagtgcatgccccggaatttgcctttgagaaggatccgagcaacgtgcaacgagctgtcacagatgctgcaattaaatacccggttgcgctcgacaacgattttaaaacctgggccgcctacaaaaaccgctattggccagcaaagtacctgattgatcagaacggcaaagttgtgtggacacacttcggggaaggtgattacgatgaagccgaagcgcaaattcgccaactgcttggtgacaccggtgaaaaatctgcagccgttaccggagcagccactgccagcccccatcagtcgccagaaacctatctcggcacaaaccgcgctcgcggctttgttggcaagcctttgctgcgtgacggggttacttattacactacaggcgccgtcaccgataccaacacctggtcgctgcaggggcagtggcaggtcgatggggagtcagttaccgcagtcgcagcaggtgccagcctcacctataaatttgccggcaaggaaatgtttttggtgatgagtggcccagccggcgctaccgtggaagtaacggttaatggcgaaaaacatcacctcggagtagatgccccaaatggcaccgcgcaagtggaggaggcaaggctctataaactcgtgaagtttgatgagttgcaaagcggtgcagaggtgaaactcacctttagtgaaggtgttaaagcaaatgctttcacttttggatgacgggtatactcagaccgtgagtaaaatcctagtagttgacgatgacgccaccgtgcgtggcgttgtcgtcgactatcttaaagctgatgggcatgaggtagaacaagcagaaaacgggccagacgccttgcttatagccaataaaaaacgtgactttgatttaatcattttagacctcatgttgcctgggttagacggactagaggtatttcgccggcttaaaagctcgcaacctgagttgcaaatcatcatgctgacagcaaaagttgccgaagcagataggattttgggtctggaactgggagccgacgactatctcactaagccgttcagtccgcgagaacttgtgttgcgtgtaaaagcagtgctacgtcggttagtggccacatcaaatcattccgcacacgatgtggttcgtgacggtgatttagtgattgatctggatagccgtaaagcaactctcgcaaatcgggaattgaatttaacgctgcgggaatttgatttgttggtacatctgatgaccaaccccaatatagtgatgagccgcacagagttgatgggagctgtatggggttgggattacggagattccacaaccgtaactgtgcatgtgcgcagactacgcggcaagatagagcgtgatccttcacagccgaccaggctggttacggtgtggggtcgtggttaccggtgggagccgacctcgtgagcatgtcagtgcaatctgtctttttaacccttaccgtgaccgcggtggtgggtattttgtgtgcgctattaaccctgcgagtggctcgggtttcaatgcggtggacaatgtttttggcgccgttgtcagtggtgttgtcaatcgccgccgggctctacgccggtgtgcgagaaatgctgattgatgagcgtgtgccgctaatgatgttactaattactgccccggttgctttagccatcggagcttttgtttctgctcgcgcacaacagcaggtgacacaggcgcaagagcgtgcagaggctgaacgtcgggctcgtgaaatagaagccgggagaagagagctgattacctgggtgtcgcatgatctacgcacaccgttagcgggtatccgtgcaatgggagaagcgttagaagacggaatcgtggcggatccgcaacactactatcgggcgatagttgcggaagcaaatcgtacttcagacatggttaacgacctgatggaattagcggggttgcacagtggcacagctcgtctagccacagagccggttgtgctcggggatatcgtctccgacctcattaaccagttaacctctcttgcagcgcaacgccaggtaacgctcgctggcggatccacaacccagatggaaattaacggtgacgctaaacttctcacacgtgctttgcaaaacgtgatagcaaacgccattacctatactgttccagggagcacggtgacggcagaggtgtatgcgctaccggctagcagtgccggcgctgctacgcacagtgcagttccagcaactgtttgtgtagcggtgacggatagctgcggtggggttagcgcggatacattagtgcgggcttttgaagcagggtggcggggagatgctgcgcgcactcccggagcgcaagctggcaccggcttgggactggcaatcactcgcgcaatcgtgcagtcacacggcggcaaggttacactgcataatgttggtgcaggctgtcgggtggtgtgcgaaattccggttggtgcaaaaccctgacaagatcaatctgtgcttaattttcggggtcacgcttccctcggccgtggtgcggtggtaaattgataggatgtggctgacaagcatcctgtgattacacagcgc

SEQ ID NO: 3604 - DNA, 15211 bp, synthetic construct
  misc_feature 1..15211: note = Synthetic
  source 1..15211: mol_type = other DNA
gctgtccttttagtgcagttatctaattcccgattgatgggataccggactctcggcgctcatgcgtcaaaacgcgccgactcaactctcttggagtcttaaggtgatgtggtggcgaaggccatcgttcacaatctcaacgtttcccaagcttcgcgccacccgcgccacatctatgggttcctcatgctccctgatatcggcagaaacgcccgggtgcccttcctgtgattcatgccgcgcatcgagcaacgctcgtgtcatcagtcctcgataatgcttggcagcatgagtgaccatcttgccatgcgaatcaagcacacgcagatcccaccactgcccatgcggagtcgtgacctgatacgccccggaacgcatatccacggtggtattcggagcggtctccacagcaacctccatggaatcgtcgatagccgcatctgtggtcgtgccgtgctttgccacgcagtttgctcgaccgaatccggccttggtcaattcacgccgccagaacgtcttcaagctgccgatgccggggagggatgtgttcatcgacaggcgatatgccggaatgaggtcttctgcagtggtcacaccaaacaagcccgagaaaatcatcacctcgtcgccaccatgcaaccgcgcggcctggaacagcacaccggtatacacctggtaagcgggcgcacagggcatatcgcgaagttcgcgctgcgccagcacctccggcatcacacgtttgccgactttgagaatcccggcggcatcatccctgccggacacatcgatgagcgcttcgagcacacgccgacgtgcatcggtgagttcaggaaacgacaggccccgaagctccaatgcaggcccggagtctggccacgttttgccctcggatggcggaagaagaatacgcacgccgaacattctatcggcaggcccgattgcagaaggaaaggagaagctctgcggtgatggaatcatgtgtcattcccagatatacgcactccatagcacctacgcgcacaccgccggcgaattccggagtataaacgacagatgggtgccttaggataggagtctttgcaaaagaatttatctagtcctcttgattatcgcgtttgcaatcggatatctcaaatttcgcacacagtaacccagaaacaggatgaaccacttcccagaagtacgtcataaactgccagtatcagggtatgaaatctcccgcatattcaagcagatcgaccatagccagctacagacttttgaagaaagtccctgatagaacaagcggacccatctcgcagaatgactcaaattccaacgacatatctatgggtctcatggtaacaggcaaggttatacgcagcggagattatgccttcttcgaatcttgtgatatttttttgttgactcaattttccaataaattctggctcgtggtgaatgtcatctgtcggaatgagttctcgccctaggtgattacgcctagggtttttcattacccaattcgtgggtagaaagatggatatgacatatctttttgaaaaagactatttatgtagtgtatagattagtggcatgacacataagcatgcatcggatgacccatcggacaagccaagccccaacagcggtagattctccgcaccgaaagacgcgacctcctacagagttggcatcgacgtaggtttaaactccgtgggcctttcagcaatcgaaatcgccccaaaaggatcccttgagaacccggattactttcccctctattcccctccgttaagattactatcaacacaatcagtaattcatgactccggtgttgacccgtatgagaacaaaacgggcacatcccggaaagccacggcaggcgttgcacgccggtcacatcgtttacgcaagcagtaccgcagaagactcagagctcttgacctcaccctcacagaactaggttatccgatagcaaggctggactctacagatccatatgttgtttggcgtgtacgcagggaactactcggccacttcattgaggacgacaatgaacggcttgaaaaaatagctcttgcactccggcatatcgcccgacatcgtggctggcgaaacccgtatcttctgcctaaccatctgcttgagttggcgaaaagaccttccgaccactatgcgacgttacgagagaaattactcttacgattcgataacagctatcaacagttgctgtctcaaaggaatgagctttcagcaccgccggaaaacaaatctgacacaaattcccttctcaaggatcaaatcaaagcggtggagaaccaactctccatacgacgacatgacatattgctagcagcaggatggcatgacgaagagcaatatgaccgaaaagggaacctcaaggtcgataaagaaaccggggaaattgaaaccaaacttgaatccccgcaaacatggagcaatcaaccatacatcagccaaatcgcatgcagcctgctctttgacccttcgcattcatctgccccgcaacacgtttcattacgacgggccccaaaagaagacaacacagtccaaccgattgacgcaaggcttggcaagctcgggcaagaagaaaatctggctgagatacttgccatattcgccatgcaacgtgtgtcacagagtgacgtgacaccattgttattcggaaatcgacaataccccgttcagcgaaacggcaaggaatgggtcaatactcttggaggcgtcttctcctccgtcaacccacgcgacgtaggagccgcagcagactatatcgctcacgacgatttacccggtcaggaacgattcgtccgagcttctcgggcttccatagccttccagcaatacaggattgtcgcttctatacaaaatctcagaataggcagcgaacgtctctccaacgagcagctcaatacgctgcttcatggcagacgagacgagaaaggcactcatcttaacggactgtttgaactgagctccaaggaaatcgatgcaatcacctggaaatatgttactactctattgaatgttgatcgaggtttgttgcgaggcatgggcaaacccctgacatactcggaatacaattcaaccagcggtcactgggagactcgagagctggacgagagtgttagtgccaaggttccaccaactatcaccactgaagctttgttgtcgagttccaagattcccgcaatcacagaattctggagtgacttaacacgcgatgagcattcagatgacgcgcaattgtcacgcaaagcgttgatattcaaagaacgttttatcgactctctacaaagctctggacggactcccccatcaaatgatcttgagaacgatgccgatagggaaatcgacgagcttatcgccaccaaactcaacgagaacgaactcaatgaactggaaaatctcggcatgagcctgcccagtgggagagcggcatattcggttgactcactgcagaaactcaccggaacgatgatcacgcacaacgtcgatcttcatacggcacggggcatagcattctttggatggaatccgaatatcccagtcggtactgacaaggagaatgatcgcaagcgggttgccaacgataggtggactccgagcgccgcacctctcgatgagccaacaggctcaccatctgttgatcgcactataaaggtcgtcagccgtttcctcaaggcatgtgaacgccgatggggcaagcccgaaaccgttgggattgaaatcgcccgtgatggttttatgagcgtgtctgcggcccgtgacgctgaaacacagaatcagcggatgtatgaaagccgcaaaaaagcagcccaacgaatcctggacagcaccagcaaccgcactggatacagcggtcgcgtcgaggatgtctcaaactcggacatacgcagaattcaagccatccaaaggcagaacggtaaatgtgtttactgcggggaatcaatcagcttgaccaactgccaaatggatcacatagtccctcgtaaaggcgtcggatcgaccaatactcgcgcgaacctggtggcgacatgccaagcgtgtaacctcgacaagtccaataccctgttctcggtatggtccactcctggcaataatcaccgccaaataaacctcaccagcgtcattaaacgcatcaacaaggaatggcagcgtgattcacaagagtttaacgctcgacaatggaagaaatatacctcagatgttataggacgattgaaggccacggaggaagacgaccccatagataacagatcaatagagtcagttgcctggatgggacgcgaactgaaagcacgccttgaaagacggtatcaatacaccataggcgatctcagcactaatcctgacgaagaactacaccaacgcattttcgtacaacaaggcatcattaccgcacgagcacgcagaatcgggcatattgaaaacaatcttccttggttcggcggcactgagggaaagactcgtcttgacagacgccaccatgccgttgatgcttcagtcatcgcattaatgacaccagcagtggctggagtgatctacaaaggcgataatctacgtaaagagcagcgggacttcatgattccaattgcttgggtcaaagaatccgtaccagacgactatgtactccccgaaaataccgcacgcgtttccatcgcaatgagcgaagaaatttttaatgcggccatacgtcacaaccccaacatcatcggtatagtcggtcaatgctattggagacgatatcaaggcaataatatcgagcaacgagaagacggctcgcgtaaacagaccgattcaaactcgaaatatcaacgttggctcgatctcatgaataccaaccacaaccagggtggtcttgtacgtctgctgagagatggattcattgatggaagcatcaaagttatccgaccagtacggcgcaggctccaaaactctaaagttcatgacgataccgtaggcagattcatacgcaaacctctcagtgatgcgtggacgcttcaggaattgctccgggttggcaactacgtttggattgacaagaaacctttcaaaatcacgtcggcggatatttaccaaaccttaccgaacatgaggactataaccccgacgatatacatgacaagaacgataaacggatatctgaagcgcgttggacagcgagtacccgggtcataccaaacaacccgagccgacgcatcttgattaataaccacgaactttgcggcaccgatagaatctcgataatgatggatgggctgaaaatggatggctcccccattcccgttcggggaggatatgccgctcagggaggcgcgattcaccatgcgcgtttttacacttgggaggatgaacggggcaagacgcaatatggcatgttgcgtgtctacgcagcggaccttctcaaagcctatgggaaaaaacagaatctgtttacttgcgagataccttcgaatagttattcgtggagatatgcagaccaaaaacttcgtgcagctcagcacgaaggcatgttgcaccccattggaacagcgcagcaaggagacgaagtcgaggttagccgctccgaactaatcgcacaaggaggaggaattgccgaagctataaagaacttctataccgctgaaaacggtcaagaaacagtaccctttgttgttgctggttttgaggatcctacacgtctgaaattcaagctgtcctcactcgcatcagagggtctcattactgatatcagtaaaagggcggcggatatcaacagcaagtacacagatgtgcatcgtagacaagctgagctcagcgcccttgttaaaaagacgacgaaaatgtataggttgcaagactctgattgggaatcaaagaagatggccattctgagcaaagaagtcgaatcgacaattgatacgatcaacaaacaagtgagcggctattggcgccccagagtaaactccttgtttaatcttggttttcgtctcaacatccgcgatgcattcggggatattcgttctcaatggtcaagcccaggaaacatgcctgtttcttggcaatggaagtttgagaacgaaaacgagaaactatagttcatgtcaagaattgtgatgaaagtatatccattgaccactaatactctttacgtgatgcttttcatatagtgtattcctatgggatggagaattctggatttcacacaaagcgaggtttctctaggaacacagcggggaaacctcgtcgtgaaatccaatacgagcgatcatcaacaactcgtgccttttgcagatgtcgatgttgtactcatcgggctcggaacggggcttacttcaggggtattgcaccagctcgttcaatatgattgtgtcacgctgtttaccgattggaaattcgttcccgtgggaggggtatatccatatgtacaagaatccacacataatcgaatagccgcaagacaattagcacaagctaatgcctcgaagaatacactcaatgcgctatggcaacagatggtaagggcaaaaatacaaggtcagttcgctgtgatgaaccagctgggtttcgcagaaaccagcaatagactcaaacaattatcgaagaacactcgccctggagacccatcaaactgtgaaggtcaagctgcaagattctatttctcatccattgcccagatcgatattttccaggatgaaggttggaggcgcgatgcttcacgaggagactggcttaacaacaatctcaactacggatatacgattctcagaagctacgcgattcgatcttgtttatcgtccggattgcacccagcattgggcctcttccacagaaacagagaaaatctctttaatttagcggatgacttgatggagccttttcgaccagccattgattactttcttctctcacacattgaagagttgtttggaactgatgtgcgaaaggagttggttgccattgccaaatcaaaatttctgtcgagtggactcacaattccagccgtgctgaacgatttagctcaggatatcggaatgcatttagaacattccaaagaaacggtgcgtattccgtcttttgaacctcgtgaagtggttagcacatgagggaggaggcagacgtgtggctgattgtgatgtttgatctcccagtcgattctccggaatcgcgaagggaagcaacacgattccgaaaaaatcttatcgatatgggtttttcaatggctcaattttccatctatgccaaatacactcccacactgtctcaaacgcgattcttccttgcggccgtgaaatccgcgattcctccttacggcggtgtaagagtattaaaagtcaccgatagacaatactccgctatgattcgttatgaaaacagttacctttcagagcccgaacaagctcctgaacagttaagcctattcgatgctttctaggaagcctatgatacattgaagcaagtgcttttgataacaaaaaagtgcaacaaagactccaattccaggcatttgaatgagtgctgttggaatttgagtcattctgagggataaacccctaccgacgacgtacgcgaacgcgaaggcatggttggaatttgagtcattctgagggataaacccctacgaatgactcgtacaccgaccggtcttccgttggaatttgagtcattctgagggataaacccctactccctgccatgattattctgcttgggctgttggaatttgagtcattctgagggataaacccctacggataccagcgtgtaggcgtcggggcgtgttggaatttgagtcattctgagggataaacccctaccgaggtaatgattcacgccgctcatgcagttggaatttgagtcattctgagggataaacccctacacgcctgcggtgtactggctcgcgttgcgttggaatttgagtcattctgagggataaacccctactgcccacaccgccatcgaaccaatactcgttggaatttgagtcattctgagggataaacccctacgtacatgaatcaggtgacatcgttcgctgttggaatttgagtcattctgagggataaacccctacttcctgggtgtatggtgttcccgcttgggttggaatttgagtcattctgagggataaacccctacatcaggagtatggggtgttctggcgtatgttggaatttgagtcattctgagggataaacccctactacaaccggtaactgtcgacgttatttggttggaatttgagtcattctgagggataaacccctacggacgcacgactatggcgtcgttgaccggttggaatttgagtcattctgagggataaaccagtacgcccactattgttagggagctgggcaacacaccgtgggaatagcttcatccccctactcacgtctcacaaccagattcagctaggtatgtatgcattaacggtgctagtatattaacgaggttaatacagtacggacaatggagacgtcatgaacctgaccgcatatatcactggcatccagcatgttggcataccgaccaccaagatggatgaaacaatcgcttactatcaggccttgggcttcgaggtggcaggcagcttccccaacggggacagcacctgcaccttcctgaggttcgccaatctcacgcttgaggtctggacggtggattccacgcctaacaccacaggtgccatcaatcacttcgctctgaataccacggacatcgacaaggctttcgcagcggcgcaagagctgggcctgaacttcgtggaaggttcgattcagcacatcccctccttctgggacaacggcatcgcctacttcaacgtcctcgggccgaatggcgaaaccatagagttctgccagattctctgatttccggcaatccggaaattcaccgtcacacaccagtcatcgtcacacaccagtcatcgccacacacggcaacatcaatgccccggcattcccagacctttgcagaggtctgcatactcaggcacacagactttgggggaagtagtgtcatcaaaacaacgctggattgaacagcccgacggctatctcaaccgcacgccaatattgcaattcgttctcgtatcgattctcttcgccatctgggcggtgtcatcgagcctcaacgacatactcatcacgcagttcaaggccgtcttcgacctgagcgacttcgctacggcattcgtgcagagcgccttctatggcggatatttcatcatcgccatcccggcatccctgttcatcaagaaaaccagctacaaggcgggcatcatcgccggtctgtcgttgttcgcactcggctgcctgatgttcttcccggcatcccagttcgcaacctacggcatcttcctgttcgccatcttcatcgaggcaatcggcctgagcttcctggaaacctcaggcgacacctacgccacactgctcggccccaagcgtctgggcactttgcggctcaacatctcgcagaccatgaacgcactcggcctgatcgtcggcattctgctgggcaaatacctcgtcttccaggacacgaacctcaaaacggagatgaccggactctcgaaggccgcagcccaggcctatgggaccgcgcagctcagcaggacgctgtcaccctacaagtacgtgctcatcgccctcggagtgctcatcatcctgttcgtggtgacgaagttccccaccgggcgcccgaagaccaccgaaggcaagatagcctccgcaagcctgaaggagacgctctcctatctgtcgaagaacaaccgatacaagaggggtatcctcacccagttcatctatatcggcgcccagaccggcatctggtccttcacgatgcgtctggcactgaacatgttcccgtccttcagcgaccgcgatgcctccaacttcatgttgtggagctacgccttcttcttcgtcggccgcttcttcggcagttatctgctttccaagttcagggagacacgcgtgctcgccgtctacctggcactcggcgcactgatgctggtcggcacggtgttcatccacaacatcgccgccgtatggcttgcggtcggtgtcagcttcttcctcgggcccggttggccgaccatctattcacgcaccttggaaaccgttcaggacaggcggtacaccgaaacggcaggggcaatcatcgtcatggccatcgtcggcggcgcggttcttcccgctctgcagggagcgctctccgatgccacctccatgcagttctccttcattctgccggcaatcgaactgctggtcgtcgcctggtacttctggtccgagatgaagcacgacactctcaccccgcagcagaagaaggaactcgcgctggcaaagcaatgatgcagcctcggcaaggtctcgttcagcactccgtcggcaatccacctgagcgttgaacggagcgctgcacgagacggtcggtctgtgaaccaacctggcctgacctgagctcagaccagcaggaatcacgcgtgatgcccgctcccatacatatatgggcgcgggcatcacgcattcaagactcatcaggcctgagtgatggctccatacatatccgggcgtctgtccctgaagaactgttgtgtgtcctgcccggtatcgcaggaatgccccgcctccgtgtcgctgacggtcttgaacaccggaaaccagaacaccgtcggcctttccacatcgtccggattccccgcccatacctcaacgaggatgaggcagatgcgttaacggaaacgaaacgggcagatatgaacgcgaaatgttcaatgtggaggatgacacacacatcgcgggggacgagaacacgtcaccatagcctcaaaccgcacctgttccaactgaacatggtcggcaatgtgcacattggtcgacggcggctcggcggtggaagcggtggatgagcaccaggccgattcggggaagcgatgcttcggtttggactcggaaaacaacagagggcagagggcatccttgacgcattgcttcgtcatgtgcccgacccatatatgaggaggcatcggcatgacagcgtcactcagcgatatcgacgatttcagcatcgaggatttcaccaaggcttacggtgaggggacactgtcaccggtcgaggtgctggcccacaaaagcgctctgatggatcaggccgaacccgtactgcatgcgatggcgaaacgctatgacaggcaggaatcgacgattgaggctgcgaaggcatcggaggaacgctggcggcgaggcgaggcactcggagcgttggatggcgttccactgaccatcaaagagaacgtcaatgtcgttggcgaggtcaccacctggggctcaaaatcctttgcggactcagaacccgcaacactcaactcccccgtctacgacctgctcaacgccacaggatgcatcacgctcgggaaaacagccatgccggagtggggcatgctgtcgtccggcgtttcgaccgaccacccgacgacatgcaacgcctggaacgccgattggaatccgggcgggtcgagcgcgggggcgggcaccgcatccgcagcaggatactcgccagtgaacttcggcagcgatataggaggttccgtaaggcttcccgcaagctggaacggtgccgtcggcctgaaaccgacattcggccgcattccggtggaccctccctactacggccgttccatcggcatcatgggacgcagattcgacgacatcggcactacgctcaacctgacctcacaacccgattggcgcgatccgtacagtcttccgacagcggctcaggggtggctcgacacgcagcgacagctcaaggacatacgcatcggcctgctgctcgatgcgggggccggggctcccgtcacaccggaagtcaggcaagcggtgtcgaatgcggcggccttgttcgaacaggcaggggcgcatgtcgaaatactggagcctttcgtcggggacagcatcgacctcatcgacatgttctggagagccgtgcattacaaggactacgtcagccttcccgaaagcggcaaggctgtgatgctccccttcatctccgaatggtgccttgccggttcagccatcaccagtgccgaagcagtccgcggcagtgacgagcagctggccttggcaaagcggacactgaccgccaccaaggatgtcgacttcatcctctcccccgtctccccggatgtcacctatccggttgattggccgatgccgagcaatgacgtggagcacgccatgtctcacatcgccttctgcctgccatacaacatgtcggggcaacctgccgcgagcgtgaactgcggcttcagctccgacggcaaaccgattggactgcagatagcaggtcagcgattcgacgaggcgggcgtgatatggatgagcaaactctacgaggacatcaagcccgcagaggccgtggtcacctcatggccgagaatctgggaaaaaccgtcagcatgaggtccgtcaggcgatttcttcacggcaccggtcggctcatcattcctgagacaagcccgaccgcaagccgtacccgataatccccacccatccagttcctgccagtcaatcccacccacatattcctacgcagtcattccaacccagtcattccaacccagtcaccatggacccggttcgctcaacatcgtatgaaccgaccatcaccatcgaaggggaaaccatgaaagcacacaagaagggcatcgtccgtatcgtcgctgccacacttgccgcggcaagcctgctgttcacagcggcctgcgcgggaggcaccggctcgtccagcgcgtcatcggcatcgacggacctcaaagtcgggctgaccgcatcaccggccaacctcgacatgacccaaacctcaggagccgcgatacctcaagctctgatggtcaacgtgtacgaaggcctcgtgaagctcaaggacgacggcaaaaccatcgaaccgctgctcgcgaaaagctggaccgtaagcgaggatggactgacatacaccttcaaactgcagtcgggagtcaaattctccaacggtgacagcttcgactccagcacggtgaaatacaacctggaacgtctgaacacatggaaggccaacacccccagcaacctctcggcaatcgaccacgttgacacgccgtcggcggacgaagcgaaagtggtgctgaaatcgcctgatcgcaacgtactcttctggctcacaggcccgctgggagcgatgttcgaccccaaggcagtggactccctgaaaaccgaagccgtaggaacaggaccgttcaccgtcaaaagctatgctgtcggcagcaagctctccctggctcggaatacgtcctattggggcaccaaaccgagtctgaaaaccgttgaactgatgtattacacggataccacgtcctgctccaacgcactgctgagcggcgacatcgacaccatctacaatttcaccgcctacgaccagctcgaccagttcaagaacaacgacaactacagaatcgatgtcggcaacgcgcaaggcatcctggtgctggccatgaattccaagaaagcgccattcgacaatgccgacctgcggcaggcggtgatgtacgcagtcgacagaagcaaggtcgtcgacacggtgctcaacggctacggcaacgtcatctcctcgccttccataccgaccgatgcctggtacaagaaatcagatgcctacgcctacaaccagagcaaggcgaaggaactggtcaaggaatccggcgcgggcaatccgaccatcaacttcaccgtgccaagcctgagctatgcgcaatccatctcccaggtcgtcaagacccaacttgaggcggtcggtttcaccgtcaacctggaaactcaggaattcccggcggtctggcttcagaacaccctgaccgacaagaattacgatatgacggccatcctgcatgtcgaaccgcgcaatgtcttcaactacggcaactcggattactactggaactactcgaatcagactgtccaggatgcctttgccaacgccaagaagagcggcgatgacgaggagttcaacagctatatgaatcaggcaatcacccagattcagaaggacgcacccgcggactggctctacaaccccaagctgctggtggtcaccaagaacaacgtcagcggcatcaacaagaacgatgtcggcatcgccttggacctgaccggcgccaagcgctcctgataccgcggcctcaagtcccctcggaataaccaccggtgcgcatccccaggatgcgcacctctttcttatcggcgtgcaggaaaacggcacacacgcactccatcacgcagctgaaacagagcacagtgcggacaccgcacaccggcagtattccacgcaatcacctgaatatcgaccagcacaaggaagctcaatgcaggacatagacataacatcagtgggcggattcgcctatgcgaactacaccgatgacgtgggaggaaccggtgccacggtgtttcttttcgaccatctcagcccggccggggtcgccatacgaggaggagggcccgccagccgggagaccccgctgctggcaccagtcgcctcatcctccggcatccacgcgttgatgctttccggtgggtctgcctacgggctggacgcggccggaggtgtcatgcggttcctcgaagagcaaggcacggggctgcacatcagagaggcttgcgttcctcttgtctgtcaatcctgcctcttcgacctgcccgtcggcgaccagcacgctcgcccgaatgcccagaatgcttacgatgcatgcttgcaggccaagcggagcgtattccagaacggcaatatcggagccggaacagggtgctcggtcggcaaataccatggcatggagcacgcgatgaagggtggtctcgggtcttacgctgttcaggtcggtcaggtaaaaataggcgcggtcgtcgccgtgaatgcgatgggagatgtgtacgcggcaggttcaggaaccactctcgcaggcatgcttgacgatacgaacactgcattcgaatcctcgttctcatccatgattgaagatatggagtccgaacggcatgcacccgagggaaacaccaccatcggcgcggtgttcaccaatgcgggattggataagtcggcgctgacgaaaatcgcttccatggcgcataacggttatgcgagaacgatacgtcctgttcataccagcgtggacggcgattccatctac

SEQ ID NO: 3605 - DNA, 22964 bp, synthetic construct
  misc_feature 1..22964: note = Synthetic
  variation 475: note = note, n is a, c, g, or t
  source 1..22964: mol_type = other DNA
  variation 12680: note = note, n is a, c, g, or t
  variation 1915: note = note, n is a, c, g, or t
  variation 6874: note = note, n is a, c, g, or t
gtctatgataaattcatcattatttgcaagactagttcgtaaaatatctaataaagctatattgatagtagttggggatgatgctcaacttccccctattggtgctggaaatgttttaagtgatgtattgtctttagaattagcgcctatagtaaaactaacaaagatatatcgtcaaagcgaagatcaggctataactttaatagctaatgatattcgtaaagggcaggtacccctttatagacaaaattatgatgactttgagtttatggaagtaaatattcataattattattctctaaaaaatcaactatcccaaaatgaactacacgatttacgtgaggataatgcctctcaaatagtaactaagatagttttaaaagtagtagattctatagataaggctaggctaagactaaaacataaaaagataaaagagtatctaaactattttcaggtgataacacctatgaanggtggtacacttggctcaaataatctaaataaagtacttcaagaatattttaatcctaagcctaaaaaatgcgtgaaaaaaggtgacggagaatttcgtctaatggataaggttgtacatactaaaaatgaaaatatgacatcatggtcaagtgatgcttttaaaaatgctgaggactcaaatcaaagacgtatatttaacggtatgagtggtttactttttaaaattgaagaagaagatgaacaggtatttgttttttatccaaatgaggatgtagtagttgtatatgaatatgaagaaataaagtcccatcttatgctttcttatgccctaactatacataaagttcaaggtatggagtatgatatagttgtaatacctatgagtttttcacattttattatgcataatactaaacttatatatacagctataacaagggctaaacataaatgtataattataggtgagagtgctgcttttgagagtgcttgtaaaaaatttgaggtaactcgtagggatactgtacttttagagttgtaaatatgtaagatttctggctctagattaataatatttttatataatatttacaataataattaaaggtaatttgtgagattttttatgttttttatgtttttaaatacttttttatctgccagtaatattttagaaattaaacaagcaaataatgcatatgcagttggtaagtatgtaaattattatgtagatgatacaaatagtttgaagcttgatgatatacgggaaaaagcttttatagtacaaaataatgagattattaactttggatttttaagaccaacttattggttcaaaatgagctttaggtacaatgaggctatgcaaaataatatatggtggttagatatagactatccattattggattatgtagatatgtatattttagatgaaaatggagaagttatttctcataaacagtcaggtgacttaaattataaaatactaaaggatatacaacaaactaaagttttattttcattaccatatcaatctttacaaatttatacagtttacttaaaagttaaaactagtagttcaatgcttcttcctatacggataataagtaataagtcactttatagttctacatacattagtcaaatattatcaggaatgttttatggtatcctattaatattaattatttataatgctttaatctatatatttacaaaagaaaaaatatattttttatatatattatttgtagtctcatacggcatatggcaactctcttttgatggtattggttccttatatatctgggataataatgattggatgagggagaaggcttcatctgtatttatatatgtaattggttttactttattattatttagtcaatatttattaaattcaaaaaaaaatatcccaagatataataaatanttattaaatcctttaaaatatatatcggctgtaggtatcttagtagcgattataattccatataaatatagtatagtatttggagcattattatctattttattaccaagtatattacttatcgctggtatattagtacttaaaactgattataaatttatacgtttatttgtactaggttgggctatatttttattgggtactatagtttttaccttaagcaagtttaatctagtccctagttatatctttatgaaatatatacaacaaatggcttcaagtatagagatggtttttgtttctttagctttaagtgtacgttttagaaatttacaagagaaatatcatactaagctaaaaaatcataatgaggatttagaaaaggctgtgaatttatctataaaaaaagaaagagaaaaagaacaaatccttatacatcagtcaaaaatggctagagctggtgagatgatagaacaaatagctcatcaatggagacagcccttaaataatataggtttattaaatcaagagttatattttaaaaagaaactatcaaatttaactgataatgagtttgatagtattcataatcaaatcgatactaatattcagcatatgtcaaatactattgatgattttagaaactattatgataatacaaaagaaaaagttacttattttttaagtgaatctgtaaataatgtttttagcattattgaggctaccattaagtaccataatattaaaataaatttagatattatagatgatagaaaggttcataatgtaaaaaatgaacttttacaggttattttaaatattataaataatgctaaagaagctttagtaagtaaaaaaataaaagataaaaaaataaatatttcaattagggcgcatgaatctaatgcttatatttatatagaggataatgcaggaggaattaataatgatattatttcgaaaatatttgattcctatttcacaactaagattgatacaaaaagtagtggtattggattatatatgtctaatgttattgttgaaaaaaatatgtcaggtttattaagtgtagaaaacataaatgacggtgcaaggtttattatacagttgccattacataagtaaggttttcctatgtcgtattttatactttaggagttatagttttgataaataagtctaatatattttctttaatcccaaaagatttaccagaggaattatttgaagatattatctctacagaaaaaataaaaattgagcgtataatctctaaaggtaatattagtaatgagtggtatgagcaagataaaaatgaatgggtaattttacttaaaggtggggcgattttaagttttgaaaatgaagatgatgtaagtttaaatgagggtgattatataaatatacctgcatataaaaaacataaggtctcttggaccaaagaggatgttgagactatttggttagctgttttttattaataacttatgctaggagaaaaagccttagttgaaagatttacagtttgaccgatttttaggcatttggcttcactttcattaatgactacttcaactagttgttgtccaattgagactatagctatgaaaatcacatcaactttttttatttccaataactcccctgagaatgagaatttttggcttccacttgttttaagtagtacttttttagctgtaccatctttaataattttcccattatctagaataagtacccttgaagatagtttatatatctcactagggtcatgacttaccattatagttgtggttttaaactctttatgcaggcttaaaatctcagtctgtagttttgctctcatctctgaatcaagggcagataagggctcatctaaaagtaaaagtttgggtctattcatcatagctctacataaacttactctttgtttttgtccaccgcttaaagttttagtagatctattttttagtgcagacaattctgttatttgtagtaaatgagatgctagatttatatctttttttacaaataagaggttttgtaatacggacatattttcaaataatgcatagtcttgaaaaacaaaaccaatgccccttttttgaggaattaaggagtttttttcatctaaccaaatttcaccattgacctctatttttccttttgctttttcaagaccagctaaaatccttaataatgtagtttttccacttccacttttcccagatatggctaaaaactctccactttttatctctatatttacatctaaatcagtatctttattaataccatgtaagtttttatgtatttgaatttttatcattttataaatccagagaatttttgtttatggttaaagatatatacagataaaagagttaaaaaactcataataagcataagtccgctatatatgtgtgcagatgaataatccataatttctaccatctcatatattgcaactgaggctactttagtctcacctggtatgctcccacctaccattaaaactactccaaactcaccaactgtatgggaaaaagttacaatgattgcagttaaaagtgctggttttatatttggtatagctacttttaaaatagtcactatcttgctttttccacttatatatgaggcctctagcatatttttatttatactctcaaaaccactttgcagaggttgaaccataaatggaagtgaataaaaacaagatgctattacaagtgagtgaaaattaaaaactaaatcaattccaaaatactcatgaaaaaaggcaccaatgcttgagttatatgagagggtatatagtatgtaaaaacctaaaactgagggtggaagcacaattggtaaggctgttatagcctcaagtactggtttgatttttgaatgtgtttgagataaataccaagaaagaggcagagctaaaataaaaagtataagtgtagttagtccagctagtttaaaagataaaataaatggtgtatagtttatgttttgtaaaatatctaacattaaaaatctgctaacatagataattcactagcttttattagaagtaaaatatcatcaccaacttgtaaatccatccttttacaagatttaaaagtaattatagattctaagattgtattatttaattctgcttttatagaactaagaatttgtccattattaatagaagatattttagcctttatttggtttgaataacttaattcaccgttaaagttcttagctatagctacattagtggcttttgcagataaggtaacatttataccaattttaatattttcatttaaatctaaactaaccatacttaaacttataccattaaaatcaaaacttacaagattaagattatttagactttgtatatcagttatttttgcagacattttattcatatatgaataataacataaaaatatagtaaaattacaacattaaatttagaaggatagttatggcatatgctacagcaagacacattttagtagatactgaagaaaaatgtaatgagttaaaaatagagatacaaaatggtgcatcttttgaagatgtagcaaaagagaattctaactgcccatcaaaggctaagggtggagacttaggtaagttcggaccaggacaaatggttccagaatttgatgaagctgtatttaatggtgatgttggagtgctttatggaccaattaaaactcagtttggttaccatttacttgaagtaacttcaagaggttaatttatattatggtaaaagtatctgcaattcaaatgagtatgcttgaggataagtctgctaatataaaaaaggctgataaacttgttcgagattcagccttaaatggagcgcagataatactcttacctgaacttttttcctctctttatttttgtaaagatatggataaaaaatatttcaccctagctacagaactaaaaaataacgagttaataaaacatttttcagacttagcaaaagagttggatgtagttatattagttagttattttgaaaaatcaaaagagggctattttaactctttagtagttatagatgctgatggtagtattatggataattaccgtaagactcatataccagatggagctggatatgaagagaaattttactttaagcctggaaatacaggttttatagtttataatacatcttatgcaaaaataggagtaggtatatgttgggatcagtggttttgtgagactgcaagagccttatccctaaagggtgctgagattattttttatccaactgctattggtagtgaacctgaaattaagctagattcaaaagagcattggcaaagggttcagatgggtcatgcagctacaaatacagtgccagtagttgttgcaaatagaataggcaaagaggatggtgagagctgttctttaactttttatggctcctcttttataactgactatactggggctaagatagctgaggcatccagggatgaagaggagataatttacgcagaatttgatttaatacaaattcaaaaacaacgtgattattggggtttattaagggatagggtacctgaatcttatggtgctctattgatttaattagctagatttatataagtggaattaaatttgctttaaaataagaaataatacataaaggtaggatgtatggaaattgtattaagcaataatctgattcttatcaggacagattttgagaccttaaacgctgagtggatgaaagaatttttaaaccatcactctcgaggcatgctttttttaccaaaggctgttttagtatttcgaaatgagaccttaacagaagtaagagaagaatttttaagcaccctaagtcaatatcatgccaaaaagcatgacttttcccatgagttttttcttcgttcaatgttaaagtatgggaatcaacctataaaaatagagttagataancttcaaaatcaagagactttaaaagtaaatctttatgcttatgataaggatacggttttaatctccttaaattatccaaacccttgggtagttaattatcttcgttcccaactagaagtatatgtagaacgtggaactgatatatctttagttgtagatgtttcagactatagggctaaggctagattagaacgtgcattaaataaacgtcatattttacattatcagattcaatatacttatgacaatcattttatgagtaaattatatagtgactttgcatcatttagttttggtaacttatgttcagatgacgaaaatgatgaaaaccaacatttttatacagttctagaatgcccaatcggagcttctcaagatacacttaaaaaatcgtataaaaaactagttaaggtatatcacccagataaaattattcatgaagaaccacatatgattaatcattatactcagaagtttcaactacttcaagaggcttatacagctctaaagattattagttaaacaaagatttaattaacttctgagactttgcattttttacaagggcttcaaagtcacttgaggtatataaggctaaatccttgccttgattaagtttaagttcttttgaaaaaccccttttagaaaataagataatttgtgtaggttttatctctaaacgttcacatttttctaatattttactccattcacttttatttaccttgtggttagtccatttacattctccaacataagttttttcatcttttgtaatagttaaaatatcaatctcaatatttgcatcccaataacttccactacttagtatctcagcatctctaaggttatagttaagtaaaatttcggagagctcttcaaatactaaacttgtatatgagttttgtttctcttgcaaatttttaaaaaagctttcataatctttattggctatttcatgataatgtggagctataaagtaaaaccaaaaacgtataaacgggtaagtaaaaagtaccttatgagagattctatgtctagctacctccctttttagcttagagtagttgtttaaacttcttgctggttcctcacgtgaatactctatttgaataaggcctttttcttgaaggtaattaagacaacgtccaccattactattgtttagtccagctctgttaaaggctgaaaatatacgcctatcacctatagctaaggcacgtaaaagtcttttattatttttatcatctagggtcaattgtctaatgtttttactaatattttcaaaattatcaaagatgagtccatgcagtaggtctggtatagacttttgtgtatctacatctacgcccaagccaccgaagatagaaaagtattctatttgtatctccatatcatctggataatttcttgcgtaaaatgaacgaaattgttctaagagcttatagttagtcatataacaattttagcataaaaagattacaattcgctagcccattttaatgcgtcaatgccatatttttctcttaaaacatgtgtctcttctgtgagtcttttcattttttgctcatctgcaaaacctattaatgataactctttttttgaatctcttgtaaaggatgaacagttaatacttaaacgaattacatgtaaacgtttatgtatatctgcctcattaaaaagatttattaaaatattgttaaactttttttctgtaaagatttcactaagacttaggtttttatgactacttaaattcatctcataagatatacttagatgatatacagttgggattacttttagttttaaaattgcgaaactaaggtgacgagctaatacatgtagccttcttcttaattcattcctatcaaatagtgggtctatagttctagagattccaatggactttcttttatgacttgtaataattggtgaatcactaagcccagtaactcttttgcatatggaccccaagattctatagtgccacgtctattttttaaatcaccaagtgtatggatatgtgctgattttaaacgttgtttcatacttttaccaactccagcaaagtcaccaactgctatgtttttcataaataaatctatttcatgttgcctaactatcttagagccaaaaggtttagcactagaggtagccatctttgccacatatctagtttttgctgccccaatggatactgggagttttatatatttttttatctcatgacgtagattatctataaactgagctacatcctcatcatctacccatccatttaagtctccataaaattcatcaatactagcctgctctacaagtggaatttttgtacataaaaactcatggagttgatgtgaaagttcttgatataaggacatatttggggcttttataattaagtggggacaaagtaaaagtgcatctcttatattcatggcagttttaataccaaatgccctagcttcataagaggatgtagttaaaattcccctaactattccatctttatctttaaaagcttcaatatcatcgtctttttcttcatatgttttgtaaaatgttgggacaaatgaacctgaattctctaagtttacagtctgtttttttgcatctttattaaaaatcttagtatcactacgcccaccaatagctacaggtttattttctaattcaggatgaagtaagcgagtagcactcacaaaaaagcagtctatatctatgtgtattttcataatttttcttaatatgttataattcaaacataagtgattcgaagagttaaactctcctaatcttaaagttgactttgaatttccagattctaaaagtcaactttagcctaaaccttttcataggttcgtcttatgttggtttgtcccgtactagtaatcattgggtacatttaaattatactcacatcaaaatataaatctttaaaatattgcaaattgtcatggacttattgaaaatatagtgggtaagtacggtatttttagggtggatgaccattggtcagtgccttgcacagggaaccgcaacctgtttattatagcccactcgtttctcactcggataaactattaataatatgatataattattttctttaaaggattattaatgtcaaaaatagttttaggattagacttaggaattacctctattggttgggctttagttaatgttgatgataaaaatctacaaaataataagattatagaatcaggtgtacgtatatttacaatagctgagcatccaaaagatggcaagtccttagcattgccgagacgtgaggctagaggtgcaagaaggactactaaacgaaagactcaaaaacttagggctatcaaaagacttttaataaaaaataaaatacttacccaagatgaactagataatctttttatcggaaataaaaagcaaaaagatgtttgggacttgaggaaagaagctcttgatagagggttagataataaagaactttctcgcattatgatacatcttgcaaaacataggggttatttttctaatcgcaagagtgaaaaacctgataaatcagataaagaagctactgctgttttaggcggaattagtataaataaaaaagtattagaagatacaaagtatttaactattggtgagtatatatctacaaaaaataaaaaaagaaacggtaaagacaaagagggaaaactaaagtatgaaaattctgttgaaagatatatgcttattgatgaaattactactatattctcaaaacaaaaagagtttgctaataaagtagttaataaagaactactaaaatcttataaagatattgcttttgaacaaagagctttaaaatcagtagcccatatggttgcaaattgtccatttgaaactgatgaaaaaagagcatcaaaaagcacatatacctttgagtattttcgtgccttacagaaattaaaaaatctaagaattataaaaaatggtgatgaagtagaattaactattcaagaaatacatcaagctattaataaagcaaaaaatataggtgtatttaaataccagactttaaaaacactttttaattttgataaagatgcaacatttaaaggtcttgtttattttgataataaaactggaaaaaaagcaataaaaaacccagaattacaaaagttattagattttacagcatacaacaaaattagaaaagtaattcaagaagtagatagtatatactgggaaaagataaaaaatgacaacgatactttagattcaatagcaaaaattttaacaactgaaaaaaatgacaatgaatctataaaacgattaaataatataattgaaaataaaaaggtttgtgatagtttagtatctttatctttctcacagtttgggcatttaagttcaaaggcactaggaaaaattattccttttttagaagaaggtttagattatgataaggcatgtgataaggctggttatgattttcaggctatttttaaaggagataaagcaaaatttcttccacctttaagtagacaagaaaatttagagatgactaatcctgttgttaaacgtgctatatcccagatgcgtcttgtttataatgcagtagctagaaaatatggtgctatagatgctgtacatatagagtttactagggatataaaaaactcacatgatgacagaagaaaaatagaaaaagctcaaggtgaatttcgagatacaaaagaaaaagcgagagaacaagctgtagataaattaggaaaagaaccaaatgcaaaagaacttctgaaatttagactttgggaggagcaaaatcatagatgtatatatagtggagattatataaatccaaatatattatcagacccatatgctacagaagttgatcatatacttccatatagccgttctttagatgattctttaaataataaggttttatgtcttacaaaagagaatcaagataaaggaaataaaactccgaatgagtatatagatagctctaaatggggtgaatttgtagttaggctagagggactgaaaaatctgaaatttgcaaaaaaaggaagattgttaaaaacaaattttgatgaaaatagcgaaaatgcttttaaagaaagaaataaaaatgatacctcgtatatttctaagtttgtaaaaaactatattgaagcccatataggttttaaagagtcaaaaatgaaacgccatgtatataccatgaatggaatgttaacagctcaacttcgatataaatggggtgttggagataaaaatagagataatcatcttcatcatgcagaggatgcgataattttagctttttcaactcagtttatggttaaggctttatctactgtttctgcaagaaaagagacggaaggttttaaatataaatcaaaagaagataaagcaaagtatttaaggtttattgttcctattgatgaatttcataaacaagttaaagatagtttaaaaaatatatttgtttctcatatgccaagacgaaaggtcggaggggctgcccataaggctactatatatagtaaaaaaactttgagtatgaaaaaagaaaatggaaaaattgacactttaaaaggtggaagtgttattaacaatgtaaaactaaaacatggaatagctttgaatgatgctatgcctagagttgatttgtttcaaaataaaaaaacaaataaattttatcttgtgcccatatatgtaaatgactttgttaaagataaactaccaaataaagcaatagtggctggaaataagctatggatagagatggatgaagattatgaatttnaattctcttattataagagagatttgattcaaattaaaactaaaaaaacagctacaaaagaatctgttcaaattttgggttattatgatagcactgatagtggaacggctaagataatgtttaaggaacatgatggaagtatagaatatggtcgtggtgtacaaaattcattatctataaaaaaatatcaagtagatgccttaggaaattatgttgaggtgaaaagtgaaaaaagacaagggactataaaagagggcaggaaatctaaaaaaagtaataagtagattccgtatcaagtacggaatgacgaaggagtgtatatgagtgcatggcggacaattttagttactaagccttgtaaacttagtatgaaagataaacagcttatttatgagcctaaagatgaagagaagattactgttccactcgaagatataacagttatagttttggaaaataatcaatcaagcataactacagcatttctaagtgagtgtgcagagaaaaatatagcattatttacatgtgataattatcacatgccaaatggttgttttgccccttttcatcaacactcaagattttctcaaatttctcatattcaaagagatatgaaactcccacttaaaaaacaaatatggcaacaaataattaatcaaaaaatttcaaatcaagcacaacttttagagtactttgaaaaagacaactttcaagtaaaagttttagttgataaggtaaaatctggagatagtgaaaacttagaggctcttgccgctaggaaatattggggtttactatttgatgattttacaagagaccaaaaaaaagtagacccacgtaatattgcactaaattatggatatgcaatagtccgtggtgcaattgctcgttcacttgtttcttacggacttttaccaacttttggagtttttcataactcggatttaaacgcttataacttagctgatgatatgatagaaccattgcgaccaatggttgatatggtagttaaaaaattagagattgaagatgaacttgatgttcacatgggggttggtgtaaaatcagcactcttaaatgttttagttatgcagatgagattaaatgatgaaaatataactgttttaaatgtttgtgacattatggctcattcatttgtaaaatcaatgaagttaaatgatgttggcagtttaaagttgccattagtattatgagtgagtctaagtttatgtggatttttgtattttttgacctacctacaaaaacaaaaaaagagcgaaaaaaatatacagattttagaagatttttactaaaagatggttttataatgatgcagttctcagtttatagcagaatttgtaagggagatgatagtgtagatactcataaaaaaagagtaaaagagcatcttccatcaaaaggtcatatccggatgctctcaattacagatttacaatactcaaaaatggaaacactcgttggtgtaaaaaaagaggaagaaaagttagagaaaaaacaacttttattattttaaaattgggtaaaaatgaaacaaaatattcttcaaatcaataagaatattttaaataagaagagaaataggtataaaaaaatacttaatcttgtttgttattgagtcttttagagatattttaaaaaaaataatcagctgtaaacccacccatgagatgggtctagaagcttgaagtatagcacatccgagtgagaaagggggctataactaactttttatagttagccaagaggcttaaagtatagcacatccgagtgagaaagggggctataactcaactagataagttaaaaagcttattagagtatagcacatccgagtgagaaagggggctataacctgccttgatttagaatctacctcaagactagtgtcgactttaaatttctagattcgaaaagccaacttttgtcatagcttcgctttatcttactttgtcctatgcgagtaatcgtataggtacacttaaatatattacatattttcattttaattctaaataattatatatatagcagattctgccgatagtataatcacagaaataatacaaaaaaaaattacaaaaaaatatggataaacattgaatattaaatatttactagtaacaataacattattgttttttacagcttgtggtagtaataatagtagtagtgctactgctaaaactgtaacaggggagtttatagatgagaaggtacaaggtttaaaatatacctgttcatcaggtgaggcaggtactacaaatataaatggcgagtatacatgtaatgttggtgataatgtatcattttatttaaataacatccttatgggggctagtgtatctgctcaaacacttccaattactccatatagtattttcccaaatgataatgcagctgcccttaattttgcaagactgcttcagtcgttaaatacaaatagtaatacaaatgttattgagataaatactagtttagaaaataaaatattaagtgatataaactttagtagtgcatcctttgatacagatgtagagacatccttaggtataacattagtaagtccatctattgcgcaaattgcaatgaatactgcgattttatctgttggggctagtataccatctgatataaataatatacctattgcagattcaggtgctgatttaattgttgcaatatcttctactgtaagtttaaatggtttagctagttcagatgcagattcaaatgccctaagttatctatgggagataaaaactaaacctaatgctagtgtagctacgctttcagatacttcatcatttcagccaagttttacagctgatatagatggaatttatattatagagctcatagtaaatgatggatatacaaatagttccatagatagcataaaagttacagctagtactacagctattgtccctgttttagaagatgcaaacatttctgtagctgaaaatgcaatagctgggacacctataggaaacttaaatataacaagttcgggaagcagtatgataactgctataacactaagcggaacaggaaatgagaactttgaagtttcagtattgggggcagtatctgttaaggttggggctgtatttgattctaatactacagcaacttacaatttaacagctattgcaacaagttcatcaggtaactcatcaagtgtaaatctagttatatcagttattgctacctctgtttctgtttctgttgttccaactttagctaactcaacagctagcgtttcagaagatgcaagtactggtgatgtagttggtaatatgactattagtagtagcggaaatagtgttatcacatcaataactctaagcgggactggtaatgaaaactttgaagtatctacgtctggagttattactgtaaaagcaggtgcatcattagattatgaaacaaatcaaagttatacacttacagctatagctacaaattcagctggaaattcaaatagtgtaaccgtaagtatatctgtatcaaatattgtagaagttttagctttagcaaactcaacagcttcagttctagaagatgcaagtactggtggtgtagttggtaatataactattagcaatagtggaaatagtgcaattacatccataactttaagtgggactggtaatgaaaactttgaagtatcaatagctggagttattagtgttaaagcaggtgcatccctaaactataatacaacaaagacttataacttaagtgctatagcagtaaatgcagaaggaagttcaaatagtgtaactgtgactatatcagttgtaaatgtcttgggcaatgttgcagttttatctgcttcaactggagccatatctgaaggggcagctacaggtagttcagttgggagtatttctatcacaagtgtaggcgatagcaatattacggcaataactttaagtgggactggaagtggaaattttgaagtatcaagtgctggagctattactgttaaatcaggtgcatcattagattatgaaacaactcaaacatataatcttacagcattggcaacaaatgcagaaggaaattctgctagtgtaagtgtaactatatcagttttaaatattgtagaggtggcaagtttagttaagtcaagcggatcagttgatgaaaatgctactactggtaacttagttggtactataactattacaagtgcaggtgatagtaatattacggtaataactttaagcggaacaggaaatggaaactttgatgtttcaacagctggtgtagttagtgttaaagctggagcatcattggattatgagactactaaagactataaccttacagctatagcaacaaatttagcaggaaattcctcaagtgtaggttttaatatatcaattttagatattttagatacagctactttttttataaaatcagcagtttatgataataatgcgacctcctcagttgctgatgataagttatatatatattttgatcagactataaagtctagttcaatagatacaaatatgagtgcaaattatacattggctggtactgggtttattggttcggcgtcagcaagtgactataacgacactatattccatcaacatattatctccttagacagtgcttcaaccgccttattgataaatgatacaaatatatcaatagctactggtatcttaagggatacttttggaaatcctagtatttatgatgccaatactacacaagctcagaagtttagagtattgcttaaaacggagttaactatatcttatccaaacaatagttcaagtgatagggatgatggatattatgaaaaaggtaaaactaggtcatatacggataatgccaataatacaataaccgataatgtgactggacttatttggcaaaaagaagatgataatacaactaagacatgggcggatgcgtctacgtactgctcaggactgactttaggtggatctagctcttggagggtaccaaatatagaagaattaagtagtttatcggactataatagaactaatccttcaataaattcaatctttacaagtacagaatcgtatcattattggagttctactgtttttgtaagtaatactgcaaatgcttttactgtaatatttgatgagagtgtcttatcttttataccaaagacaagtacagttagtatcagatgtgttagaactgggctataaaatgaacaatataaaaaggatagtttaatgaaaattatttttataatagcgataatatttaacttgcttcaagcggattacataagggatgatgcaaaagagataatagtagatactactacaaacttaatttggcaagataatgctactactgcggcaatgacatggagtagttctatcagttattgtgaatcattgagccttggtagttttagcgattggcgtttagcaaatatcacagaattaacttcattagttgactttaccttatctagcccatctataaacagtaagtttaaaaatataaatactaatcattattggtcatctactacaaaaaaaagtgatacattaagtgccttggatattaactttatatatggaaatcatcatagcgaattaaagacggcatctttatatgttagatgtgttagagctggacagtaggataaactgaagtagtgtttctgaagtaataatttcgtcattgtgaagtaatgttttcgtcattctgaagtgatattttcgtcattctgaacttgattcagaatctactaaagccacacgtcattttggaggatgaggtcagtgccttgcacaagaaccgcaagctatttattatagcccactcatttttcactcggacaaactattaaaaatatgaaataatatttaatgaactgattagtaatagtatcgtgttttcagaaccaaatagtgcagaagatagaagaaatgcacgaagttctaggcgaagaaatgaacgaaagagttctagaaataaacatgctagaacaatatgtacaaaatacaatatagctaaaaaagattttatatacaagacaactcagtatctaaactcattaaatattaaagataaagatgtttatgaaaatataaaagagctaaataaagctattgaaaaatatatttaaataatttttgtattacttaggaatatacatttaacttatttacaattttattgtatcatttcactatatacaaataaaaggactaaatattgagattaaaagatgtttcaatcatcagaactggattagtaacagcaagaaaaaaagcttctgcagttgatagcgaaatcatttcgtataaagcagttactttaaaatcttttaacactaatggcagtttaatagttgataatttagatacttttgtatcaaaagaaaaaattaaagagacttacttaacacaaaccaatgatgtgttaataagactcagagaacctaatattgctgtatttatagatacagacaatagtggtttagttataccctcatttgtagcatctctgagagttgatgaaacaaaagtttgtagtaagtttttaacatactaccttaactctactactgctaaaagagcattaaataattttataactggtacagcaataaatatgattaaaactaaagagttagaagatttacagataaaacttccatctttagaagagcaaaaaaagatagtggagtttttagacttaacaaataaagagatagatttacttagaagtttgaaaaatgaaaaagaaaaatactactcagaagtatttaacaatatattaaaaatggagcaatcaagtgagcaaaactagcaaaagcgattttgtggaacaaaaagtttcctcgaaaacaagtcaagaaacaatcaacgctatagtatggaaagcatgtgatacatttagaacaactatggatagctcacagtataaagattatgttcttactatgttgtttgttaagtatttatcagatttttatagagaaaagattgaagagttaaaagctaaacatggagataatcaagagagaatccaaaagagtttaagtcgtgagaagtttaaacttgatgagaaatgtacatttgagtatctattaaaacataaagaatcagaaaatcttggtgaagaaatagataaagtattagaccgtatagaagaagacaataaagaaaaacttgatggggtatttagagagataagctttaatagtgaagcagtttttggaagaactaaagaaaaaaataaaatacttaaaaatttacttgaagattttgcagatgtaagactcgatttaagaccttctatattgaaagacaatgatgtaattggtgatagttatgagtatcttatttcacactttgcaggtgatgcaggtaaaaaagggggcgaatttttcacaccaagtgctgtatcaacattactttcaaaactagtagaagcaaaagagggagatagaatctatgatccaacttgtggttctggttcacttcttattaaagcttctaaagaagttaaaagtgacaactttagaatctatggtcaagagagtaaaagtgcaactgtagcactatgcaaaatgaatatgtttttacataatatcaatgattcagttatagagtggggagatacgataggcaatccacttcatttagagaatgagcatctaatgaagtttgatgtagttgtagcaaatccaccatttagtttagataagtggggtgcccaaaatgcgagtgaagacagatacaaaaggtttgagagaggcgtaccaccaaaaagtaaaggtgactatgcttttttactccacatgatagcttcacttaacgagcatggacgaatgggtgtagttctccctcatggtgtactttttcgtggtgcgagtgaggggaaaataagaaagcaacttatagaagatgacaacttacttgatgctgtgataggcttacctgcaaatctattttttggtacttctatacctgcctgtataatggtatttaaaaaaggacgaactagtacagatgtcctttttatagacgcaagtacaaaagagcattttaacaaagcaaaaaatcaaaattttatagatgataaacatatacaaaagatactagacacttatacaaataaaaagacagaagaaaaatactctcatatagctacacttcaagagatacaagaaaatgattataatctaaatatacctagatatgtagatacttttgaagaagaagagatagttgatatagaagctactaaaataaatatacaaaatatagaaaaagagttggttgagataaaatctaagatgagagggtatcttaaggagcttggcttatgagtgaaatgataatttatcaaaatgaagatggtactactgaacttgatataaaactagaaaatgaaactctttggttatctcaaaagcaattgtcggagctttttagtgtaacaaccgctactataaatgagcatataaaaaatatctataaagaaaaagaactagaagaaaatccaactattaggaatttcctaatagttcaacaagagggcaatagaaaagttaaaagagatatagaacactataacctcgatatgattatatcagttggatacagagtaaagtcaaacatcgcaacaaagtttagacaatgggcaactgcaagacttacggagtacatcatcaaaggttttgtaatggatgatgagaaacttaaaaatgctaaaaatagttactttgatgtgttacttgcacgtataagagatatacgaagtagtgaaaaactattttggcaaaaggtcttagatatttatgctacgagtagtgattatgattcaaatgatgatacatcacaagattttttcaaaactatacagaacaaaatgcactttgcaacgcatggaaatacagctgcagagatagttcaccaaagagtagatagtacaaaagtcaatcttggtatgacaaactttagtggagtaaagcctactaaaagagaggtaagcatagctaaaaactttctaaacgatgatgagctagatacattaaacagaatcgtaacatcctacttggaatttgccgaacttcaagccaagagaagaaaagtaatgaaaatgcaagactggataaaaaagctagatgattttttaactcttggtgattttgatgtactacaaacaaaaggaatcatctcttataaacaagcacttaaaaaagcaaatgaagagtatgacaagtacaaagccatagccataaatgaaaaaagtagagttgaaagtgattttgaagatgctataaaatcaatagagaataaaaatggctgaagttattagaaaagggtataagcagacgaaggttggggttgttcctgaggattggaaagttgttagggttggagaattaggcagtttatctggaggtggtacaccaagtacaaaaaataaagaattttggaatggtaatattccttggatttctagttcagatttaactgaaaatagtatttataacattaagattagtagatatataacagaagattcgatacaaaactctgcaacaaagttagttcaaaaaaacagtatattaattgtatcaagagttggagtaggaaaagtagcaattaataaaaatgatatttgcacaagtcaagatttccaaaacttaacattaaaaaataacaacaccctatttattgcttatttaattaaagataaaacaaaagttttaatttcatacaatcaaggtacatctattaaaggttttgtgaaaagtgatttacaaaatttaaaaatctctctaccacctctaaaagagcaagaaagaatatccaatattttaagcacttgggatgatgctatctcaaaacaagataagttgataaaagctaaagagaaactaaaaaaaggattaatgcagaagcttttgagtggagagattcggtttgatggcttttttgatgagtggaaatttacgaaacttggatatttattagattatatacaaccgacaaagtatttagttgctaacaaagattatgacaatagttataaaatacctgtactcacagcaggtaaaacatttattttgggatatacaaaagaagaaaatggaatatttgaagaagatttaccagtaataatttttgatgattttacaacagctactcagtttgttgattttccttttaaagccaaatcatcagccatgaaaatattaaaagctaaaagtaaagatgtgaatat

SEQ ID NO: 3606 - DNA, 22937 bp, synthetic construct
  source 1..22937: mol_type = other DNA
  misc_feature 1..22937: note = Synthetic
tccatcaaatctcctctgaaaatataaaattagggtgggattatagctaaaaaaagttgtatttactattaaaatttacgttttttgaattttttttaaaaatgtagctagtgcggataaaaacaatacgaggaaagctccccgtatcttgtagattactctacaaccggctcgtggttagagcgttgttcatctgtgacatcatcacgatgctctggagactcaccaacagcatcccaagtgatacaaccctcagttggacatgctgtagcacatgccggctcatcatggtgtccaacacactctacacatttgtcaccataaacatagtaaatctcttcaccagttggattatcatcttcatctacgatagcttcaaccggacactcatcaatacaagcaccacagttaatacatgtatcattaattaatactgccattgttttctcctaaatttatttcaagtaactatacaatgaagagttttaaaggtagctaaaactcattgtatagctccgattatgtaatatatcgttacactttttagatgtcaagatactctttaatcgcatcaactctatctgttttttcccaagtgaaagtatcttctactctaccaaagtgtccataagcagctgtttttctgtaaattggtcgcagcagatcaagatctctaatgatcccagcaggtgagagatcaaaaacctctttgacacacgcttcaagcttagactcttcaacacttcctgtaccatgtgtatctaccataatagatacgggttgcaccacaccgatcgcataagccacctggattgttactttatcacacacacctgctgcgacaagatttttagctacccatcttgcagcatacgcagcagatctgtcaaccttggttggatcttttccgctaaatgcacctccaccatgcgggcatgcaccaccgtaagtgtcgacaatgatctttctccctgttagtcccgcatcaccttgcggtccaccgattacaaacttgcctgttgggttgatgtgaaacaccgtaccctcatgcatcatctcagcagggatcatttttttgatcacctcttcgatgatatctttgtggatctgctcttgatccacttcaggtgcgtgttgtgtggaaacaaccaccgtttccactgaaacaggtttgccatctttgtatttcacactgatttgtgctttgccgtctgggcgaagataaggaacaatcccctcttttctcacctcagcgagtctttgtgtcagtctgtgagaaaggtggatcggcaaaggcatcagcacatcggtttcacggcaggcgtaaccaaacatcagcccttgatcccctgcacctatatcaccacctgcttgatcaaccccttggttaatgtcaggtgactgctcaccgatcccgtttaataccgccgctgatctgtaatcaaaaccataagttgcgtctgtatagccaatctcttgaaccacttctcttgcaatctcttgcattggcgcatacgccgttgtcttcagttcgcctgctattacacaaaaaccatttgaaacaagagtctcacacgcgactcttgcattcttatcattttcaataatataatccagaattgcatcactgatctgatctgccatcttatcaggatgcccctctgttacagactctgaagtaaatatgtactcttttgacataattatctcccgtcatcgattatttttgaaatacaaagaataactttataaatcggcgcaattatatctaaaagattcttcactattccaaatagcttacttaaattttttatttaactcatccaaagagttattacattagtaaagtttcgataaaatttctccaatttcaaaattacataaaaggatatttatatgttagtaactaatccagctccagactttacagcaactgctgttttagcagacggttcaatcgtggaggattttaacctcgaagaaaaccttggtgctaatggtgccgtgcttttcttctacccacttgactttacatttgtttgcccatctgagatcatcgcattttctcacagaatcgatgagtttaaagagcgtggtatcaatgtaatcggtgtttctgttgactcacagttctcacactttgcatggagagagactccggttgaaaaaggtgggatcggtcgtatcaacttcccacttgtagcagacctttcaaaatctatctcaagagattacgatgtactttttggtgacagtgtagcacttcgcggttcatttttaattgacagcaaagggactgtaagacatgcagtgatcaacgaccttccattagggcgtaatattgatgagatgatccgtatggttgacgctatgctttttactgacgagcacggtgaagtttgtcctgcagggtggaacaaaggtgaagagggtatgaaacctgacgctgacggtgtagcagaatacctagcaaaacatgagtctgagctttaagagctcactctctatctagcctgtcaagtgatttttcacttgcagcatttgatctttgatactctttttctgaaactccgctactttttgaactacagccgctaaatcccaaaaccaatagtaaaacgactaaaatatatctcataaaatacactccctatttttttgtgctcaccattatactaccaaaaactatcaaactaatccctaaaaagcttaaaaaatcgggaaaaggatcccccagcatccaaccaaaaccgattgccaaagggatgttggtgtagcctatcaccccaacaacactcaggtttcttgcactgtacgcttttgtaagcagccactgtgagagtgtggagatgattgccatcaacccaataagcagccaaactttcaactccatcggcacaataaactcaggaaataaaaaccctatcgctgcaggcggagtaaaaaaattggcagataaaaacaaaagtgccggcaatgcactacctatacctacaaatgaaagcacaataacacgggagtcgtagatatctttgatcttttttatcgtggtgtatgcagcagcggcaaaaaatcccccaagaactccaaggatatgttcataagaaagatgcaaaccaaaaggcttgacaatcagtatcaccccaataaaacccacgataagtgctatcattgttgttacatgcaactgctctttaagcagcagatacgccaaaatggtcacaaaaaagggtgaggttttattgagtgttatcgcttcacccagagggatcgttgtgatggtgtaaaaaaacaatatcattgcactaaatccaaacacacctcgagctattaacatataccatttgccaccgctgagttttggtggtgtatggtgcaaggcataaaggattaaaaagacaccgattaagttacgaaaaaaaacgatctcaagtgcactgagatcctctgcaagtatcttagtaagcgcaccgttgagtgcagagatgagtgctgagaggagcatatagaagatgccgttatcacgatcttttaacatccaagccctttaacaaacgccagcgcttttggatttacatacgccagctgccaccactgcttttttggtgcgatgagagtaagctgatgggggttggagcttcgcgagagagctacataaaactgtgaaggagcaaagatttcgttggtatcgatcaccaaagattctatcgacatcccctgtgatttgtggatggtgatcgcaaaagcaagtttgatggggtactgatagatactcaacacctcctcttgcaccatctgcttctcccccgctatagttttctccacccacacagttttgtgttgcgctacttgttcaagttttaccaccttgccatcagatttttgcacatacacataagtggcatcgatgttaacaaccacaccccgctcgccattgtagtagttccaagcattgcgactaaaaagtaccggtgcaccaatctttagttcaagctcctcttctatgcgtgcatcttgaaaaaaacgcttaatctcatgatctttgagcgattttttatgtttaactacctgcgcttctttcacaaaaagctccccttcaatcgcttcaagttgctctttattatgtcgtgaagcagaaatatttttgccgtaaagaaaagtagtattgcttaaatcctctccgataggcttaataagcccattaagtttgttgtgcaccacctcatctacaaaaccaaaacggatatggtgcaaaagctcaataaaagcaacatcatcggtgcggtagatatgggtaagctctatgggttcaaatgcaaattcgctccacacagcagactcaaaagcaaaagcaacatccacaaaacctttactgacagggggcagttgtaaaaaatcccccacaacgagtaaaaccccacgaaagccaccctgtttgagccttaaagccaccatttccaaaagtgcagcacttaccatagagatctcatcgatcacgatcagatcaagcactgctaaaagttttttaacttttttgggtatctcaaattttccttgcagtttaagtgcctctgtatcttcacagatcccaagatcaaaaaaactgtgcagtgtctgcccaccgataagcgttgccgccatagcggtagaggcaagttttgccactttttttgcttcagcctcataagttttgatcacctcgttggtgatggtagttttacccacacccgcgccaccggtaagaaaaacattactgcctaagttgagcttttgtataaccgtatctttcattggtatgatagtaacaactatttgtttagaagtttattattataatttggataaaatctcaaaatgcaaataaagataacactttcacaagaacaactttttctcattgtagcattttggctaacgcttttttataacaccacgatgttttcccacatctttgacacgtacccttttgagggtaaaaatattctctatattgcctcaacctttattgtacattttggcataactgcactcgcttttgctctactctctactcgtcataccattaaaccacttttgatcttcattgtgcttgtttcctctataacagcatactttatgaataaatatgatgttgttattgatgagaatatgatcagaaatagtatgcaaacaaatataaacgaatcacttgacctgctcagttggcaactcataggttatcttctttttcttggattattgccttcatattttattgcaaaaatttctcttcaaacagttttattaaaacaaagggttctcttaaggataaaaacccttgcagtacttattctcctcacttttggtacagtagcactttttggcaagttttatgcttcatttttccgagaacacaaagttttacgcttctatgccaaccctggtttttggatcgattcgctaagaatttacttacaacaaaccctagagcagcaaaataaaacactcaaaatcttaggtcttgatgcgaagattgaagataataacacaagaaaaattgtgattatgatcgtaggagaagctgcacgggcagatcattttagcctcaatgggtatgtgcgaaaaaccaatcctaaacttgagcaagaggatcttgtcaatttctcacaactctactcctgcgggacatccaccgcctactctgtaccatgtatgttttcgatctatcaacgcaacaattttagttataaaaaggcaaaatacacagaaaatattctggatgttttaaaccacacaggtgatatcgcaatcctttggcgagataataactccgattcaaaaggggtagcaacaagagtggaatatcaagatttcaaatcaccgcaaaacaatcctgtttgtgatacagagtgtcgtgatattgggatgctacacggtcttgatagcttcataaaaaaacataataacaaaaatatcctcatcatcttgcaccagatgggtaatcatggccctgcttattacaaacgctacccagaagagtttgaaaagtttgttgctgtgtgcaaaacaaatcagctagaggagtgtacacaacaaagtgttacaaacggttatgataatgccctgctttatagcgatacttttttagctgcaaccatctcatttgccaagcactattcacaaagtgctacagctgttttatatatgagtgaccatggggagagtttgggtgaaggtggcatctacctgcatggtcttccttatttcatagcacccgatgcacaaaaacatatcgggggatttttatggctgaatgacacctataaacaattattagattttaagaaaatagaggcaaaaaaagatcaaaaaatttcacacgacaacctttttcatacactacttggtctttttggcgttcagacgaaactttacaacccacaacttgacattacacactaaaagggcagatgatgcaaaaaacaatgcaattgacaaaaaaaattttacgctacttttttctaccacttttagtattgatgcttgcatggattgggtattttaaaatatatggcaacttccaccaagtagacaccaatctttacagaagtgctcagctttacaactttaacctacctcactacatacaaaaatataacatcaaatcggtaatcaaccttcgtggttcatctaaggatgcacaatggtatcaagatgaaattcacatcgccaagaagtatgatatcactcattacgattttggactacctgatagaagagtgatacctttggagaaaatggatacacttgtagcactgatgcgccaagcaccaaagccgttactcattcactgtaaagctggagcagatcgtacatcgcttgcaagtgcactctacctttacgctattcaaaaagacaggaacgctcaaaatgccatctctatcacctatggacactttccatggcttggttccaaaacaaaagcgatggatattagctttcaaaactaccaaaacaacaggattgtacaatgaatctgggattatttactcttatagcggttttatcaaatataattttataccatcttcctttttttcactatgtcactgatcaccttaaattgaacaatcctggtagttttgcgacaatgctttgtgtgagcattgccctttttggcgtcaatgcctttttattctatctcgtagcatcgatctcagcaagattttttaagttttttttaatcatcacatctcttggcaatgctcttgctttttattttgtacaaacctacagtgtgatcctcgatcgctcaatgatgggcaatgtttttaatacccgctacagtgaagcatccgcttattttgaccctatcatttttctttatatttttcttttggggataataccggcatatatcgtttataaaacccagctgcgcaatacacctcgaaaaaaactgcttcttggtggttttggtgcattgatttttagcgtttttgtgctttatctcaactcatttacatggctttggcttgacaaacacgcaaaatatctcggcgggctttcaatgccatggtcatactctattaatgctttgcgttatgagataaaaaaacaacaaaaatccaaaaaacagaaacttttaccagatgggaagtttcttaatgataccaaagtagttgtattgctcatcatcggtgaatctgccagagcagaccatttttcactctatgggtacaacaaaccaaccaatcctagactctctaacatcgatattattgccttaaaaccagtcatggcaacaaccacttacaccactggatctgttgcgagtatcctcgcttatgacggttcaagttccaatgaatatgaaccactaccaaactacttgcatcgtatgggtgcctatgtagaatggcgcagtaaaaactggggtgcaccaaatctaaatatagaccacttcatcgaagctggagagttaaaacaaacatgccaaggagatcggtgtgattacgatgaagttttacttacaaacctcaaacaatcgatccggaaagcaacaaagaacaaaatctttatcgttttacacacagcaggcagtcatggtcccacttattatcaaaaatacccaccaagttttgagcatttccagcctgtgtgcaaaacagttgatcttaaaaaatgtactcaagaagagttgtttaatgcttacgacaatacaatctattataccgactattttctctcaaaagctattgagcaacttaaaaaactcaatatgccatcacttatgatatatatctctgaccatggagagagtcttggtgagtacaacctttatctccatggcaccccttatgctattgctccacggtaccaaaaagaggtgcctctacttctgtgggcttccaaacaatttttacaacaaagagctcttaatacactcgctataaaaaaggaggaaaaatatggacagtacaatatatttcacaccgttttagaagcactttccctgcaatcacctatctttaatcaaaagcataatctcttagcaaatcaaaaggatcaacatgaacagtgaacgcattcttatcgttgaggacaataaagcccttgccaaaattcttgcaaaaaaacttcaaacatctctgcagatgcaagttgatacagcctactctttagcagaagcaaaactctttatcagcgcgcatcaatattttgtcaccctgcttgatgtcaatcttcctgatgctccaaatggtgaggtgatcgactatgcactcagcaagaaaaaacgtgtgatcgtcctaagtggtaacatcgacaaagagtttcgcaaaaaaatgcttgagaaaaatattattgattatgtcaacaaagagggtgcaggtgatattgagtatatcatccaaacaatccagcgccttcaaaaaaatcaggcacataagattttggtagtcaatgactctgtcgtttttcgcaataaaatgaaaacgatgcttgagaaccttttcttccaagtaacacctgtagcccatggagaagaagcgctcaacctttttgagcaaaaccacgagttttctatggtgataaccgattactatatgccggtaacaaatggagttgagttaacacaacaacttcgtaaaacatataaaaaagatgagcttcgcatcattgccctctcaggcaacgaagataatgagatcaatgctctgtttttaaaaagcggagccaacgactacatcaaaaaaccgttttctaaagaggagttttcctgtcgtgttaataactcaatcgaggcactagaaaatatccaaacgatcaccaagtatgccaacagagattttcttaccggtctgtataacagacgctgtttttacgaaatgatgaatgagtaccttataaacgcacaagaaacgggtgagcagtttgctgttgcgatgatcgatatcgatcattttaaacatatcaatgacacctttggacatgatgctggagacaaatcaatcatagcacttgcagatatacttcgctcatcgacgagcagttttgtacgatgtcaacgagtcacttgatgaaaatcttaaccaagcagaccttttactctacaaagcaaaaaacaacgggcgcaatcagctaatcttcgagtaagatggtacctctaaaggggatatttttcccttttggacttacccaccttacttcatactgcggcacatcttttggaaaaaccccttcaagatcactaaaaaaccgatacaaaaacttgcaacacaatagtgctaaaaaattcaagggcacatctattcgtcaaaaatcagcttgttaaaatggggtgaaattgcacgtgtttttagaattggcacagaacagaaaagttggtttttttaaggatgaacaacaatgttcagagccttgcacaggaaccataacctgtttattatagctcaaacctttctcactcggataaactatatctgttatgatataattgttatgattaaagggggattaaatgtcaaaacttgttttaggattggatatagggataacatctatcggctgggcacttgttcaaactgacaatgaggaacaacaaaacaacaaaattattgagagtggtgtgcgtatttttcagatcgcagaacacccaaaaaatggaaaatctttagctcttccaagacgtgaagcaagatcagctagacgcacaactaaaagaaaagccaaaaggataaaagcactcaaacgattactgcaaaaatacaacattatcacattgcaagagttagaaaacctttttatcggcaataaaaagcaaaaagatgtatggcagcttcgcagagatgctctctatcgcgaactagataacaaagaactctcccacatactgatccatatagcaaaacatcgcggatacttctcaaacagaaaaagtgatcaggtaaaaaaacaagataaagagggtaaagctgttttaagcggcatcagccaaaatgaaaaaattttacaagagaagggttaccttactattggagagtatctctctacaaaaacaaaaaagagaaatgctcatggacactatgaaaactctatcgcccgatcgatgcttatttcagagatagagttagtttttgcaaaacaaaaagagtttggaagtccctatattagtgacacacttttagaagagtataaaaagatagcttttacacaacgacctctaaagtctgtaaaggggatggtagcaaactgtccatttgaagtctcaaaaaaacgagcaccaaaagcaagtatcagctttgaaacatttagagcattgcaaaaactaaaaaatctgcgaataatcacacaaaatggggaggaagcactctcgcaagagcagatattgcaagtgatcaacaaagcaaaaactgtctcatctctaagctacaaacagttaaaaaagtttttagcacttaatgcagaggcacaatttaaaggtttgacctattttgatgtaaagacaggggagatcaaagaccctgaaaaaacaaaatttttagagtttggtgcatttgtcaaaatcaaaaaggagatacaaagtgttaagcatctctactggtcagagattgaaaacgacaacgatctgcttgaccaaattgccacaatactaagtacagaaaaagatgatagcaaaatgcttgagcaacttcgtaaaattatcccctacgaagaggtttcccaagcactgttagggctctctttttcaggttttggacaccttagcacaaaagcactacaaaacatcaatccacaccttgccagagggcttaactacgacaaagcgtgtgaagaagccggttacgattttcaagcaatctttcaaggggaaaaaacacttctgcttccacctctatcgcaacaagaaaatagtgagatgacaaaccctgttgtaaaacgggctatttcgcagatgcgtttggtctataatgcacttgcaagaaaatatggagcacttgatgccatccacattgagatgacaagagagataaaaaaatcacacaaagacagaaaagagatcgaagatgcgcaaaaagagtttcaaacacaaaaagcagaagcaaaaaaacacgccatagagttacttggcaaagagccaaatgcaaaagagcttttaaaatttcgcctctggagagaacaaaatgagcactgtatctacagtggagcgtatatcgatccatatatgctcagcgatccttatgccacagaggttgatcacatcctcccttacagcagatccctagatgattcccttaacaacaaagtgctttgtttaacaaaagagaatcaaaataaagggaacaaaaccccttttgagtattttggttcggacaaagatttggaaaaatggcaggagtttgtcggacgcatagaggggttaaaaaacctcaaacaagccaaaaaaagcagactcttaaaaacaaactttgatcaaagtagcgaaaacagctttaaagagagaaacaaaaacgacacatcttacatagccaagtttatcaaaaactatatcgaagcgcatatagcctttagagaatcaaaaaacaaacaacatgtttttacaagaaatgggatgctaacatcgcaacttcgctacaaatggggagttggagataaaaacagacaaacacatctgcatcatgcagaagatgcaatcatcgttgcttttgcaacgcaagctcaggtacaaaaattctctgaaatatctgcaaagagagaggggtttatctatgaaacaaaagaacaaaaagcgaaaaaagtaaaatttgagccaccaatggagaattttggtgctaaagttcaagagagtgtgcagcagatctttgtatcttttatgcctcgaagaaaagtaacaggagcggctcatcaagcaactatctacagcccaaaaactttacaggtaaaaaaaggagatggaaaaatagaaaaactcaaaggaaacagtatcaataacaatgtcaaactaaaacatggaattgcactcaatgagagtatgcctcgtgtcgatctgtttcaacataaaaaaacaaaaaaatactatcttgtcccaatctatgtaagtgactttgtcaaagaaactctaccaaacaaagcgatagtaccaggaaataaaccgtggcttgagatggatgaaaactatgaatttatgttctctttttacaaaaatgaccttatggagatcaaaacaaaaaaaacagcaaaaaaagagtctgtacagattttaggttactatgatagcacccatagtagtacagccaatttaactttaaagtctcatgatggtaaaaaggaatttagctatggctctcagaatttggtatttatcaaaaaatatcaagtcgatccactaggcaactatgttgcagtaaaacaggaaaaacggcaaggaacaaaaaaacaaaataaaaggaaaagatgatggcagggtggagaagcatattggtatcacaaccgtgtaaattaagtgtaaaaaatatgcaacttgtctatgctccttatgaaggggagagagtgcaagtaccacttgaagatgtaacggtgatcgttattgaaacaaatcaggcaacaatcacaacagcactgcttagtcaaatcgccgaaaaaaacataacccttttctcttgtgataattaccacattccaaatggatcatttatcccttttcatcaacactcaagactctcacaaatagcgcaccttcaaatcactatgaaactaccgttaaaaaagcagatctggcaaaagatcatcatgcaaaaaattgcaaaccaatcggcaatgctaaaaaaatttcaaaaagagaatctccaactagagcttttaaaaaacaaggtaaaatctggagatagtgaaaacttggaagctctggcagctcgaaaatattggcatctgttttttgataaatttacaagagatcaaaagggactcgatcccagaaatatagcgcttaactacggatatgccattataagaggtgctatagcgaggtcacttgtctcttatggacttttaccaacttttggtgtatttcacaactctgaactcaacgcatacaacttggctgatgatatgttagaacctttgcgtccaatggttgatatgattgtaaaacaactcgaacaagaggatgaacttgatgtaaatttaggagtaagcgtaaaatctgcactcatcaatctcttaaatatgcagatgcgtttaaataatgaaattgtcactgttgtcactatttgcgatattatggcatatagttttgtacgggcattaaaacacaatgatgtagattatttaaaacttccagagatattatgaaagagcaaaaatttatgtggttatttgtattttttgacctaccgacaaaaacaaaaaaagatcgaaaaaagtatacacaatttcgcaactacttgctcaaagatgggtttaccatgatgcagttttctgtttatacaaggatctgcaaaggggatgacagtgtcgatacccataaaaaacgggtaaaagatcatatcccaccaaaaggcaatgtacggatgatctccatcacagatctgcaatactccaaaatggaaacagtaataggaatcaaaaccccggaagagaagttagaaaaaaagcaacttttgcttttttgagtaaaatcgaaacagatttgcatgatagttttttcagaattatccaaaaaaaagaaatttttgagcaggttttaaaaaaatttttcaaaatttttttaaagaaaatgctctacaaaccctactgcaaaggcttgaagagtttggattatagcacatccgagtgagaaagggagctataacttgttgacaaagttgtagagtgcttgggcgattatagcacatccgagtgagaaagggagctataacccttttattgctaagtaatgcagctgatttattatagcacatccgagtgagaaagggagctataactgttcatgttgttgtcgagtgagaaataaaattatagcacatccgagtgagaaagggagctataacaatataaatggtgattactgcatgatgatcattatagcacatccgagtgagaaagggagctataactcaaaactagaattatctttcatttgttacattatagcacatccgagtgagaaagggagctataacaagtgtatttagataactttagctgttagcaccaatgccaaatggcttgatagaaaatatgtttcgtgggaagatttgaaacaacaaagtgaagttgaggaagaatttacagaaaaatattgacgctatcaaaagttgagttaaagtagctaaaaatgtagtaaaatacacctatacaaaacaaaaagaaatggggtttttatgatctatcctaacagttttttggtgcgtagctaattgatgcgatggtttatcgttttacttgttagcattacactaagttttagcgcatctcttaaggttgctgttgcagcaaatatgagctatgcgatcgatgcactcgtgaaggatttttcctccatcgatccagatgcaaagatcagcacaacaatcagcagcagtggcaaacttgccgcgcagatcgcccacggggcaccttacgatatttttctcagcgccaatacctcctatgttgcaaaactgtacaaacaacatatctcccaaaaacctgtagtttatgcttatggggctttagtctatcttagtcgcgatccacaagattttagtgatctcaaacagcttttactctcccaaaaggtgcaaaaaatagctatcgccaatccaaaaacggcaccctatggcaaagcggcgtttgaagccttacaaaacttgggagtgcttaatcaaatcaaacataagtttatttatggggagtcgatctcacagacactcacctatacccttcgagcaaccgagatcggtatcgttgccaagtctgccatctttgcaccgcctttaagccaccttaacaatgccaagcactacaaagatatcgatgcaaaactctacacaccgatcaaacaagcaggtgccatcatcaaaaacacgccacttgccaaaaagtttttgagctacctgcaaagtaatcgcgccaaaaagatcttacaaaaatacggatacaacaccccatgaacacacttgtcgcaaccgttaaggagatatactcaatccaacaactccatcaagtatttgttcaatgtaacgaccgtaccctgcaaatcgtcacacttgagcttgatccaaagatacaagtgggagtcaaggttaaactcggcatcaagccaactcacttacttcttgcaaaagatcattgtaaaactcttagtatcaccaaccaatttccagcaactctgcaaaatagcaacaaaggtaaaattctcaccactttaaagttgcagtggcaaaacactacgcttgagtctatcatcaccacagccgcttttgagcaactcaacatcaaagagggtgcagtggtttatggttgtgtgagtgagagtgctatcaccattacggaggtgcttggatgatcgatctgacccccttttacctctcatttaaacttgcactctttactacgatcatcctttttacgatcgctttgccgcttgcgtggtatctctcccaaacaagatcaaaacttaaaccactccttgaagcgatcgttgcaatgccgatcgttctacccccttcagtacttgggttttatatcttggtactacttgcaccaacttcaccattgggtgcttttttggctgaaacatttgatctaaaactcctttttagctttagcggacttgtggttgcaagtgtgttttactcctttccttttatggtgcaacccctacaaagcggctttgagagtttaaataaaaatatgcttgaagcaagctacattgccggtaaaagcaaactccaaacacttctgcatgtagcgcttccaaacatcaaaccagccctgctaagtgcactcattatcacttttgcccatactgttggggagtttggtatggttttaatggtgggtggcagtatcgcaggggagacaaaagtagcctcggttgcgatctatgagatggtggagatcatggactatgacaacgcacacatctactctgccattatgcttgccatcagttttagcgtcttgctcggtgtctatatttttcataaaaaataccgctccacggttggtgtgcgatgatctcactgcatctacacaaaaaagatatcctcgatcttaaactacagatcaacaaaggggagtttatcgctcttagtggcaaaagcggcagtggcaaaactacactgcttcgcatcttatcagggcttgaggagtctaattccaagatagaagtagatggcaaaatctggcaagatgggctcaaaaagactcctattcagcaacgcgagatcggatttgtatttcaagactatgctctgtttgaaaatatgagtgtacttaaaaatctgctgtatgtcagtaacgataaagagcttgcccaacatcttctatcacttactgcactcacgcaacttgccgatcgtttgccacacactttaagcggcgggcaaaaacagcgcgttgccctttgtcgcgcactcatgcgcagaccaaaaatactactactcgatgaagctctctcagcactcgatccaactatgcgaaaaatgctgcaagatgagatcataaaactgcacaaagagtttgatctcaccactatcatggtcagccacgatccaagcgagatctatcgcatggcttcaagagtcgttgtgcttgaagatggcaagattatcaaagagggctcacccaaagaggtgtttttacaaacctcaggaagtgcaaagttctcttttagcggggagattttagagatcatcaaagttgatgtgatcaatatcgccatcatcgccattggtcagcagatcgtcgaaattgttgtaagcgatgcggagatcaaaaacctcagtattggccagcaggtaaatatcagcaccaaagcgttctcaccaatacttaacttttaaacctcctgcagctccaccccactctcaagcaaataacacaaatacccctcaaccctcttaccggtgatctcgccgatcgcttttttataaaactgcacctgcttcatgtactcctcttgcagatgtttgccggttttataatcgatcacaatccacttatcctctttttgcacaagcagatcgatgtagcgaaggttgtttttgtatttgagtgcttgctctttgtaacattttccctgcgtgagctctaaaaactgtttgtgctctaaaagcttttctatgcgcttttggatctgtgcaaactgctctgcctctagcgcaaaaccgtacttgttgtaacaggcatcgatcgcactgctgagagcatctttagtaaaactctccatcatctctagggcataatgggttgccaaaccaaactcaataacccccaaatcttcctcttgggtatgctctttggcgaggatatcgttttgcgtgccgtaatacagctcttgaaacttgagctttgcaaactctttggctggctcttttggttgttgcactacatctaacgcacccatagaacgtacctgaagccctagtatttcaaaagtggagtcttttggtttttggataatgatgagatttcgtttggctcgtgtaaaagcgacatacagagcattaagtttgtcttgagattgcagggctttttcatcctcaagcgccttggcataatctgcatcaatcaaatcacgcttagcaatgcgtaaaaagatcttttgcaatgcaatcccatcataattgtagatgatcggatcgcgcgatggcggctcttttttaagccgatcgatcacgatcacatgctcatactctaatcctttggacttatgcactgtcagcacacgcacaccatgaagctgtgttgcagcagcctcagcgtcaagcctttcatattcaaacaaaaacgcttctatatcgctgtagcgctcgatcgcacttaaaaacttcagcaggttcatatcgttatcaaaaagttgataacgctcgatcgcatccttggcaactttggcaagatcacacagatccacccgctcaatcttacccacctcttgatcaatgagtgcaaaaaagttatagcggtagatatcctctccaaagtaaagatacttaagatactcaatgatcgctttaacattgcgctgctctatgagtttagtggtggtctcggtaacaacatcgatcccatttgcctctaaaagttgtttgatctcttccccatcaccattggttgcacacaaaatggcaatatcgtttagccttgctccaagctcgatgagcctttgtacctgcaaaagtgttgcatcaagcaccgcttcactctctagcacctcaacataccccccatctgcctcttcgcgactcagttgtggcgagtagttggggatcttatctataaatgtggcgttaacaaaatcgatcatcaccttttgtgagcggtagttggtaagcagcttcgcaacctttgtaccatgccttttggcaatctcaccaaaaagtgcggcaacacctccacgaaagcggtagatcgactgcttcacatcccctacaaagaaaaaactcccatcttcaaaaatcccctctccagagattgcctcctcgatcagcggtcgcagtatctcatactgcataatgctggtatcttgaaactcatccaacaaaatatgctcaatagtactgtcaaggcgaaaatacaaaaactcactgtcatcgatcttttttaagatggtgaaaaccagttgtgtcacatcactgaagcttaattcaccatcatcgatgtagagtgcttttttcgcctcttggtagatcgagacaagctcactgagtgcataaaaaaagttactctctttggctttgtaatactcctttatcgcctcttgtatttgatgtaacgcctcatccatctgcggggtaaaacactttttaaagtcccaatattccaaactctctttataaacccatgtttttgccagcaactcttcaaagcttaccacattaagtgtattttttagtctattagatgccccttcacatcctgacacaattgcctgaagatcttgtaaagccccaagcgctttggtctcataatctttaccatagacaggggtaaaagcaaatccccccagctcctcttttttctcataaaactgatcaaggagtaaaaagatatcgctaagccgtttttttgaaaggattgccagatcaacaagggtattttttttattttttacactcacctctttgaaaaatctatcgagcagttttatttcatgctgtgctgaagcggttgtaaagtcaggcatcaaaccaacatacaaagagaatttgcgaagtatcttagtaaaaaaactatcgatggtcataatcttggtgttgctgtttaaaaactgcgcaagtacttcatctttttttgccaacagttgctcttttgcaagccccgttacttttaccacctcatcaagctcacccctgttagcaaaatcctccaacgtctcaacgatccgctcactcatctcacttgctgctttgttggtaaaagtaagggctagtatcttgcttgcatctgctccactaaaaagcaaagagaggtaacgcaccacaagcataaaggtttttccacttccggcactcgcttcataagcaaggttactgacaaattcagacatcgctaccccctctcacacaaaatcttataggggcagtagatgcactctttggtatcttcgcacttttgtacatcgatctgctctatctcttgaagtgttctaagatgttcttgcagtagctctaatttttgctcaaactctttctcaggcaccactctgccctctttgagatcataaaagccacactctcgcacactatatttttcacttgctaagaggtggtaaaactccagttgaaaatctgtggcatctgctatggtgtttttggtgtaggttttgtatgagcctgttttataatcaagtacactcacaccaccatcaaatttatcgatacgatcgatcacaccgtagagttttagcccttcatactcgcgtgtaagttttacttcacaccctaacacctcgtaccctttggcaaaacgatcaatctcatttgcacaaaacgaccgtaaaaccctcttttgcatcgccatcgcaaaacgcatcagttcattatcttgacacacactatctaactctttttcaagatctttctgcagtgcacccagatcatcatagctcttttttttggtgtaaaggtttgcaagtgcaaggtggatatcgttgcctatggtatgctcttttggcaaatcttgcgggatctcatgctctgcaaggtttttgatgtagcgaaaatagtacttttgcttacatgtaaggtaggttttcaggcgtgaactagagagtgttacaccctcaaaactgtaagggatcactccaatgtttgtggcagttttttctcggtggtgattacgaaaaagtatctgtgtaaaatcctgctcactatagcttgatgactctttgatccctagctgttttaaaaatctgctcggtactgtattagcgctcttgatgtaagatatcgccacctcttgagcgttttgaaacaccatagagtaatagtgtttttgcaactcttcgcgatcctgcatggtagggagttttgcgtgctctctgagtgtcgtgtttaaaaacatatctttatcactctttttaggcacattgttctcattaaaatcgatcacaatcacaccatcaaacgcaacacccctgctctctaacactcccatcaccgtgatcttaccgccactgacatcatcgatcacacttttggcaagtcgctgcataaaaagggtaaggattgacttgctccccatctcttgcatcaaaggcaataccttctcaaagcggtgcagctcctcgctaaagattgcaagctcttttttatcctcaataaactccgtaaagtcacgcaaaattgtaacgattcgttgcacatctccccgactgccatagagttcgatgatctttgtttgcaaatcaaggttgtatctttgaatcctgtgtctattttcttgcgagtcttgctctatatatttgatgttggcatcaagcagtttatagatactgctctgtttaaaactttttcccatcgcaaagttaaaattaccctttgtatcaaaaagttgtaaaaattttgctttagattcatcaggcacaatcaccgctattttgttggcatcataccccttttggataaattcatagatcttttgtttgacaaacgccacctgcaatagatcttccccaaaggcgttgcatgtaacaagactattgttggtaaacttttcctctttgataatctcctcattaccaagatcgataatatattttgtattatttgcaaactctaaaccaaatgatgcaaactttttttgcatctttttattgtagcttgtcgcataaaagtggatatgtatcgttacatattttgccgcctcttgtaacactttgagctcaaaatttgtcaaatacccatcaagatgcagctcgatatctttgtggtgtgtcaaataggtggtgtttagctcatagagtgagggtaaaaaaatcttatcgatcactttatgggtatcacaaagctctttgtacctgtgatagagttctataagaatcgttatatgctcttcaaactccccatactgatctagtgccaacagatcatcgatgctcacaagctccgcacttaactcttcaaaaaacttcaagataaacgagctgtttttggtaaaagtaaaaaaattgcgctcgatttgtagtttggtaaagttttgaaaatctgatgcctgcagcaaaagcaagattctgctgtcttcatcgatctttttatatccacgcacaatgcagagtttttctaaaaactctgccatagtgatgtagtttggtaaaaaaagtgaactttttgaggtgtcttgttgcgcgtgcctgatggcacgggaggaggagagaactactgttttagactccatagcctaaaactcaaaagcctctttgatgcgtgtatccgctttgatgttataaaatctgtagttatcgccgatagttatttttgcgatgatattccacacacccgcttttggaaacttcgcaccactcaaagagtaaactccatcttcttgtgtaaagttttccagtgtttgatcaaactctgctgtttccggtctgcttatctgcacaacaattttaccgttttctaccgctttaccctctttatcggtcagctggtacttaataacaggttgcttaccgcctatatcctctgtaacatactttacgttatactttttatcaaacgcaatacgagcattgataaaatcatttgcct

SEQ ID NO: 3607 - DNA, 22193 bp, synthetic construct
  misc_feature 1..22193: note = Synthetic
  variation 12040..12064: note = note, n is a, c, g, or t
  variation 299..395: note = note, n is a, c, g, or t
  variation 12669..12682: note = note, n is a, c, g, or t
  variation 18545..18552: note = note, n is a, c, g, or t
  variation 19149..19199: note = note, n is a, c, g, or t
  variation 4569..4583: note = note, n is a, c, g, or t
  variation 8517..8531: note = note, n is a, c, g, or t
  variation 9495..9523: note = note, n is a, c, g, or t
  source 1..22193: mol_type = other DNA
  variation 13999..14028: note = note, n is a, c, g, or t
  variation 15821..15885: note = note, n is a, c, g, or t
  variation 21448..21547: note = note, n is a, c, g, or t
gtgcttagcataaacaaccaagttgcgaagggaagtgccagaagtttgggaaatattgatatttttaaacttatacaggataataaatgctacttaactaagttcggcggacataaaatggcagcagggcttacgttggaggagcatagtataaaactatttagagatgctataaacttgtctgcttcacgatttgattctgatgattttatacctcttgaagatgttataggaatattgcctagttcacagatagattttgagcttttagaaattcttgagagctttgaaccatatgnnnnnnnnnnnnnnnnnnnnnnnnnnnnnnnnnnnnnnnnnnnnnnnnnnnnnnnnnnnnnnnnnnnnnnnnnnnnnnnnnnnnnnnnnnnnnnnnnaaaaatattttagaaatgcctgatgattaaatgcttacatgtagctacagagctataaaaaacgaatttaacttaaaaatatctgtgcaacttattataaataaaatttattaaacttcctttatttttttgttaccgtagtacatttattcactttaaagaaattatctttaaaaaaatcaagatttaaaactatacttaagcttcaaacttgtagaattgataatattatcacataaagggattaacatgaagagaatcgttacattatcggctatcgcttttttaagcacggcagcgtttgcaaatgctgatgttcaaaaacagatagatgaattaaacaagaagatagagcagttgcaaaacagcgataaaaaacaagatacaaagatatctactgtaaacgcacttgctgcgcaggataatattaagtttgatgtagactttagaacagcatacgacaacttaagatataaaactgtaaatggaaacacatatacaaacgatgctctctattcaaaccgtttatggttaggtatgggttatgctcctactgagagtatgctatttagaggacaattggcataccacaaagcttttggtgcaagttatggacaaagaggaacaggttttggctttgatacttttgactgggtatcaagtgaaacacttgcagatgataagctaagagtaagagaagcatactggttgtggaattttagaacaggtactatcggttgggcagcaagtgttggtcgtcgtccatcaacaaatgggttcttaagcaacctaagagaagatgatgcaaaagcaaaatctcctatgggtcatgttataaatatggaatttgacggtgcatcagtaactatgaaactagatcactatgtacaaggtatgtatgctaaactatgtcttggtcgcggattaacaaatgctgccggttgggcaagtgaagcgacagcggcactcggcgctcctatgggtggctcaaatcaaccaaattttactaaagttgacggtgaacttgacactgttgatatggcaggattcatatttgtgccatacgatgatgggcaatactctgttgaaactacatggtacagaggacttaatgttccaggtatgtatgctacttcaattaatggtgcaacaggacaaccgactgcatacgagatgttaaacggcggagatatggacggaatggctatatcatttaaagttgacggcgttggtgatggaatcaatgatttcttggatgaaacaaccctgtttgcttcagctgcaatgtcaaaatctcaccctaacataaatatcacaagaagtgtagatatgagttctatgggcatgggaactattaatatggtagaaaacagtatgctaggaagtaatgagtctgagactggtcattctatctggttgggtgctgtaatgccaaacttgacaggcggtaaatttggactagagtataaccacggttcaaaatactggagaccgtttacttacggtgaagatacgatgataggatctaagcttgcagctcgcggtaatgcatatgaggcttactggtctcagccaatcatcaaagatgtattctctatgcaactgagatatacatatttagattatgagtatactggttcaaacggtttcttcggtgacggcggaactccgatgagtatgtctgaagcaaaagcgatgggaatggatcctgttgaaactgcacaagatgttcgtctatattttagatacagatactaaaaaattaaagagcttcttttagctctttaataaactctccctttcttttataaaatctccaaattaaacttcttaaaaataagttcaaaacttctaactatatatagttaacactcagcaacaaatataataaaataataaatttttaatcatcactttaacttattataaataaaacatataattattcaataaatttttagatcaataaattgatacataaacagaaaattagagattaaacttgctaaaacagtgatatttaaaactctcttaagcctcaaggctgtagaattgataactttatcacaaaaaaaggaaaatagatgaaaaagaacaaaatcttagaagagattttaaatgaagttgacaagcatccggagattatgtctcgtcgtgaggctctaaaatatttaacaatgtctccattagcagcgtctgtacttgcaagtgcaactgttggaacaactgctgttagtgcatcaagcaatgttaaaggtaaaatagtaatcgttggtggtggtttagctggtatgagtacagctgcacttatcaataacactatatcaaatgcagatatcactgtaattgagccggatcctacttctgtatcatatcaaccgggacaaactcttgttgctgctggtgtttgggataaagaaaacattatctacaaaagagatgatttcgttccaagcggcgtaaaacttatcaaaggaagcgtaactgcttttgatccggataacaacaaagtaacagttgatggaaaagaagaagtttcttatgatcagttaatcgttgctactggacttatgttaaactatggcggaatcaaaggtttagaaggagttatcacttcttcaggtgctgataacgctgttgtaagacaaaaagtcggtaaaaacggcactcactcaatctacttccgtgacggtgcagcggatacttggaaaggtatccaagaattagttgctcaagctaaagcacataaaggtccagaaaaactaaaagctttatatactatgcctgcaactgctatcaagtgtggtggtgctccaatgaaaattatgtatcttacgcatgctcacttagaaaaagctggtgttgcggataaagttgagttaactttcaacacaaacggtggagcacttttcggtattaaagagtatgcagctgtaatcactaagcaatttgaaaaaagaggctttaagtggaacttctctcataacctagttgaaattgatactgcagctaaagttgcgacttttgataaattctggaaagaaaaaggtgagtttgacgaagatttagatgagtatgtaatggtaacaaaacatgagtatataccagttaaatatgattttatccatgtaacacctccaatgaaagctcctgatgaagttgcaaaatctgcaatcggttctgctcaaggatgggtacctgttgaaaaagagactcttcaacacgttaaatacaaaaatgtatggtgtttaggagacgttgcggcacttccaatgggtaaaacaggcggttctgctcgtaaagagtacagagtgttagttgaaaatatggtagcttcaatggaaggcaaaactactctgcctgctaaatatggcggatacactgtttgtccacttatcacaggtcttggaactgttatgcttgctgaatttgactggagtgcaaaacctacaccttcattcccacttgacccaacacaagaaagatggatttggtggttgctaaaagtttatgctcttaaaccaatgactatgtacggtatgcttgctggtaaagcgtaatttatagactagattctggggttaacttcagaatgataaaaataagtcatcctgaactttgttcaggatctagtttagcaatttcctcaaaaattctacgataaacttaaaatctgtaaaccttaatttcattatattttttctatgttttgtaccaattgttacatcttgtaataaataatatatattaattttataatatatattaattttattttttatgagctagaataacgcaattcaaaaggagatattatgaataaaatcgtaaaagttgcattaagtgcagcattaatattaagtgttggttcagtaactgcaagtgcagatgctgataaaggtctgaaactttatgctaaaaagttaaaagatgcttgtggaatatcaggtgcggcaatggctggtaaacatactcaggctcagtgggaagagattaacaaaggcggcaatcttgcaaaagagattaaaactatttgtccaaaagcagatgatgcagatttaaatgataaaactcttcctcatttatatgacttcttccacaaatttggaagcgacagcgggaatgttccttcttgctaattagcttttaattttactccttgcaattttgcttnnnnnnnnnnnnnnnactgctttttattttatattttcactctcatttttaattttttcttatactgcacacttgtaaaattaaccctatatcaagtataataaccaccgctataaatcaaataataacaggagacaaaatgaaaaaagctgtgcttttgacttcagctgctatgatattttcattatcgcttagtgcccttacattaggaaagcttggtgattttaaatttgaaaaagcaaacgacaatgtttacataatgcacggacctgaaaaggagccaagcaaagaaaacgagggttttatgaacaacccggcaataatagagagtaaaaatggtcttatcataattgatccgggcggaaattataatgttggtaaaaagatacttgcagaagttgaaaaagtaagtaaaaaacctgttattgcgattttcaatacgcacaaacacggggatcactggttcgcaaataaaagctttcaagagaaatatccaaatgtgcctatttatgcactcaactatatgatagagcaagttaaagacaactctgccgaaacttggtatggcatacttgatagaatgactggaaatttaaatggcacgaaaccttttgcttttcctacaaaagggctagaaagcagacaaaccgtagtcgtagatggacaaacttttatcatgcgtcactatgcgcgcgggcataccgatactgatatacttatagaacatacaaactcaaacactctatttattggagataatcttatcataaaccgttttggtgcatttgatgagtcatctagcatacatgaaaatattgctcttttagagaagataaaaaagcaagaagacggatttaaaaaatataaactttatgttccgggtcacggtcgctcaagcagcagtattgaaaagacaatagatccttttttaaactacatgaaaataattgtagcaggagcacaaaaggcatataaagacgggattgaaagttacgagataaaacctgaagttgataagcagctaaaagcttaccataaatgggacgcttacgaaggtcagatgggtaaacatctcatgaaagcgtatgaagaagtggaagcactggatatataaaatctttgagccatttcttatggctcaaaatctactttacaactttcagttcaaatacctctctttttatttataatgccgcatgtttaaaatatatgagtgccaaaacgcaaaatccaatatcattgaacttaaggttttaagcgattcgcttgtagcttattgcaccgaatctcatggagtggaaatatttgatttcaatagttgcaaaattaaaaaaacttattgccttaacccgccaacgaatatatgttcatttagcccaaatttaaagcttttcgcatttataaacaatcaactcttgtgcgtgtcagatatagaatctaatgaacttatttacactgctgaagtgcatgatgaagagatagtaattataagttttgatctctcttcaagctatataattgcgggaacaaaacagggcaaagtacttcaatataaaataaactcttcgtcccacctatttaaactctacacttttgcatgcgacagatttgattctaaaaacaacaatatagagaatttcataactgcttttgctttttatgagaaaaaatttgcatgcagcagttatgacggtgcgatatttgttatggatctcctgacaaaaacaaacaaaaatctaatcagttccaataaggctcgtatcactgctctgtgttttttagatgagaacactcttttatccgctaatgataatggaaaagttgatattttttcacttaatagagaaaatagttttagaagcatagcaacaccgatacttgacataaaacagattattataatgccgaatccaaactacattatgataagcggcaactcaaatgtaaccacaattattgatataaaaaactttaaaattgcccatagtaagtacataaagtttcatgcagagataaataagattgctttgctaaataataactctctccttgtggcacttcgcaataacaaaattttacatgtagaacttcctggaattacgacattaaaatcacttatacttcataactctttcgagaaagcttttgagcttatagaaaaagagcctatgctgcaaggctcgcaagaacacaaaaaactagaggagatgtttcaaaatagctatgaagatgcgctaaaagcacttatcgatcaaaaaaatatcttagctatacaaattctagatgcctacaaagatataaaatgcaagcaggcaataatcagagatctctatcatgcgtttaaatactatccccgatttcaagagctttttttagaaaaaaagtatactctagcctatgtcataagctttaaatttgagccgcttaaaaaaactccagaatataaaaaaatggaagacattttcaaacttgtgttcttaaatgcacaaagacatgtgatgcaaaacaatctctccagagcaaaagatttgctgagtgaatatagcacggtagccacaaaaaagccgcttatcaaacttctccttacgcaaaacagagagtttgttgatctcttaaaagcgatacaaagaagagattttcaaaccgtttatcggctggtggataaaaatgagctactaaagcagatcccaaactacgttaccctaaacactcaaatccaagagagcttacaagagatagaagcagaaataaaaatcggtaagattagcaaagcagaggctcttctgcttacattagaaggtattggacatatttctgagaaggtagaagatctgcacaaaaaatgccaatctgttttattgcttaaaaaagcttatgaagagagtgattttaaaagctgttatgagattttagatatgcatgactatctgaaatcggtggaacttgggctgcttcttgaaaaacactggtttaaacttgtactgaaatgtgaagagtttgcacttgtcggcaatattgaagatatacaaaaaacagtcggtgaatttatagatcttcgtgagagaagcgataaaataagagatctcttaagagtcggctttcatgtgagaatcggcatattagcagataaaaaagatttgaaaagtgctgaaactgccatatatgtctatattgacgagttcggtgtcgacaaagagattgaaaaaattatgaaaaaatttgaaaaaatttcatcacataaactagctcttacgcagacaaatgatgaggttattgtgaagcaccggtaatcttcaaaaggctttcgagtgtatcattaaactcattgatcatagttgacttttgagttaaaaatttctccatctcagcttttttatttatcgcttcgtcaagttcaggatcactccctttttgatatgctccgatacggataagcacctcattctcttttaaaatagtatagagtcttctaaatttaaaaaccgcttttaaatgttctggagagatgatgtcactcataaccctagaagccgagtttagtatatgaacgggcggatagataccgaagtctgtaagctcacgtgagagtacaatatgtccgtctaaaatagagcgagattgatcagcgattgggtcactcatgtcatcaccctcgataagaaccgtaaaaaaggcggtaattgagcctttgccttcctcttttcctgcgcgctccataagctgaggcagaagcgtcaatgaagatggcggataaccctttgatgtcggaggttcgccaagtgctaaacctatctctctttgagccatggcaaatcttgtaacagagtccataataaagagaacatccaagccctgttctttaaaaaattctgccacactcatcgcagcaaatgcaccgtactttctcataagcggcgaatcatcggaagttgcaacgattataacggtnnnnnnnnnnnnnnngcctagatttttctctataaactcaggaacctctctgccacgctcaccgattaatgcaactacttttataggcgcatcagcccctcgcacaatcattcccatgagagttgattttccgaccccgcttcccgcaaaaataccaagtttttgaccttttccacatgttaaaagcccgtcgatgctttttactccgacactaaaaacctcatctatcataccacgcttcatcgcttgaatcggtgcttttatgattggagagagatgtgggctgtctatgtttcctttaccgtcaatcggtctcataaaagggtctacaacacgtccaagcagtgccgagcttaccggaatatttaaaccagtctgatccaaaaacactctgtcacctgagcaaaatccctcgacaaaaccaaaaggagtgataaaaaaggtactgccgtctatctccgtaaccattcctatggtctcttgatttgtatcgtttgagattatttttactatatcactgatacttacctttagtccacgagcggtgataacggttgcatttatcttaacaacctcaccgaatgcgactgagtattttttatctgagattttttctttaagtgaagagagcggcactaaaaacctccttgataagcaacgagtctaataacgtgagccggtaggagagtttatcagagagaaaaattcgcttcttgttttctcatcttttttaaacagaccgcgaagtgccgaagatgttgtggttgagttgattttctcaacgcctctcatctccatacacatgtgccttgcttgaataacgactgcaacgccttttggctgaatcgtatccataatcgcatcggctatctgctccgtcaactgctcctgaatctgcatacgacgtgcaaaaacatttacaacacgaggaattttcgacaagcctaccacttttccatcgggtatatacgctacatgnnnnnnnnnnnnnnnnnnnnnnnnnnnnngctcacatgtagagtaaaactctatgtcttttaaaagcaccatctcatcgtttgaacttgtaaaaagtgcagacctaagtatctcatgcggatcttctttgtagccgccaaagataaactcataagcctttttaaccctttgcggagtctttaaaagcccttctctgtttggattctctccaacatgaagcatcatatattttactgcattttcaaattctgtatcttgtttatccgacaatgtcacaccctttagactcttttataagtgatagggtatcaagatatagctgagaagtttatgtaatttgactgatatttattgcggttcgtatgaagaaattggtttttttgaggatgaacagtgttcagagccttgcacaggaaccaataacctgtttattatagcccactcgtttctcactcggataaactatatctgttatgctataatatttttaattaaaaggggttgaaatggcaaatacaattttaggattagatttaggtattacgtcaatcggttgggcattggcaaatgttgatgatgcaaatccgactaacaataggataatcgagagcggtatcagaatttttacaatagcagaacacccaaaagatggaaaatctttagctcttccgcgaagagaagcaagaagtgcgagacgcacaacaaaaagaaaagctcaaaagttaagagccgttaaaagattgctgattagtgaaaaaattataacgaccgatgaacttgaaaatctctttatcggcaacaaaaaacaaatagatatttgggaattaagaaaagatgcactttatagacttcttgacaacaaagagttatcccgcataatgatccatctcgtaaaacatagaggctatgcttcaaaccgtaaaagcgaagagccaacggacagtgaaggaaaagctgtacttggcggaatagaaaaaaatgaaaaaatagttcaagaaagtgcttatctaactataggcgaatacatcgcaactaaagtaaaaaaaagaaacggtaaagacagtgaaggaaagctaaactatgaaaattccatctcaagagccatgcttataaaagagatagaaactatttttgaaaaacaaaaagggtttgaaaataaatttgtaaataatgaactgcttaataactacaaagatatagcttttactcaacgaccgctaaaatcggttgagggaatggtggcaaactgcccatttgaaacagaccaaaaaagagcccctaaagcagcttacacatttgaaaaattcagagctttgcaaaaactcaaaaatcttagaatcattactcaagatggtgaggtagccttaacgaaagagcagataaaccaagctatatataaagcaaaaactacaagtaaatttacatataaatcactaaaaacactttttagtttcgataaagccgtacagtttaaaggtctaacatattttgaccataaaacaggggagataaaagaacctgaagctgcaaaatttttggattttagtgcataccagaagatacaaaaagcctttgaaagtgccgacaatttatattggagcaagatagaaaacagtgatacgcttttagatgatatcgcaagagttcttagcacacaaaaagatgacaaaaaatcttttgaagagttgcaaaaaattattgacaatgaagcggtatcaaatgctcttgtcggtgtctctttttcaggttttagtcatataagcacaaaggcattaagaaaaataaatccgtttcttgaagacggtcttgattatgataaagcttgtgaaatggcggggtatgactttaaagcaatatttaaaggcgacaaatcactttttctaccgccgctgaccgagcaagaaaatctagagatgacaaatcccgtagtaaagcgtgcagtagctcaaatgaggcttgtttacaacgcaatagcaagaaaatacggagccgttgataccgttcatgtagagtttacaagggacattaaaaagtctcataaagatagaaatgatattaaaaaggcacaaaatgaatttcaagcgctaaaagaagaagcgaaaattcatgcgatagaaattttgggtaaagagccaagtgcaaaagagcttctaaaattcagactttggcaagaacaaaacaatgagtgcatctacagcggcgaaaaaatccgcccagaacacttaatggacgaccttgcgacacaagttgaccacatattgccatacagccgctcgcttgacgattcgtttaacaataaagttttatgttttacaaaacaaaatcaagacaaaggaaacaaaaccccatttgaatactttggagcaaataaagagtcaaaagagtggcaggagttctctataagggttgaatgttcaaaaaacctaaaatctgcaaaaaaaggcagactcacaaaaacaaattttgacgaaagcagtgaaaatagttttaaagagagaaacaaaagtgatacctcttacatatccaagtttgtaaaaaactatatnnnnnnnnnnnnnnnnnnnnnnnnntgcaccatgcagaagatgcgattattttggctttttctacacagtcgcaggtacaaaaactctcaaccgtatctgctgcaagagagggatttagctttaaaactaaagaagaaaaagccaaaaatctaaaatttgaaccacctatggaagagttcggcaacaaagtaaaagagagtgtgagcggtatatttgtttcacatatgccaagaagaaagataggcggagctgctcatgaggcaacagtatttagccataaaacattaagtgttaaaaaagtagatggaaaaattgattatttaaaaggtggtagtgcaaaaaataatgtcaagctcaaacatggactcgctaagaatgacgctatgcctcgtgttgacctgtttcaaaacaaaaaaacaaaaaaatattatctagttcccatctatgtaagcgactttgtaaaaccaaaactgccaaatcaagcgatagttgcaggaaataaaccgtggatagagatggatgaagagtatgagtttttgttctctttttataaaagcgatctgatagaggttaagactaagaagacggctacaaaagagtctgttcaagttttgggatactatgacagnnnnnnnnnnnnnnaaccattaaatctcatagcggagatgaagaatttagttatggctcacaaaacttagtctttataaaaaaataccaagtagatgctctgggaagttatgtagaagtaaaaaatgagaagagacagggtacaaaaaaagagaaaaactaaactctaaaggaggcagttatggcggcatggagaagcgtacttgttaccaaaccttgcaagttgagtgtgaaaaaccttcagcttatttacgagccgtatgaggaagagaatataaaagttcctcttgaagacataactgttatagtgcttgaaacacatcaggcaactgtaacgacggcacttttaagccaaatagccgaaaaaaatattgccctctttacatgtgatagctatcacataccaaacggctgttttaccccgtttcatcaacactcacgactctcgcaaatagcacatatccaaagagatatgaaactgcctcttaaaaaacagatatggcaaaaaattatcactcaaaaaatctcaaaccagtcaaaactcttagatttttttgagattgacaacatccaacttgaacttttaaaagataaggtaaaatcaggcgacagcgaaaacctagaagcacttgcggctagaaaatattggcagatgctctttaaaaactttttacgagaccaaaaagcgcttgaccctagaaatatagcactcaattacggttacgccgtagtaagaggtgcagtggcaagatccctagtcgcacacggcttactgccaacttttggagtgtttcacaactcagagctaaacgcctataatcttgccgatgatatgatagaaccgctaagacctatggtggacatggttgtaaaaaaactcgaaattgaagatgaactcgatgtgcatcttggcataagcgtaaaatctgcacttataaatgttttaaatatgcagatgaggctaaacgatgaagatgttacccttttgcatatctgcgatgttatggctcaaacatttgtaaaatcattaaaacttaatgatacataccatctaaaactgccaacgctgttatgaaagagcaaaaatttatgtggttgtttgtcttttttgatttaccgacaaaaacaaaaaaagagcgaaaaaaatatacccaatttagaagccatctcttaaaggatggatttatcatgatgcagttttcggtttatactagaatctgtaaaggcgatgacagtgtggacactcacaaaaaaagagtaaaagaacatatcccaccaaaaggcaatgtcaggatgatttccataacagacttgcaatactcaaagatggannnnnnnnnnnnnnnnnnnnnnnnnnnnnnaaaactagaaaaaaagcaacttttgctattttgagtatatatgtaacataattactgtcttaaattataagaaaataagatgtttttgtaaaactctctgaaaaaaatcataaaaaatagactatttttcaaaatttacatcaattttttttacaaaaaaattgatgtaaaagccccatccacaggagcttagaaggtaggagtatagcatatccgagtgagaaagggggctataacgaacaggttgttcttttagcttccgttataagtatagcatatccgagtgagaaagggggctataacttttagagatgagtattatgataccgacaaagtatagcatatccgagtgagaaagggggctataacaaacttctatccacatcttccaacacctttagtatagcatatccgagtgagaaagggggctataacttaaaatcttgctcactctcgagtcttgttagtatagcatatccgagtgagaaagggggctataacgtggttgaagatgatatgttggcagatgagagtatagcatatccgagtgagaaagggggctataacggagtgtaataaattaactttgagtgacaaagtatagcatatccgagtgagaaagggggctataacatggcgttaagcatggttctatttttgttcagtatagcatatccgagtgagaaagggggctataacaacaaatattcttttataaaactggcttgaaaattgcttttaaatgctaagacaaataaagatttatcccacaaaaaggcaataagataaaactactgcttctctcatttttactatatcttcaaaactatttacactcagcggtttttaaaaccgagtttgaattttcacttttagagtttttgatactattttcagtgctatctctattttcaaaatcaaaacagtttaaaatatttatacttattatacaaagtctctatctaattcattttatttttatctcttactttggaaatcaaattttatatactgatatttatctattttttacacatataacagagacttttgagagtgtcgcgacactttatggtataactttctacccgctgcttatcgttacaacaacctcatttatcataatgtatataagatatgaaaaaagtaaaataccgacatttttactatctgcatttttactcttttttcttttatttcaagataagatgtatgacgcttcactttcacttattaaagagagtgtaaaaagtatctttttaaaaaaagagaagggcgatatacaaaagagtgacgataaaaacagagtccctttgcataaaaccgataacaatatcattttagtcataggcgagagcatgaggagtcgtgaaaatttaaaagagagatatgaaatatttgaaaacttcacctacaaaaccatagtaagcggagcaacaaatacggatgtcgcagtgcccatgcttataaacggcggtatctctccgcaaaaaataaacctagaacacaatctatttctgctggcaaagaaaaacgggtataaaacctcgttcataaccgcacaaaatgaaaaaagcttaaaatatatagagccgtatcttaatagagagtatatagatgattttaaaatattaggctcacgggacgataaagatctgatttataatttgcaaaatatctctttagaagataataatcttattgtgctgcagatgcagggcgaacatagcccttatatatattatgaaaattacgacagagataatccgattgagcttagatatcacaaatcnnnnnnnnnnnnnnnnnnnnnnnnnnnnnnnnnnnnnnnnnnnnnnnnnnnnnnnnnnnnnnnnncttttatttttatatttctctcagatcatggagaatttataggagaaaacggcaaaataggtcacaataggtttgaaaaagagatctactccgtaccgttagttttgcattcaaacttagaagcacacgttgaaaagttaaaaaaccataatgatatttatgagttgatatattaccatctgggttacgcaaaagagttcaagcttcaagagagagataagataagagtttacggaactatgattacggaagaggacggatatatagatattgacatgtagaaatctctacatgtcaaaagattacattacaaaaatatgaggaacgataagcggatatcttttcatttttctatagatatgttttctaacaacttggcgaaggtcattttccaacgctcttggattttctatcaatccctcttttatatttgcaaggaagtgttctaaaacatcttccatctctttggcaaaatgtttgtcttgcttgtcagcgaccaaaccaaacgatgtaacgtttggtttagagagcatcgtagagtgctgtccgtcgatttgagcaactataacaacaatgccatcagaagcaagtttttgacgatctattacgatgtcatcatctattttatgattattttggttgtcaatatacactttacccgttcgaacagtttttacttttctcatatattttggagcaatctctaccgtatcgccatcatttaaaacataaatatttctctcaggaacgccacacatcatggcagtctctttatgtctcataacatggttatactcaccgtgaatcggcaaaaagaatttaggattaacaagacgaagcataagcttttgctcttctatggaagcgtgacccgaaacgtgaatatctttatctgatgatattctcgcacctgctctttgtaaatgatttagcatggcagagatagatccctcatttccaggaattgcacgagatgagagaacaattaaatcatttggtttaatcttcacatgtctatgctctccgattgacattctaaataacgcagaacttgtttcaccttgtgaaccggttgttacaattaaaatatctttatcgttcatagaagcaatctgttcaggttctacaaatatgctttttggaagttttatgtagtcatactgcatagccacttctatatttctctccattgaacgaccgattacacaaactttacggccatactttacgccgtattgaatcgcttgaaaaacacggtgaatatttgagctaaaagttgacaaaataactctaccttcagcctttgcaaacactctatccattgccggtgcaacacttaactcagacggagtaggagctgtattgtatgagtttgtagagtcactcagtagacaaagaacgcctttgtctccataatgagcaagtctatgcaaatcggccgtataaccatcaaccggagtgtggtcaattttaaagtcgccagtatgaataattgtccctgctgccgtagtaattgccaatgatgatgaatctatgatagagtgggtcatatgcatccactctatctcaaaatcttcaccaattttatatatttttcttttttctataggattgaaatgttgtctgcaatcttttaaatgatgctcgtcaaatttgtttccaatcatagccagcggaagcggtgagccatatatagggaactgcatctctttataaagatacggcattgcaccgatatgatcttcgtgagcatgcgtaataattaccgctttaattttatcttttatctcacgcagatatgaaaaatcaggtattaaaatatcaacaccatgcatgtcctcatccggaaagctcatcccgacatcgaccaatatcgcttcgttttgagtttcaaataccgtgatatttccaccgatttcactaagcccgccaagcggagtaatgcgaattttctcttttgaatttaaatctaatttataatgcggattaagtctctgcttatgagcttcttggttaatctctacgaatgcttttagcttttcatcaataggtgtgctttgtcgacgacgactaccgctactttttgatacattcttgttcctattgccactttgcgtatttggcgacttattgctgttgttgttttgatttggatttttataatgctgtttacgattttcttgagaagtactttcgttaatttcctgattctcttgttccatccaaactccttgttagtttatagagttggtgatagtctaatgtagaaacttgatgaggacgaaccgtttgtgttaagcccagcttattaaaagcttcttgaagaagatttttttcatacattgccgataggtttttcatcagagtttttctaggctgcgtaaatgcaactcttagcatatcctcaaaatctttatcacatctatcactctttttttgtatcaaaaaaactgcagaatctatcttcggctgcggttcaaaagctgttggcggaactttcacaacaatgtgcgcttctcccacactttgagttataatgctcaaagaaccaaatactttattaccttcattagcacaaaatttttctgcaacttcaagttgcaccattacaagtatatttttgcattttggatctgcgagggcttttagaattatattannnnnnnntggcaaattcgccaccaaatcatacgactcttctataagttcactcttccaaacagtaaggacatctccgcaatttaaatggagctgtttggttgcgatctctttttcaaacttattttgtagcagtttacacaaatcggtatcgacctcaaaagcttctacacttttgacatctactaaatatttagttaaatcacctaagccaggcccaatttctacgattttattatcgttgttgggcatcgcttcgacgattttttgtaaaacagtttcgtcttttaagaaattctgtccaaatttcttttttgctacaattttttccattggaaagcattttattataattttacttatacttagttaatatttataaaaaaagttattttcatgtcacaaatgtagcaatttaatacaaaatgtttcacatgaaacatttttgcatagttttgaaaaaactaaatataagcgacaaagtgtataatttcactatattatataaggtactgcatttgaactattttgcaaaaagaattatcccgtgtcttgatgtcaaagacggacgcgttgttaaaggtgttaactttgtaggacttaaannnnnnnnnnnnnnnnnnnnnnnnnnnnnnnnnnnnnnnnnnnnnnnnnnncatcaagcgacaaccgagataccatagtagacatagttgcacaagttgcacgtgaagtttttatacctctaactgtaggcggcggcattagaaaacttgaggatatttacaagcttttaaatgtcggatgtgataaggtaagcgtaaattctgcagccattaaaagaccggaacttataaatgagggcgcaaaaagattcggttctcaatgcatagtgacggcaattgacgttaaaaaaactggcaatagatatcatgtctatttaaacggaggacgcattgatacagggcttgatgccgtagagtgggcaaaagaggtagtagaccgcggaagcggggaaatactactaacatctatggatgcagacggtacaaaagccggatttgagttaaacattacagagcagatctctcgtgcagttaatgttcccgtaatagcaagcggcggagcaggaacgatggaacacataaaagaggcatttgaacatggtgctgatgctgcacttgctgcaagtatatttcactataaagagatagatattatggatctaaaacgctatcttcatgcaaacaatataccggttcgtttatgatactatgtgcgggaaacaacgaaacttttgaatttgcgactcccatcggagtagggcttattgagtctgctatgaatctaactagactttgcctttttgataaacctgaatttttattatttataggaagtgcaggaagctatggagaacataagatttttgatattgtagagtcaaaaacagcatccaatatagagctttcttttctaaataatgatgcgtacacaccgcttgataatgttatttctacaaacataactaatataaaagatgttattgtcaactcatcaaactatatttcaactaacgaagagctaacaaaaaagtttttgaaattaggaatcggcatagaaaatatggaattttttgccgttttaaaaatagctcaagagtttgatatcccagccggcggtgttttttgcataacaaactatactaacaaaaacgcacatgaggattttttaaaaaatcacgatgaagcaaaaagagttttagctcttcatgtaaaaaaaagaatcaaggaactaacaaaaaaatgaaaccatcgctgcttgattttacactgggagagttacaaaaagagataaagccatcttttagagcaaagcagattttcggctggctctatcataactatgcacaaaattttgatgagatgaaaaatattccaaaatcactcaaagatgagcttgcagaaaaatttgtactcaatcctcttaaaattataaaaaaagaactctcaagcgacggcacgattaaatatctttttgaacttcaagacggcaaaaccatagaagctgtttggctaaaaatgaaagaagagattacagacgaaaatggaaatgtcacgcaaaaggcaaaatatactatctgcgtatcaactcaggtcgggtgcaaagtagggtgtgcattttgtttaactgcaaaaggcggatttaccagagatctaactgcaggtgaaatagtaggtcaggtagtcagtctcaaaagagataatgagcacaagcacaacagaatgataaatattgtatatatgggaatgggcgagccgctggataatcttgctaacttggcaaaagctatagagatcttcaaagaagaagagggcttgtgcatatccggcaaaagacagactgtttctacaagcggcttgagtaacaagatagataggcttggagagatggatctgggcgttcatattgcgatatcgctccatgcagttgatgatgagctaagaacggaacttatccctatgaataaagctcacaacatagcatctatcatagaagccgttaaacgctttcctattgacacaagaaagagagttatgtttgagtatttggtaatcaaaaacaaaaatgatgatatagcttctgcaaaaaaacttgtaaaactgctctctggcataaaggcaaaggtaaatctaatctattttaacccatatacaggaactgtatatgagcgaccaaaaaaagcagatatgatagctttccaagagtatctgataaatcacgggcttttatgtactatacgcgattctaaaggtatagatattagtgcagcatgcggacaactaaaagaaaaaacagaaagtgaattaaaatgagctatgtagagatatttcaaatagtttttttggtagtagtcttcgcagtnnnnnnnnnnnnnnnnnnnnnnnnnnnnnnnnnnnnnnnnnnnnnnnnnnnnnnnnnnnnnnnnnnnnnnnnnnnnnnnnnnnnnnnnnnnnnnnnnnnntaataccctacttttcttatataaaaataattcaaaaagaattatttattctcttaaaaaaatattactacaaaaaaatatatctattttttcttgatatgtgtaatattcacacattgtcttaatatgtgaatagcactttaattttttagttataaataccaaaaataattatttttttaagaataaatttagataaaaacaacctgaatcaataaactttcatataacttaaagtgcctaaaataggcacttttgcttattttttattttcatataagaaaaaaataaaaattttacaaaaagctcttatttgttattcacattaaacatatagatctatgttctatgtgaaacattagcggtttatatccatattttcaaaacaaattttttcaaaattcacactgcttttcacattgtattttttgccgtaaagttcaaactctaactcatttgcatgcaacaacaatcttcttgctccgcttagttttactctctcatctctatccagctccctatcaagatattttacaatctgcttctcttcttgaccataaacaggatcaccgactatcggatgtttcacatgaaacatatgaactcttatctgatgttgtcttcccgtatgaggggaacattctac

SEQ ID NO: 3608 - DNA, 16375 bp, synthetic construct
  misc_feature 1..16375: note = Synthetic
  source 1..16375: mol_type = other DNA
acctccttgtgaggtgtatttcaacacaaaaggctagacaatggcacaattagtaaacggtacagttaaatggttcaacagtgaaaaaggttatggatttatcgagcaagaaaatggtggaaaagatgtattcgtacacttccgtcaaattaacaacacaggttacgaccgtgtttcacttcaagaaggtcaaaaagtgacttttgagattggtgaaggcgaaaaaggaccacaagcagaaaacgttacaggtctgtaatttttcttatgagcggttcgccgctcattttctcaaacacctcccccaaacattttatttccactcaatcattctagagcatacaaaacagactctattctttccacatgccaagaatctatacagaatttaagagattctacactataatcgcgatacttatttaatatattttatggagttatacatgacgaaatacatttttgttaccggcggggttttaagctctcttggaaaagggattacggcagcaagtgttggcacattgcttaaacactcaggcaaaaatgttggcatgttgaaaatagatccctacatcaatgttgatcctggaacaatgagcccacttgagcatggtgaagtttttgttacaagagatggtgctgaaacggacttggacataggaaactatgaaagatttcttgatacttcttacttaaagtcaagtaactttacaacgggtcaagtctactctagcgttattgagcgagagagagcgggtggctatttaggtcagacgattcaggttatccctcatattgttggagaaattgttaagcgtattaaaatagccggtgaagggcatgacatccttattgtagagcttggtggaaccgttggagatattgaaggtttaccttttatggaagcgatccgccagatgaaacatgatgatgaagtcgaaggaacattttttattcatgttacgcttattccttacatcaaagctgctggtgaactaaaatctaaaccgacacaacattccgttcaagagcttcgtcgtatcgggattactccacagatgattattgctagaagtgaaaatccacttccgaaaactttcaagaaaaaactggcgatgagttgtgatgttgcaaacgacagtgttatagaagcacttgacgcagctactatttatgacatcccagttacatttttaagacaaaatatcttaaaacctatctctaaagagctagaccttggggaacttaatcctgatatggaagagtgggactctttggtgaaaaagattgttcaacctaaaaatcgtacagttgtcggttttgttggaaaatatcttgaacttaaagaggcgtacaaatctttaacagagtcacttatccactgtggcgcacatcttgatacaagagttgagatttgttgggtagattctgaaatgattgaagagagaggtgccgcagcccttttaagtgattgtgactccgttttagtagcgggaggatttggtaaccgtggaatcgaaggaaaaatacaagctattgagtatgcacgtgtaaacaaagttccttaccttggaatctgtcttggaatgcaactcactctcgttgagtatgcgagaaatgttcttggacttgagggtgctaactcgattgaatttgatgaaaatacaccacacccaatgatttacctcatcgacaactttttagaccaatcaggtggcatgcaacttagaacacatacgtcaccaatgggcggaacgctaagacttggggagtatccttgcgatacaaaagagggttcaatcctaagaaaagcttatggtggtgcgaaaacaatctatgagagacatcgtcaccgctacgaggcaaatcctgcataccgcgaacaacttgaaaaagcaggcatgattgttactggggagtccaatggacttatagaaactgttgagattcaaggtcacccttggttcttgggcgttcaattccatccagagtttacttcaagactacaaactccaaacccttctattttagcttttgtcgaagctagtttgagtgcagaataactatccgcatttagataagccagctctttttgagctgctttctaaaagattctccgccgaagataaaaaactctcacaaatacccaaccctgccctccttcaagatgctacaaagtcagcaaaaaaaatcgcttcagccatcgcagagaagaaaaaaatcacactgattggggattatgatgtagatggagtaagttccacagccattatggttgattttttcagacaaattccatatccacttgaagcaatcatcccgaaccgttttaacgatggttatggagtaagtccaaatgttttaaaccgagtcgatgcagatttagtcataacagtagataatggaatagcagccattcaagccgcaaaagtttgtaaagagagaggcattgacctcattattacagaccaccacactccctcagaaatcttgccagaagcttttgccattatagaccctaaactttccacatgccaataccctttcaaagagatatgtggtgcacaggtcgcatggcttcttttagggcttctcaaaaaagagttaaatctaaaaatcgatatgcggcagtttctcgatatcttagcaattgccatcatcgccgacatcatgccacttattgacatcaatcgaacgctcgtcaaagagggcctaaaagttttaatgacttcaaatcgaccctcctctatcatcatcagagattttctcaataaatcttccatcacctctgatgacattgcctttcaaatagcccctcgaatcaacgcagcagggagagttgaagatgcatcgattgcgttagccttttatacagcttcctccacaaatgaagcctataagcagtttgaacttttggggcaattaaatgcatttagaaaagagaccgaagcagagtgcacaaaaaaagctttggcatgtggaaatcactttgacgatgtaattgtagtctcaggagatgattggcacgaaggggttgtaggtattgttgcggcgagacttgtagagcatttcagtaaacctgctattgttttaagttgttccgatggagtagcaaaagggagtgcaagaagcataggtgatgtcaatatttatgaacttataaaagcaaatgagagctacctcagcaaatttggtgggcataaaatggcggcaggacttggattacagaaaaaagatatagatgcatttcgagttgctattaatcaaacagcagcacgccttaatcctgatgatttcattccaaaagagcagattacaggcatactctcatcagaggatatagaccttgaacttttaaatcttttagagagttttgaaccttatggcgaagcaaaccctcgtcctacctttctactccatgatgcccaagtgctcaatataaaacttatgggtgcagataagtcccactctagaattgagatactacaatttccacatgccaaaaagagtttagaacttatcgcctttagaactgtttttcaaatgccaagtgataggaaaatttcatgtagttacagcgtggcaaaaaatgagtttaataacagagtctccgtgcaacttcttatcaacaaaatatactaatcctccgctcatcttctaatcttaagttaaaacttttcttaagccaccaagctgtacaatgaacgcacttaaatcgcgtaaaaggaagactatgaagaagaatgtaattttagaagaaattctagctgaagttgataagcatccagagattatgtctcgtcgtgaagctctaaagtatctaactgtttccccactagcggcctccatcttagcaggtgcaactgtaggggctacatctgcagtagcttccaatgcgaagggtaaaattgttattgttggcggtggcttggctgggatgagtacggcagcacgtctcaacaacactctctccgatgcggacattactataatcgaacctaatcccctatctacctcttaccaacctgggcagacacttgttgcagcaggtctttgggagaagaacgatattctttacaatagagatgactaccttccaagtggagtcaaactcatcaaaggaagcgtgactgcttttgatccaaaaaacaataaagtcactgtggatgacgcagaagaagttacttatgatcaactcatcgttgcaacaggtgttgaacttaactatggaaaaatcaaagggcttaagggtataacaacttcagcagatgcagacagtagtgttgttaaaagtggcggtgttggtaaagatggtgtctactcactctattttgctaatggagcagaagatacatggaaaggtattcaagagctgatagaaaaagcaaaagcacacacaggaagtcaaaagctccaagcactctttacacaccctgctacccctattaaatgtggtggtgcacctaagaaaatcatgtatcttacacatgctagacttgaagaagctggtgtgcgtgacaaagttgaactcattttctatccaaatggacaaagtatgtttggtgttccagagtaccatgaagctattttgcaacagtataaagatagagactttaaatggcactatgcacataacttagtcgaaatagatacagccaataaaatagcaatcttcaaacatcactggcaagagaaaggtgaatacgacaaagacctagaagagtactctatggtgaataaaaatgagagagtagaagtgaagtatgactttattcacattacacctcctatgcaagcgcctaaagtcgttgcaacttctgaaattggttcagaaaaaggctgggttcctgttacaaaagagactcttcagcatgtgaaattcagcaatgtatggtctcttggagatgttgcggctatacctatgggaaaaacaggtggttctgttcgtaaacagtacaaagttttagtagataatatcgttgcttctatggagggtaaaagcgctttaccttctgcgtatggtggatatactgtatgtccgttaatcacaggtattggtacagttatgcttgcagagtttgactggagtaaaaagccaactccatcatttcctcttgacccaacaaaagagagatggatttggtggctcttaaaagtctatgcactcaaaccaatgacaatgtacggaatgctttcaggtagagcataatttagctttcttttatgatggctttacccccttcattccaagagacaacagggatgccaagtaaataataaatagttattttattctttcttggctacaatatgtaaattctataaaggagagataatgattaaaatcgtaaaaattgcacttactgctcttatcgttttaggaatgagtgctacagcactcagtgctgatcctgcaaaaggtcagaagctctatctcaaaaatctaaaagctgtttgtggaatgactggcgcagcaatggctggaaagcatacacaagatgagtggcaagaacttcaagatgagggtaaattggcagatgagataaaaaaaatatgtccaaatgtaaaggggggtgctttgaaagagaagtatttaccattttactatgacttctttcatgagtatggcagtgacagcggaaatgtgccgtcttgctaattaaaacttcgattataacttcaagcgtaagcttgaagttatcctaaatcataaacctccttattcataggtacgtatgccaaaaataatcaacaacttagatgcccgctcagaaatcacagagataaaagcactcaatgaccagattgtagcttttagtacaagatcacatggaatcaaactttttgctgtacatgaatccgaattaaaactaagcctcatcactaaacacctcaatgcgcaaacaaaagcaatcgcttttagcaatgacggtagtttcgttacgtttgcaaatgagacctatattttcattatccacatgccaacaaatgagattataaagaagatacctattgaagaagatgtcgtagagattctatcctttgacctctcctcaagctacatcattgcaggaacaaagagaggacgcgttttacaatataagtgcaatgatgtctccctcctttcaagattatgttcctttccgtactctaaagttcaagacaaagataaagttgacaaaaattttgtcagtgcttttgcttttcactcaaataaacttgcatgtacgggttatggtggtgcaatttatgttttggacttgcactcacacataaaaaaagaggtatttacccacaatagaattcgttcagatgctctatgctttttagatgaagatagagtcgctaatggcgactgccatggtgtaatacatatcagatccctcaaagacaaaagggttcataaaaaaataaatactccttttacaaaggtgaagcaaattattttaatgcctaacaaagattacatcatggtatgtggtcaaacaaatacgcttgccgtgattgatataaaaaattataaaattgtccatacaaaatatatagagtgcgaagctgagatacaaaggatttctcttcttgatgatgagacacttcttatagcacttaagaatgcacaaattttaaacgtatttcttccaagtctcaaacagcttaaatcttttattcttcacaattctcttgaccttgcttatgaactcattgcaagagagccgatgctaagaggttctttagagcaccaagagttggaagctacatttgataaaatttatcttcaagcaattgatgcccttattcaccataatgaaaagttagctttgcaactcacagatatatttaaaaatgttctctcaaaaaaagtgcaaatcagagagctttttaccgcttttaacaactatccgaaactccaatcctattttacagagaagaaccacgctttagcttatgctcttgtgcttaggtttcctcctttggaacacacttggcaatacaagagaatggagcaaacttggaagcaagcatttatgtccgcacaaaagcagatgatcctctcaagagaagagaatgcaaaactttgtttaaacgattacatgatggtaagctccaagcgacctcttattcaactcattttaaagcaaaacaaagagttcatcgaatttttaaaagctataggagagaaggattattttaaagtacatcatttagcgcttaaaaatgaaacttttacacaaatcccaacctataaagcactcaaagagaagcttcaagaagacctcaatgagataaaagggcatatcaataaatgtgatgttgatttagcagaagagatgcttttaaagcttaaaaacttacctacacttgcccaagaggtttcagagctttatgaaaaatgtcaaaatattcaagagttgcgaaaagcttataaaaagagtgattttttagcatgctacaatattttagacacgcatgacaatctttactctacagagctcggcttgcttttagagagacattggctcaaaatagtccacaactgtgaagagtttgccctcaaggggaatataagagatattaaagcgtctcttggtgaacttatacacataacagagagacgaagtaaaattggggatttattaagactgagcttccatgtaaagataaaaacattgctcgctcaaaaaagttttaaaaaagcagaaaatattatctactcctacgcggacatctttggtcgtgacagtgaaatcagctcgattatgaaaaagtatgaagctgcttcatccaaaaagctagctattacacacgatcagcagaactctcgagataactggattcattctgatatcatcatgaagggtcgttcatcagtttgattaatgcctcttctgtctctttgtaatcactctgataccttgcatcttgtgttaaaaacttctccatccctgtttttttgcttatcgcctcatcaagttcagggtcagtcccctttgtataagctccaatgcgaattaaaacctcgttctcttttaaaagtgtatagattcttctgaactttaaaatagcttgtagatgctcagaagagacaatatcgctcattacccttgaagcggaatttaagacatgcacagggggataaatcccaaaatccgttagctctcgagagagtacgatatgtccatccaagatagaccttgattgatctgcaatcgggtcactcatgtcatcaccctctataagaacagtaaagaaggctgtaatagaacctttgccctcctcttttcctgctcgctccatcaactgtggaagaagtgtgagcgaagatggtggataccctttagaggttggaggttcaccaagagccaaacctatctctctttgtgccatcgcaaaccttgtcacagagtccatgataaaaaggacatcaagccccttatctttaaaatgctctgcaacactcatggcagcgaatgccccatactttctcatcagaggagagtcatctgaagttgccacaatgataacggtattttctaaatttccacctagattttttgctataaattcaggaacctctcttcctctctctccgataagagcaacaaccttgatgggagcgttagaacctcgtactatcatacccatcagagtagatttaccgactccactccctgcaaagattccaagcttttgcccttttccacatgtcaaaagtccatctatactttttacacctacactaaaaatttcatctatcattcctctcttcatagcagcgataggtgctttaataattggagagagttgtgagctgataatcgctccctttccatcaatcggtcgcataaatggatctactacccgaccaagcaaagaagaacctacagggatattcattcctgcttgatctaaaaagactctgtcccctgaacaaaatccctccacaaaactaaaaggagtaataaaaaaagtttttccgtctatctctgtaaccattccaaatgtctcttgaattgtatcatttgaaactatttttaccatatcgcttatgcttactttgagccctgtagccgtaataacggtggcgttgattttaacaacttcaccaaagggtatagagtggttttgagaggatatcttttctttaaatgaagtgaatggcatgtggaattagtaacgcgtgcccgaaggagagttgataagtgagaaaaactcacttctcgttttttcatcttttttaaagagtccgcgaagtgctgaagaagttgtcgtagagtttatcttttcaacccctcgcatctccatacacatatgacgtgcaacaacaactactgcaacaccttttggagctattgactccataatcgcatctgctatctgttcagtcaactgttcttggatttgcatacgtcgggcaaatacattgacaacacgaggaattttagagagacccactacttttccatcaggaatataagcgacatgcacacgccctattatcgggagtaaatggtgttcacaagtagagtaaaactctatatcttttatgagaaccatctcatcattggagcttgtaaaaagtgctttttctaaaatctcttttggattctctttatatccgccatagataaactcatacgcttttctcactcgagatggagtctctagcagcccttctctctctgggttttcacccacatgaagcatcatcgtttttacggcgttttcaaaatctgtatcttgtttactggacaattctaatgcctttgtgaagtttttaatgatggtaggataacactaaattgctgagaaaatgatgtgatgggtgatttaatatcattggcatgtggattgaaaaaagaaaattggtttttttaaggatgaacagtgttcagagccttgcacaggaaccataacctgtttattatagcccattcgtttctcactcggataaactattgatgttatgttataatatttttcattaaaaggggattaaatgtcaaaaatgattttaggacttgatttagggattacttctataggctgggcactcgtaaatgttgatgatgaagatgctcaaaacaacaaaataattgatagcggtgtgcgaattttcacaatagccgaacacccaaaagacggcaaatcactagcacttccaagacgagaagctagaggagcgaggcgaactaccaaaagaaaagctcaaaagataaaagccgttaaaaggttgctcataaaagaaaaagtagtaacagcgaatgagcttaacaatctttttatcggcaataaaaaacaaaaagatgtttgggatttaaggcgagaggctctttatagagaactaaacaataaagagttcgcccgcataatggtgcacttagcaaaacatagagggtacgcttcaaaccgtaaaagcgaagagcctacagatagtgaagggaaagccgttctgtctggaattacgcacaacaaaacaattcttcaagaaaaaagctatttaacaataggcgagtatatttccacaaaaaccaaaaaaagaaatggaaaagatacagaaggtaaactcaactatgaaaattctgtctctagagagatgctcataaacgagataacgactatctttgaaagacaaaaagaattttcaaatccacatgccaaagaggaactactagaggagtataaaaacatagcctttactcaaagagctttaaaatctgtcgaaggtatggtagcgaactgcccttttgaaacaaacaaaaaaagagcacccaaagcaagttcaacttttgagacttttagagccttacaaaaactaaaaaatcttagaatgattagcaatgagggtgaaagtgctctcacaaaagagcagatactccaagcaatacaaaaggcaaaaaccgcaaaaagctttacttacaaaacactcaaaactctttttgctcttccaaaagaggttcaatttaaagggcttacctattttgaccacaaaacgggagaggcaaaagagcctgagagtgcaaaacttttagattttagtgcttaccaaaaaattaaagatgccattcaaagcagtgataatctatactggaacaaaatagaagagagtgttaatcttcttgatgagattgcgaaaatcttaagcacacacaaagatgacaaaaaaagcttagaggagctaaacaaaattattgataatccatctgtttgtaacgctctaataagcttgtctttttcaggtttcggacatataagtgtagaagctatgcgcaaaataaatccatatcttttagagggtatcgattatgataaagcctgtgaaatggcagggtatgattttaaagctatatttaaaggggacaaatcaacgcttcttccacctcttagcgaacaggaaaacttagaaatgacaaaccctgtcgtcaagcgcgctattgcacagatgcgtcttgtttataacgccataacaagaaaatacggtgcaattgatgccgtgcatgtggaatttacaagagatattaaaaaatcacataaagacagaaacgacataaaaaaatcgcaagaggagtttcaagcactcaaagaagaggcaaaagctgaagccataaaaatattaggcaaagagccaagtgcaaaggagctactcaaattcagactttggaaagagcaaaatggagagtgtatttatagtggagcttacataagcccttctattttagccgacccttatgcaacagaagttgaccatattctcccatacagtcgctctcttgatgattcgcttaataacaaagttttatgcctcacaaagcaaaatcaagacaaaggcaacaaaaccccttttgagtattttggagcagacaaagattctaaagaatggcaagaatttacaggaagagtagaaggtttaaaaaatattaagggtgccaaaaagggcagactcactaaaactaatttcgacgagagtagtgaaaatgcttttaaagagagaaacaaaaacgatacttcgtacatctcaaaatttgtaaagaactatatagaatcgcatgtggaatttaaagagtcaaaaatgaagcgccatgtctataccatgaatggcatgctcacctcacaacttcgctacaaatggggcgtaggcgataaaaacagagaaaatcatttacaccatgcggaagatgctatcatcctcgcttttgcaacgcaagcacaagtacaaaaactctcgacaacttcggcaaaaagagagggttttagttttaaaaacaaagaggaaaaagcaaaagagctaagatttgaaccgccgatggagaactttaacgaaaaagtcaaagaaagcattgaaaatatttttgtttcccacatgccaagacgaaaggtaagtggctcggcacataaagagacagtctacagcaataaaacacatagcgtgaaaaaagcagacggaaaagtagagtacctcaaaggcaacagcgtaaacaacaatgtcaaactcaaacatggcatagccctcaacgactcaatgccaagagtagatttgttccaaaacaaaaaaacaaacaaatactatcttgtaccaatctatgtaagtgactttgttcaagaaactctgccaaacaaagcgattgtagcgggcaacaaaccgtggttggagatggatgaggagtatgagtttaaattctctttttataaaagcgacctcatcgaagtcaaaacgaagaaaactgcaacaaaagagtctgttcaggttctggggtattttaatacggctgtaagttcaactgctcaagtagttattgatacacatgatggaaatgaagaatatagatatggcacccaaaatcttatctttgttaaaaaatatcaagtagatgcactaggaaattacatagaagtcaaaaacgaaaaacgacaaggaaccaaaaaacaaaacagataaattctaaaggagtagcaatggcagcttggagaagcatacttgtaacaaaaccttgcaggttgagtgtaaaaaaccttcaactcatttatgaaccgcatgacgaagagacaatcaaagttccgctagaggacattaccgttatcgtaatagagacaaaccaagcctctattaccacggctcttctaagccagatagccgaaaaaaacattgctctgtttagttgtgatagtttccacatgccaaacggctgctttacaccttttcatcaacactcaagactctctcaaatagcccatattcaaagagatatgaaactccctctcaaaaagcaactttggcaaaagataattacacaaaaaatcataaatcaatctgaacttttacactatttcgataaagacaatatgcaattagaagtgctaaaagacaaagtaaagtcgggagatagcgaaaacttggaggcactcgccgcgagaagatattggcaaaacctctttaaagatttcttgcgagaccaaaaagcactcgaccctcgaaacatcgctctaaactacggctacgccatcataagaggtgccgttgcccgatcgctcgtagcgtatgggcttttgccgacttttggagtatttcacaactcagagttaaacgcttataacctagccgatgacattatagaaccgcttagacctatggtagatatggtagtaaaaaaactggagatagaggacgagcttgatgtgcatttaggtgtaagtgtcaaatctgctcttatcaatgtgcttaacatgcaaatgcgtcttaacaatgaaaatgttactttggtaagtatatgtgacattatggctcacagttttgtaaaagcagttaagctcaatgatgcaaactgcctcaaacttccagagatacaatgaaagagcaaaagtttatgtggctatttgtattttttgatttaccgacaaaaacaaaaacagaaagacgcaaatatacgcagtttagaaatcatctgataaaagacgggtttatcatgatgcagttttccgtttatacacggatatgcaaaggcgatgacagcatagacacacataaaaaaagagtcaaagagcacattccgccaaaaggaaatgtcaggatgatttccataacagatttacaatattccaaaatggaaacactcataggaatcaagacccaagaagaaaaattagaaaaaagacaacttttactcttttgagtaaatatgaaacatttttttcagaatttttccaaaattgtagaaggattggagtgtttccattttaaaaaaaatcgaaaaattatctaatttacaaagattttagagatttttttacagaataaatagcctcaaaaacccaaggataaagggctagagaagctagaagtatagcgtatccgagtgagaaagggggctataaccactttatgattatcatgcacctatcacaaagtatagcgtatccgagtgagaaagggggctataactaatctgaccttgataagaaaattgactaaagtatagcgtatccgagtgagaaagggggctataacctcattttaacaacctagtgtaaaactcgtagtatagcgtatccgagtgagaaagggggctataactcagaagaatgactgtctcttaaatctgggagtatagcgtatccgagtgagaaagggggctataacctcaaaagctagatgatgccgatagacttgagtatagcgtatccgagtgagaaagggggctataactatagttcaggtcttccctttttccaatttagtatagcgtatccgagtgagaaagggggctataaccttgaggtttatagaaaattaaatggtatgagtatagcgtatccgagtgagaaagggggctataactcctcgttggtcacaatctactccataattagtatagcgtatccgagtgagaaagggggctataactatgtgaaagatggcaaaaaagacttaataagtatagcgtatccgagtgagaaagggggctataacaagcggtcgaaaacgatggcaatgctctgcagtatagcgtatccgagtgagaaagggggctataacaaagagtacaaacaagagattgaagatataagtatagcgtatccgagtgagaaagggggctataacatatagatatagatatttaacctctaccgcagtatagcgtatccgagtgagaaagggggctataaccacgtacgctttaaacgacaataagcgttagtatagcgtatccgagtgagaaagggggctataacgacgaaattgatgatagactggtagcattagtatagcgtatccgagtgagaaagggggctataacgaagagtacaaacaagagattgaagatataagtatagcgtatccgagtgagaaagggggctataactacattttgttcaacagagaacgtcatttgagtatagcgtatccgagtgagaaagggggctataactagtaataatattttgtcattgtctgttaaagtatagcgtatccgagtgagaaagggggctataacctacatattgcagggcattgccatcattttagtatagcgtatccgagtgagaaagggggctataacttacgtatcgtagagcattgccatcgttttagtatagcgtatccgagtgagaaagggggctataacagattgccacatgataaaaagatgattcttagtatagcgtatccgagtgagaaagggggctataactagcagcaagtgactaattatctcttccgtagtatagcgtatccgagtgagaaagggggctataacctcacccattttgtagccttaccctgtccaagtatagcgtatccgagtgagaaagggggctataacgaagacgaaaagataataagggtagcatggagtatagcgtatccgagtgagaaagggggctataaccttctaaaatgaataaagatgaagagatgtagtatagcgtatccgagtgagaaagggggctataactatgaaatcatctgctatcaatagagcatcagtatagcgtatccgagtgagaaagggggctataacttcttaaagttgaaacgtaatttgttatagagtatagcgtatccgagtgagaaagggggctataacacaatctgtatgttagtaggaatactaaatagtataataccccaagaaaacaacacaagaaaaatcaatttctaattccaaaagagttaagatacatagattattttaaggggtagatgatgagtcgaaagatgactaaatatagcactgaattgaaaacaagattagtacttgaagtattaaaaaatgagcgaacacttaatgaaattgcgagtgagcataatatcattccaaagaatctacagaactggaaagcaaactttttagcaaatgctgagatagcgatggag

SEQ ID NO: 3609 - DNA, 15661 bp, synthetic construct
  variation 12606: note = note, n is a, c, g, or t
  variation 12862: note = note, n is a, c, g, or t
  source 1..15661: mol_type = other DNA
  variation 2541: note = note, n is a, c, g, or t
  misc_feature 1..15661: note = Synthetic
caaaagtaacttgaccatcaccaccgatgacagccttatctttactcttataagcaagtatagtagtggcatcaaacatgggtattacttctcgccttgtacatcaatatgtaaagttgcatggataccgtgaccgagtttaaggtcgaggtcatgctcaccaacagttttaataacttttttgtcagtgatatgttttttgtcaattgtgattccatgttgctcaaagagtgcatgagcaacttcgtctttcgtgattgaaccaaaaaggtgaccattgtcgcccatttttttagtgatgataacttcagctttttctaatttaacagcattctctttttgaagagtaatctcagcagctaaatcagcagcagcttgtatctcgtctgctttgtgctgtgctaaaatctcaggagttgctgcttttgcaaaaccttttccaattaaaaagtttttaccgtaaccatctttaacttctttaacttcaccagatttaccaaggctttttacatcttttataagtaaaactttcattagttttctttctccccaccataagaaacgataccgtgtgtaaggttacctaattttgtataccctaagtcaggcataatacgagcgacgtgagcagaacggctacctacatggcagtaaagaatgatgttttcattcttatctagttttgcttcttcaagtacttggtaaaagctacttgtaggtactaaagcatcagcacctttgatgtgacccatttgccactccatatcttctcgtacatcaacaagtttaaagtctaccattcccaattctctagcttcaagaagtgctaccatctcatctgaatctatttcggcttggttgacaagtacttcacactcttctttagttaatccacgagagtgagtgtgaactgcttcgcctatccccatttctgcacgtttttttgctgcaaattctggagtacaaaagataccacagtgacaagcaccaagttcaggaatctctttttcaatagccggtgtacatggacaagttctgttatcaacagactgaggtttaccatctacttcttcaaccataaaacatggacaaaaaagcttgttgtacatcatcttgttacgagcaagacccatctgaacaccttcatttacttctttatccgggttatattcccaaccaaattgactaattaccttgtcagtaaacttaacagttttttccattctttctataaactcaggtgaattcatatctattttcatcatactcattatttagttcctctctttttaccagcgattatacgacgaagtgcatttaaacgaataaagccttctgcatctttttgattgtaaacttcatcttcttcaaatgttgaatgctcttctgagtataaagacatgtctgattcacgtcctactacttcaacattacctttgtaaagtttgagtttaacagttccttgtacatatttctgagttgtatcgatagcagcttgaagcatctcacgttctggtgaaaaccaaaaaccattgtagataagttcagcatactttggaatcatgccatctttcatatgcgcttcttcacggtcaagacatatagattctatggcacggtgtgctttaagcatgatagttccacctggagtctcataacaaccacgagctttcataccaacaaaacgattttctacgatatcaatacggcctataccgtgtttattaccatattcatttagtgtacgaagtattgtagctgggcttaactctttaccattaagtgaaattggatcaccatttttgtagccaatagtaatatactctttctcatcaggagcatcttcaggtgagttagaccataaccacattgattcttctggttcattcatagggttttctaagtgaagaccctcataagagatatgtaaaaggtttgcatccatagagtaagggctaacagttgggttaccctcagcatctaaatgttttgcatcgatgtctataccgtgttctctagcataagataaaagtttctcacgtgaatttagatcccattctctccatggcgcaattactgtgatgtcaggattaagtccaaggtatccaagctcaaatcttacttggtcatttccttttccagttgctccgtgacttactgcatccgcacccattttctcagctatctcgatttgtttcttagcaataagtggacgagctatagaagtacctaaaagatattcgccttcatagattgcatttgctctaaacataggaaatacataatctttaacaaattcttcttgtacatctaaaataaaaatattttcgggtttaattccattatcaagagctttttgacgagctggttcaacttcttcaccttgacccaaatcagctgtaaatgtaataacttcagccttgtactcttcttgtagccattttaaaataacactagtatcaagtccgccagagtatgcgaggactactttttttacttcttttttcatatgataaccttataatagagtaatagttaacncgattatatcaaaaaatatgtgagattatgcttataaataaacagataggattaaaatataagagtagatgaagattgaactaaagggtaagctgttttaccctttagaatcaaatagtatacctgttacttcttgcatttttggaagaaaatcttgtgcttgttcagctggaaatcgtctaatcattttacttgtttgttcttcaattacagaaacaaaaaagatatcctgagaatcaactccaaatttcaagtttgtactcataggtgctaaagcatcgttgagcttttttactaaattttcaacatcttttggagaattaattttattctccacacttactgcctcttgttgcatttcttttacaacattttcttgtttaggctgtgcctgaacatttgcttcgactactttatcctgagttttagggcttgttacttgtgattgttgttttgctacatttgctatgccatccatgacgtgctccttaacctttttaagtatagtgattgcaggaaatatcgacagatttttttgaaactttaattaaatttatattttttttgtatttatcctattttttatgataatcttgcattaatgaaagagtatataagcttattaaaatcacatccagtcctactaagattatcaactattcaacttatttcatactttggcgcatggttttctaatgtcgcgatttatacattgcttttagagatgaacgtaagtgcacaaattgttgcctttgttgcaatgctacattttttagcgggtgtgattcaagctcctatttcaggtgtgattatagacagtatatctccaaaaaaacttatgctttcactcatctctatcgaagttattgcaacattttgtcttatatttataacagaactctcagacttgtggttactttatatacttatctttttaaaaatggcagctgcttcattttattttacaacggaaatgtcccttttacctaaaatacttgatggagataaactacaaaaagcaaacgagattcactcaattatctggtcgctttcatatactttaggtatggcaataagtggttttgtcgtgtatgccttaggtgtaaaatttgcatttattcttgatgcttccatattcgttttagcattttatttactctttatattagagatacaggtaattatgcatcctgtaaaggaaaaatttctcagtatgatgttagatacattttcttatctaggccaaactcctaaagctctttatctcatcatagttcatgcctttgttggtttaactgcgtttgatgctttggttgcattaatggtggatcaatattatgcaagtgtaattgctacttcattagctcttggccttattcattctgctcgtgctcttggtttagttattggaccgattatttttggaaagtggattactaacaagagaatcatttacctttttataggtcagggtttggcagtttggttgtgggcatatatgatgcatgacttttacctatctttaattgcaagtgttttggttggattatttacaacaacactctggtcctatacatatacactcttacaaaaaaatattgatgaaaagtactatggtagaatcgtagcttataacgacatgatgttcttgggttcggctgcgtttacttcctacatgataggttttttagcgacacatgatttttctttagagtatatagctattataatgggttttgcgtttatggtcggtggtatctattatgcttgggtgttagataaagaaaagttagaggaaatttcatgataagttttgctgttataggtggattacttttaaatgtaggtgcatatttgacctttaaaggcaagatatatgaagctgttggagtgtatctttttgcagatatttgctggattgttatggcttatgagcgcgaagacttttggggagttgtctctatcatagttggtgtgacatttggacttcttgcattcttaaaaatgaagcgtggaaaaatgaataaaagtataaagaaggaagaaaatgatttataaatcaagcgaaggtgatttagaactagacaatatcacaagactgtatccggctgttgttgtagatatgcagggtgaagttgctgagatgagtttagaatgggaagagctgtatggagataaggtaaaaatagtgcactatgtacttgtttttgactttacccctttaaacgaagatgttaaagatcgtacaactcttacctttgagactaaagaggcattaatagctgagattcaagaggtagcaaaatacttagactaatctcacatgatacgagaaaagtatttgctcttgcacttccagctgctttaaaacacctcgtagatatacttcaaatccttatagatatgttaatggtaggtgttatatctaccgctgcactcgcggctgttggcctaagtatgcagtttatgatgataataaatgttttaatgactctttatgtagtgggaggaaatgctcttatctcgcgttttattggtcaaggtcgtaaacgcagggcatcagcacttctttactctcttgtgattttttcgatcatactctcattttttataagtatcgcaggttactttggaagtttttggatttatgaagcgatgggttctgcaccagatgttgtagagcagggtgctatgtactttcaaatcctctcacttggttttgttgtaatttttattgataaccttctttataacgcactctcagcagcaggggatactaaaagctcactgtacataaaactactctccgcgtttataaatgcaggactgaactatgtgctaatatttgggcatttcggctttgatgctatgggtattgaaggtgcagggatagcgacaataattgcttatagttttaatgtcgttgcctactatatactgataaaaaagatgaactctaaactagattttttaccactcatacgagtaaaagacttgataagagtctggcatgttggttggggtgcagcccttgaccgtgctatatcgagtatgagttttttaatttttgtgggtattataaccgcctatggaacagcagaactcgccggttatcaagttggtcttcgagttgaaggtatcgcgtttatgcccggttttggattctcaattgcagcaatggcactcataggacaaaatatcggtgcaaacaactatgataaagcctatacctttggaattataagtgggagaattgcttatgtatttatggggagtgttgggcttatcatgatacttattcctgagtatttagttggattttttacaaaagacagtttgacaatagctgtagcctcaaagtacctcatactagtaggacttgcacaaatcccactagcaatagtttttgtatactcctcagcaattcgtggggcaggtgctacaaaaacaacactcaaggtaaatgttcttagtctgtggctattaagagttatcccctcatatatcgcctataaaatgggctatggtgtcatcgcaatatttattattatgaacattgaaacactcataaaaggtgtagtgtattggtatatctacaaacaaagaacatggcttcatacaaaggtttagtcctttgtatgattctcgactgttgatggtacagtgttcccactagcttgcatacttaaggcttctggatatgctttgtagtgttctcttactgcattggctagttttattttaacatctgcgtttacaagaccatcttcatttaaacattttcccaaactttttattagatattcttgtggtgttggaacttttttgctccatgaaagaaggagctttttatttatatgtgaaggtaaagaacccatgataccaacatcattttgattatgaatgagtagcccagatgttgttccacggtcaagtgtaagtacttgaaatagatagagagtatggtagtttagctgttcttgtttatctgcttggcttatctctgttcttgatgtaaacgcagcagttattatttctatgtacttgtctattattccctcaccaaaactttttgcaagttcaaggtcttgttctttgtctgccgttttatagttttcaagatagaagtgtgatactccgcgttttcttcctaaagcaggaatgtcgaagtacttttcaccttgaagtttaccttctttatatgttccacctgctaaatctctaagtgcattatcgaagctagttttatcatcttcatttaatatgcttggatttaagtcagccataatgcgccagtaagcaggggcatttcttaactctgtaagtgaaatatgtatatgaatggaaggaacatttggatttttaggatgaatgatagttgaaatagcagttgctgatttgaggtttttttggggtatatcattataatgcacttgggagacatttacgcttgccgtattaaagaggctaaaatctcttgcttcaaaacgactacctccaccatgaagtccttcatcacgaagccaaagtacttcttcgaagtttttaccctcacctaaagtagcacttattagaccgagtttatcagcaaatcttttttgtaggtttcttactatagtataagcactctttgcatcttgtgactcagccattatcattttcatatatttatccaaaattgtttttttttattctagcaagatttgattaatagcgtcatctatcagggtataatgtttatgaaggataaattttatgtttttacaaataaaaaaatattttaataaaatgaaaggttttgagaagagtcctagaccaaaaaagttatcagaaatactttggtcaggtttaggagcttttttatctatactagcaatatttctttttacaaaatatttagccacaagtcctatggataacttttttcttattggttcttttggagcttctgctgttttgatttatggtgcgccacaacttgattactctcaacctagaaactttataggagggcatattatctcaacgttagtaggtgtgcttatttataagtttctttcatttgacttgatgatactgagtgcgttagccgtatccctctctatagtcgccatgcatctaacagcaacaatgcacccacccggaggggcaacagcacttatctctatcataggaagttcacaaatacacgacttgggtttttatcttataatctcacctattcttttaggatcatgtcttatgctctgcattgccttacttgttaataatttatcaaataatcctaaaaggttttaccctaagtactggatataagttcttaaactctataaagtgatttttagataaaattactttatgaataatactgagtacaaagaagctatacaaacactaaacttatggtcaaaacactactatgttttagatgaccctctcactacagatgaagtctatgacaaactctatcatgaaattatggagtatgaagaattaaatcctgatgccttagatagcaattctccaacacaaagagtaggggatgttataagcgagggttttactaaagaacctcacctctctcgtatgtggagtcttgaagatatatttgataaagaagggcttgaaaaatggctcacaaaaacttataaactcgactccaacattagcttttactgtgaaccaaaatacgacggggcttcacttaacctcatttatgaaaatggtgtgctcgtaaaaggcataacacgtggagatggaaccataggcgagcttatcactcaaaatgtgaagactattaagtctattcctttaactatagagcataaagagactatagaaattcgtggtgaaatagtaattttcaaagatgaatttgaaagaatcaataagcggcgcgaagcaaaaggtgaagcagtttttgcaaaccctcgaaacgcagcagcaggaagccttcgtcaacttgactctagtataacggcttcaagaaacctagtctttttaccttatggtgttggtgtagatactttagagtataaatacctcagtgacaagatggattacatatactcacttggctttagaaaaccaccacaaagagctgtaactcaaggttatgatgagatagaagagatatatcaagtgatgaaccgtgaccgtgattcttatgacatgatgcttgatggaatggtcgtaaaagtgaacgaaatagctgtacaaatagatatgggttacacagtcaaagtaccgcgtttctcagtcgcttacaagtttccagcagttgagaaaataactactgtaaaagagatagtacttcaagtagggcgaacaggtgctgtaacaccagtagccatagtcgaaccaacggagattgatggagttgtagttgagcgtgcaaccctacataacttcgatgagatagaacgtaaagacataagacttggcgacaaggtcattatcctgagaagtggggatgttatccctaaaatcattaaagttttaacacatgagcgaacgggtgctgaggttcaagtcataaaacctacaaactgtcctgtttgcgatagtgaattacttcaagaagaagtacttctaaagtgtcaaaacttagaatgtgacgctagagtggtaaactccatcatgtactttgcttcaaaaccttgtcttaacatagatggtttaggtgtgaaaatagtcgaagctctttttaaatcgggacttgtaaaaagtgtagtggatttgtttgatttaacactagaaaaactcttagaactagagggttttaaagagaaaaagtcacaaaacttacttaactctttacaaaatgcaaaagcacaagactactggcgtttcataaactcacttggcatagaacacataggcgaagtcgcttcaaaaacattagctgagaactttggatttgacttcgtaaacgccactaaagagcaaatcatagagtgcgagggaataggcgaagagatggctgagtctgttttagaatttgtgagagtaaacgcagagaccataacaaaactacaaactatcttagaaccactagaacctgtcaaacgcgaagaagcagtagcaaacccttttaaaggtaagacagttgtactcacaggaacaatgagtgagagccgtggagcgataaaagagatgctagagagtctcggtgcaaaagtatctggaagcatcagtaaaaaaactgactttttgatttatggcgaagatgctggtagtaagtatgataaggctgaaaagttgggggtgaagactttgactgaaaacgagatgagggagttagtgtaaataaacggtttttttgaggatgaacagtgttcagttaagtctaagacagccttgcagaggaaccgtaacctctttattatagcccaaacgtttctcactcggataaactattactgttatgatataattgtttctattaaaaggggattaaatgtcaaaaatagttttaggattagacttaggaataacatctattggttgggctttagtcaatgtagatgacaaaaatatagaaaataataaaattattgatagtggtgttcgtatatttaccattgctgaacaccctaaagatggtaaatccttagctcttcctcgtcgtgaagcacggagtgctagacgaactacaaaacgcaaggctcaaaaacttcgagcgataaaacgacttcttcttagaaataaaattctcactcaaaatgaccttaatactctttttatagcaaacaaagggcaaaaagatgtctgggatttaagaagggaagctctttatagagagttagataataaagaactttctcgtgtaatgattcatcttgctaaacataggggctactattctaatcgtaaaagtgatgaagtaactgataatgaagggaaagctgtcctctcaggtattgggcacaataaaactattttagagagttcaaaatttttaacagctggcgagtatatttctacaaaaaagaaaaaacgtaatggtaaagatagtgagggaaaacttaactatgaaaattctgttgctagaagtatgttggttgatgaaatagagataatcttcggcaaacaaaaagaatttggaaatagttttgtaagtgatgaacttcttgagacttataaagagttggcgtttgagcagagacctttaaagtctgtagctcacatggttgctaattgtccttttgaagtagatgaaaaacatgcttcaaaaagttcatatagttttgagtattttcgagccttgcaaaaactaaaaaatctacgagttatagatgagaccggttatgagatgccacttatttttgaacagatagctcaagtaattcacaaagcaaaaactactacaaaatttacctacaagtcatttaaaaaactttttcctcagtataaagagatgaaggtaaagggtttgacatatcatgatcataaaactggagagataaaagaccccgaaggagtaaagtttttagactttagtgcatttcaaaaaatacagaaggctattcaaaatgcagataatttgtactggaacacaatagaaaatgattatgaggttttagatgccatagctaaggttttaacaactgagaaagatgataatgaaagtctgaaacaacttaaagaaatagtagaatcccaaaaagtatgtgaagctcttttaggtctctcattttcagggtttgggcatttgagtaataaggcactgcgaaatattatcccgtttcttgaagagggagaagattatgacaaggcttgtcaaaaagctggttatgattttaaggctatatttgaaggtgagaaaactctactccttccacccttaagcaagcaagaaaatatagagatgacaaatccagttgtcaaacgtgcagtagcacagatgagacttgtttataatgccatcgctagaaagtatggggcgattgatactatttatgtagagtttacaagagacatcaaaaagtctcataaagacagaaacgacattaaaaaagcacaaggggaatttagagataaaaaagaggaagcaagggttcatgctactgaaatacttgggcatgaaccaagtgctaaagaacttttaaaatttagactctggaaagagcaaaatggtgaatgcatatatagtggcaaagagataagtcctgatgttctcaatgatccatatgcaactgaagtagaccatatactcccatatagccgttcacttgatgactcactaaacaataaggttttatgttttacaaaagagaaccaagagaaaggctcgcaaacaccatatgaatatatgagccaagagaagtttaatgagtttgaacagagagtgaagggctataaaaacattagacaagcaaaacaaggacgacttttaaaaactaactttgatgaaagtagtgaactggcatttaaagatagaaacaaaaatgacacctcttatatatcaaagtttataaaaaactatatggaagcacatatagcgtttaaagagtcaaaaggtaaacgccatatatttactatgaatgggatgttgacgtcacaactgcgttacaagtggggagtaggagataaaaacagagaaaatcatctccatcatgcagaagatgcaatcattttagctttttcaacacagtctatggttcaaaaactctctagtgtttcagcgaagagagaaggctatatatatgaatcaaaagagaaaaagtctaaggctttgagatttgtaacgccattggaagattttggagtgagagtaaaagagagtttaggggagatttttgtttcacatatgccaagtcgaaaagtaggtggaaatgcacataaagcgactatatattctaaaaataagaaaagcaaaggtgtggttgaaataaataatggtttagctgaaaatggtgaagtaaaaagaattgacatatttgaaaagaatggaaaatatcactttgtctatctatatagtattgattttgtaaaagatgaaattaaaaatatatctattaaatctaaaataattgatgatacatatagctttaagttttcagnttttaaaaatgatttgattgaacttgaatttaaagataagaaagtttttggttatttaaagtttgcagaaggagatggtcgttttaatataataccccaatctcaaggtgaattggataaaaaaactgatcgtcattctacaggttctatgaaattaatacgtaaatatcaagtaaaccctttaggaaattttgttgaggttaagagtgaaaaaagacaaatgacaataaagtataattggaatgagaaaattaanaagagagcaataaaaagggctgaaagaaaaaaatataaaagttaaaaaaggagagtattatgagtgcatggagaactattttagtaactaaaccttgtagactaagtatgaaaaacagacagttagtctatgagccaaaggaagagccaactatacaagttccacttgaagatataacggtcatagttttagaaactaatcagtctaatttaacaacgggactcctgagtcatatagccgagaacaacataactctttttacttgtgacaactaccacatgcctaatggtctctttactccctttcatcaacactcaagactttctcaaatcgcccatatccaagtagatatgaaaatccctctcaaaaaacagatatggcaaaagattatcactcaaaagattacaaatcaagcaagactattaaggtacttcgacaaagaagattttcaagtctcagttttaacggacaaggtaaagtctggagatagtgaaaacttagaagcattagcagctagaagatactgggggcttctttttgatgattttgttagagaccaaaaagcactagaccctagaaacatagctctcaactatggctattcgatagttagaggagcagttgcacgttctttagttgcacatggactacttccaacttttggagtttttcatcgctccgaactaaatgcttacaatcttgcagatgatatgatagaaccactccgccctatggtagatatggtggtaaaaaagttagagataaaagatgaacttgatgttcacttaggtgtgagtgttaaatcggcactcttaaatgttctagtgatggagatgaaattaaataatgaaaatattctcatacttaatatctgtgacaaaatggcacaaggttttgtaaaggctatgaagttaaatgatgtgagtagacttactcttccaatggtagagtagagtgtctaagttcatgtggatatttgtattttttgatctaccaacaaaaacgaaaaaagagcgaaaaaaatacactgactttagaaggtttttactcaaagatggttttataatgatgcagttttctatttatagccgaatttgtaagggtgatgatagtgtagaaactcacaaaaaaagagtaaaagaacatcttccatcgaaaggacatattcggatgctctccataactgaccttcaatactccaaaatggaaaccttagttggtgtgaaaaaagaagaagaaaagttagagaaaaaacaacttttactattttaagtggattgtgtacaaatgaaacaaaatattctataaatcaataagaatacttaaataagaagagaaatgatttaaaaaaatggttcaattttgaagatattcttcaaattaagggatttttttatatgatttttttctcttaaaccttctgtgaagaggggtctgcaagtcctgagtatagcatatccgagtgagaaagggggctataacagttctaagttcatcgttcttggtgatttcagtatagcatatccgagtgagaaagggggctataactggtgagaagtggcttagagaacataaacgagtatagcatatccgagtgagaaagggggctataacaaatattcatggattaaagaagagacagcaagtatagcatatccgagtgagaaagggggctataacagtataagttcttactatcccgcacccattagtatagcatatccgagtgagaaagggggctataacgtcgaacgatggtagagagacgatagcactagtatagcatatccgagtgagaaagggggctataactgaatgggtaatagggcaagagaaatgaaaagtatagcatatccgagtgagaaagggggctataacgtctaactcttttagtctgttaatagctctagtatagcatatccgagtgagaaagggggctataacatcaaactttacattatgataatgtagtctagtatagcatatccgagtgagaaagggggctataacgttaattataccggtattgcttatgctgttagtatagcatatccgagtgagaaagggggctataactatacggctcaacctgaagtaactgagtatagtatagcatatccgagtgagaaagggggctataacgaagtttttgctatttcctttaactcttgtagtatagcatatccgagtgagaaagggggctataactcaagctaagtggtggtgagaattatcgaaagtatagcatatccgagtgagaaagggggctataacagtccggacagtttgaacattgggacgctaagtatagcatatccgagtgagaaagggggctataacagatcttcctcaagacagtcagaacttaacagtatagcatatccgagtgagaaagggggctataacacgcttggcagtcagtctgtagtttgtatcagtatagcatatccgagtgagaaagggggctataacttatatagttaaagtagttagtgcaactaaagtatagcatatccgagtgagaaagggggctataacgcttctactcaggctatggctgtgcctttaagtatagcatatccgagtgagaaagggggctataacaaacttttgtatagtgtcaaaagtgttttcagtatagcatatccgagtgagaaagggggctataacacatttccagttacaaaacaggataaatcaagtatagcatatccgagtgagaaagggggctataacaacttctctatagtttgagaaaaatctaatagtatagcatatccgagtgagaaagggggctat

SEQ ID NO: 3610 - DNA, 7085 bp, synthetic construct
  misc_feature 1..7085: note = Synthetic
  source 1..7085: mol_type = other DNA
aaatatgagccgctaaagagaactgtacagtacaaaaaaatggagcaggtcttcaaacttgccttctcaaacgcgcaaagacatatcatccaaaacaaccctgccggagctagagcgctacttgccgaatacaactcaatagtctcaaaaaagcctctcataaaacttctccttacccaaaacagtgagtttgtggagctcctaaaggctattcaaaagagggactttaaaaccatcaatcagctgatagataaaaatgagctatttaggcagattccaaactatatagcgctaaacaaccagatagaagagactcttcaagagatagaggcaaacataaaaagcggagatatccaaaaggcaaaaaaacttcttcttagcgtcggcgagattccggatgtttcactaagagtagggcaactccacacaaagtgcaaatatgtcctctcactccagagggcttacgaggagagtgattttaaagggtgctatgaaattttggatcttcataaatacctaagagaagtggagcttggcaagcttttggaaaatcactggtcaaaacttatgcagaaatgcgaagagtatgcgcttggcggaaatataaaagatatcaaaaaaacacttggtgatcttatcggcctatatagcagacgcaataaaatcggggatttgctaagagtaagctttcatgtgagaatcaaaacccttataggcaaaaaggattttaagggcgctgaggcgataatctatacctatatcgatatttttggtattgatagcgagatatcacagattatgaagaagtttgagaagagttcaaaacaaaagcttgctctctcggaagctcaatttcagagaccaagaagagacagatggagagattttgatatccttatgaaaagcccataagctttagaagcgtatttacagtcccctcaaattcgctttttgtcgtcgagttttgaattaaaaaattctccatctcttttttcttgactatcgcctcatcaagctccgcatcactccctttttggtacgctccgatacgtataagcacctcattctcttttaagagggtataaagcctcctgaacttcatcaccgcctttaggtgttccggggagatgatgtcgttcataacccttgaggcagagtttagtatgtgaacaggcgggtatatgccaaagtctgtaagctcacgcgatagcacgatgtgaccgtccaaaatagagcgcgactggtcggcaatcgggtcgctcatatcgtcaccttcaataagaacagtaaaaaaagcagttatcgagcccttaccctcctcttttcctgcacgctccataagctgaggaagaagcgtcaaagaagacggaggataaccttttgatgtcggcggttcgccaagagcaagccctatctccctttgagccatcgcaaatcttgtaaccgagtccattataaaaagaacatccaaaccctcatctttaaaatgctctgccacgctcatagccgcaaatgcgccatattttctcatcaaaggagagtcatcagaagttgcaacgattataaccgtattttcgagatctccgcctaaatttttctctataaactcaggaacctctctgcccctctcgccgataagtgcaactacttttattggggcattcgcaccccttacaatcatccccatcagagtcgattttcccacaccgcttccggcaaaaatccccagcttctgaccttttccgcacgtcaaaagcccgtcaatgctctttacgcccacactaaaaacctcatttatcattcctcgcttcattgcggcaataggggcttttataattggagagagccttgagttgttaatgctcccttttccatcaatgggtctcataaaagggtcaacaacgcgtcccaaaagagatgagccaaccggaatattcagacccgtctgatccaaaaacaccctatctcccgaacaaaacccctctacaaagctaaagggcgtgatgaaaaaagtacttccgtcaatctctgtaaccataccgatagtctcttggtttgtgtcatttgagatgattttaactatatcgctgatacttacttttagcccgcgtgcggttataacggttgcatttatttttactacttcgccaaatgcaaccgaatatcttttatttgagattttatcttttagcgaagaaaaaggcattaaaaatctcccttgtttagaaaatctctaataacgcgtaccggtaggtgagtttatcaaagagaagaactcgcttctggttttctcatcttttttaaacagtccgcgaagagcagatgatgtagttgttgagttaatcttctcaacacctctcatctccatacacatgtggcgcgcctgaatcacgacagcaacgccttttggctcaatcgtgctcattatggcatctgctatctgttcggtaagctgctcttgtatctgcatacggcgtgcaaaaacatttaccacgcgcgggatttttgagagtcccacaactttgccgtttggtatatatgctacatgcacacgcccgataattggcaaaagatgatgctcacacgtagagtaaaactctatatcttttaaaagcaccatctcatcatttgagctgctaaagagtgcagattttagtatctcttgcgggtcttctttgtacccgccaaagataaactcataagcttttttaactctttgcggagtttttaaaagcccctctctgtttggattttccccgacatgaagcatcatactcttcactgcgttttcaaattctgcgtcttgcatttgtgacaatttatgacctttgaaagttttaatactgatagggtatcaagaaatagctgagagaatgatgtgatgtgtttttatttatatttacatttgtcgtggtttgaatgaagaggtgtggtttttttaaggatgaacaatgctcagagccttgcacaggaaccaataacctgtttattatagcccactcgtttctcactcggataaactatagctgttatggtataatatttttcattaaaaggaattgaaatgggaaaaattatattagggttggatttaggtataacctcaattggctgggcattggcaaatgtggacgatgaaaactcacaaaatagcaaaattattgacagcggtgttagaatatttactattgcagaacacccaaaagatggtaagtctttagctcttccaaggcgtgaagctagaggtgcaaggcggactaccaaaagaaaagctcaaaagattagagctattaaaagattgctcataagtgaaaaaattgtaacaaaagatgagcttgaaaatctttttatcggcaataaaaatcaaaaagatgtatggcaactaagacgagatgcgctttacaggctgcttgataacaaagaactaactcgcattatgattcatcttgcaaagcatcgcggttatgcttcaaaccgtaaaagtgaagagtctatggacaatgaaggcaaggcagtactatctggtattactgcaaatcaaaaaattatccaagaaaaagcctatattacgataggtgaatatatctctacaaaaaccaaaaagcgaaacggcaaagattcagagggcaagcttaactatgataactccatctcaagagatatgcttataaacgaaataacaactatttttgaaaaacaaaaagagtttaaccatccattcataaatgaaaaacttttaaacaactacaaagagatagcctttacacaacgacctcttaaatcagtagaagatatggtggcaaactgcccatttgaaacagaccaaaaaagagctccgaaagccagtttaacatttgagacatttagagccttacaaaaactaaaaaacttaagaattattacgcaagatggagaaatggcactctctaaagagcagatgaagcaagcgatacaaaaagcaaaaaatacaaaaacattcacatacaaaacattaaaaactcttttttctcttgacaaagaagctgaatttaaaggtttaacatattttgaccataaaacaggggaagcaacaaaagacccagagggagcaaaacttttagattttagtgcatatcaaaagatacaaaaagctattgagggtgccgaccatctattttggagcaagatagaaaatgatgatgcccttttggatgccatagcaaaaattcttacaaccgaaaaagatgataaaaaatctttagagaaacttcacaagattattgagaacgaaacggtatgtaacacacttataagtgtctctttttcaggatttgggcatctaagcacaaaagccttggcaaaaataatccctcatttagaagacgggcttgattatgacaaggcatgtgaggaagcaggatatgactttaaagcgatatttaaaggcgataaaagcctgtttttacctcctctaagtgaacaagaaaatttagagatgacaaatccggtagttaagcgggcgatagcgcaaatgaggcttgtttacaatgcaatcgctaggaaatacggagccattgatgccgtacatgttgagtttacaagagatataaaaaattcacatgaagacagaaacaagataaaaaaagagcaagaaaagtttagagacataaaagaagaggcaaaagcccatgctatagaagttttaggtaaagagccaaatgcgaaagagcttttgaagtttagactttggaaggagcaaaatggagagtgcatctacagtggagaaaaaatccgtcctgagcatttgatggacaactttgctacagaagttgaccatatattgccctatagccgctcacttgatgattcgcaaaataataaagttttatgttttacaaaagagaatcaaaacaaaggaaacaaaactccgtttgaatattttggagcagacaaagaatccgtaatttggcaaaattttgtgggcagagtcgaggggttaaaaaacttaaaatatgccaaaaaaagcagactcgcaaaaacaaacttcgatgagagtagcgaaatagcatttaaagacagaaacaaaaatgacacctcttacatctctaaatttgtaaaaaactatatagaagcacatgcggagtttaaagagtcaaaaatgaatcgtcatgttttcacgatgaacggaatgctcacctctcaacttcgttataaatggggtgttggagacaaaaacagagagacgcatctacaccatgcagaggatgcaataattttggcatttgcaacgcaatcacaagtacaaaaactctcaactgtttcggcaaaaagagaggaatttagttacaaaaacaaagaagaaaaagcaaaaaatctcaagtttgaaccgcctatggaagagtttggtgcaaaagtacaggagagtttgagtgagatatttgtttcccacatgccaagaagaaagataggcggggcggcgcataaagatacggtatatagcaacaaaactttgagcgtaaaaaaagcagacggaaaagttgaatccctaaaaggcaacagcgtaaacaacaatgtcaaactaaaacacggcatagccctaaatgacgcaatgccaagagtggatctatttcaacacaaaaagagcaaaaaatactaccttgtccccatctatgtaagcgactttgtaaaaccaaaacttccaaaccaagcgatagttcaaggcaataaaccatggatagagatggatgaaaattatgagtttagattctctttttataaacgggatttaatagagattcagacaaagaaaacagcgactaaagaagctctaagagttttgggatattacgatggtacggatagttcaacagcgaatatagctattttttcacatgatgataaagatacctatagaatgggtattcaaaactctacatatataaaaaaataccaagttgacgctttaggaaactatgttgaggctaaaaacgaaaagagacaaggaacaaaaaaagagaaaaaatagagtttaaaggagttgttatggctgcatggagaaccgttttagttactaaaccctgcaagttgagcgtaaaaaaccttcagcttatctatgaaccgcatgaagaggagggcgtaaaagttccgcttgaagacataaccgttatagtgcttgaaacacatcaagccactataaccacagctcttttaagccaaatagccgagaaaaatatagcactttttacttgcgatggctaccacataccaaacggctgttttactccgtttcatcaacactctcgcctctcccaagtagcgcatatacaaagagagatgaaactgcctctaaaaaaacagatatggcaaaaaatcatctctcaaaaaatctcaaaccaatcaaaacttttagaacatttcaagatagacaatctacaactagagcttttaaaagacaaagtaaaatcaggggacagcgaaaacttagaagcacttgccgctagaaaatattggcaaaagctctttagagactttttacgagaccaaaaagcacttgaccccagaaatatagctctaaactatgggtatgcgatagtgcgaggtgcagtggcaaggtctttggtttcgtatggtctacttcctacctttggagtgttccacaactctgagctaaacgcctacaacctagccgatgatatgatagaaccgctaagacccatggtggatatggttgtaaaaaaacttgaacttgaagatgagctggatgttcacatgggagtaggcgtaaaatcagcactaataaatgttttaaatatgcagatgaggttaaatgaagaagatgtaactttgcttcatgtatgcgatgtaatggctcatacatttgtaaagtcactcaaactaaactgtgtagagcatcttaaactgccgaccatactatgaaagagcaaaaatttatgtggctatttgtattttttgacctgccgacaaaaacaaaaaaagagcgaaaaaaatatacccagtttagaaaccatcttttaaaggacggctttatcatgatgcagttttcagtctatacaagaatctgcaaaggcgatgatagcgtggacacc

SEQ ID NO: 3611 - DNA, 23066 bp, synthetic construct
  source 1..23066: mol_type = other DNA
  misc_feature 1..23066: note = Synthetic
cttaccctcaacaaagacggttaactttcaagaaggtgttacaggaacacaatcagggcaagatattaactggaaaaatcagaccttgcagattccggatatttacccggacggattaaggaatttcacaattactgccagagataaattaaccggtgctgaaacccccaagacgttttccgtcaatgtatttaccccaattaacctagagcctgctctaggaggcaaaacactcaatacaaacgttcagacgaaaatttatgctacaactaccaaataccccactgttacacgggtaaacatgcagtacggtactccatatcagtcctatactttgagtatgacaccaacaccggatagtaacttaaaaagctgggtagtaaattacatggttcccgacaatgtgcctgacggaacctataccgcacagtttacttccattaatccaagcggtaaggcggaaacaaaatatatttcatacaaagttagcagaaaccgacccccggaggtaaatatacagagaatatcaccgcagttcgtttacgaaggagacagtgtttcaatgacatttgaagtaacagacccggaccctgaacaggtgctaacatcaaaagtaacagtgaaaaggggttcagaagttgtctattcaggtgagaatatatcgtatgtaagtaacggaaaaaagaaaacattcacaatgaaaacacctaggctaactgaaacgggtacatataccataagtgttatcacaatagaccagtactttgcacaggatacggatataacaaccttcacagtacatgggctcacaataaagggatacgtgaatcacacacctacatggaaaaccaattgggacaaatataacaaacatcttgccaataagggaaaacccacatatggaaatgatgcattttttaatgatgaaaagtatgtgttaagtgccgttacaacagagataaattcaggaagtgctgttacagcatcaaatgttagggtaagaatattagaaagaagctacggccctgtttcactggccagccaaactgccaatactttcaagggtgaaatgtggaacgaagatatgaagaaaaacagatggaaaggtacatatgtcactttcgtattcactgtaacttatagtaatggcacaatcaaaacagacactgtaaaaacctacgttgtgaatgacgattattggagaattaggatggcattttaattaatttataaaaaggaggactgttagcatgaaatctacaggaatagtaagaagggttgatgagcttggaagggtagtaatacctaaagagacaagacaagtgctttctattagcgaaagggattctttagaaatctttactgatgaggatatgatattattaaaaaagtactctcccggatgcatattttgcaacaatgtcaaaaatctcacggtatacaaaaataagcatatctgtgaagagtgcagccatgatttaaaatcaaaataattaggatacatagtattttaaaacagcttggaaacaggctgttttttcatgaaattaaagaaggtactgaaaaataaaatattaagaaataaggtggcagagtttataattctgtcaccttattttattccaaaacgtgaggtggtttaacaaatggatttaataacaattattttccctatattagctgtaataggcggtgttatagcactgtatgtaataaacaagggtaatgtgaaaacaaagaataattcaccggtaagaattaacaaaggtacaaaagcttccaggaataaaacaacagaagaaattacggcacaagagtttgtcaatgtcagggacattacagataagtatttgtatacaagagatggatttgtattttcatatatcaggatctaccccatatccccggatttgctttcaagaagagaaaaaaggacattgaccaggcaactcactgcggaactttctgctgaaacagaaaggttcggattccttgcattaagcagacccgttgatatctcacctctggtgaaggaatacagtgagttactttcagataccaatgatccggtacagaaagaaatattgaaaagtgaaatgcaggctatgagcaactatgcattgtcaggtgaagttgttgaaaggcagttttatataaaaatatgggacaagtattcagaaggagtggaaaacgaacttcaaaagagatgtttcacgctattaggatatttcacatcttcaaacattaacggagaaatattgattgaggaagatataatccggctatcaaaccttattaccaatccagcatatgttcacatagaaaatacagacgtcagagcttccatgccgattattgaaagtctggtagctgcagcgaaggaggaataaatatgtcaagaaaaaatactgaagaaatacctataaatggagcattattaaatagcattacgcctattggtatggaatttaagcagaacacaataaatgtaggtgaaagcatggggagggtatacggtatagtcaagtatcctcagtctgctgactacggttggctgtcaaaactcaccaatataccctcaactgtagccagtatcacatttacacccgttgatgattctgtttttctggaaagcctgtcaaatacaataaaacaaaagagaggtgaatgtgagagtgcaaaggatgcattaacagcctcaagggcaaagcgtgcagcagatgatgctgaaaaaatgatgatacaggtagaccaacatggtgagaagataggtgctatgagtttgcttgtggcaccgctgacacgggatgagaagcttctcaaaaaagtatgtcagaaagtagagagtgcaatagccgttgccaagtgcaaaggaagggttttatccagtctccagaaggagagctttaaacaattatcacctttttatgcatcaaacgaacagatagagcggattactcaaagaatactgcctttatccagtttcataggtggctttccatttgcatcttctggactgaatgacggacaggggtattatttggcaaaggatgcttcagggggattggttgttgtagacccgtggatgcgtggaggtgatagaacaaattcctgtatgacaataatgggtgtcggcggagtcggcaaaagtactgctataaaacatattatcatggcggagtatatgcgtggaactaagataatcattattgatccggagtcagaatataaggaacttacacgaaatctgcagggcgactggctcaactgcggcggaggaatcaaaggaagactgaatcctttgcagataaggcaggttcccaaagacgatgaggatgaagacggcgaaaggttatacgaagatgaaggtaacggtatgggagctttggctctacatatgaaaagccttgaaatattctttaaactatacaagccttcatttaacgacaaacatatggcactgataaaaatttgccttattgaaatgtacgaaaaattcggcataacctgggatacagacgtaacgaatttaaaaaatgaggactatcctatattcactgatctcaatgaaattattgaagagaaaaaaagcaaagaaacagaacccaatataaaagccttgtatgtagacatatccttacttttacatgaccttatttttggatctgaccaatttctatggaacggacatacaagcatagacacgaaaactagatgtgtgtgtcttgatacacatgatcttcaggatacctctgataatataaaaagtacccagtactttacaatccttcaatgggcttgggaacaaatgaccagagacagagaagaaagagtgcttctgatttcagatgaggcctatctgatgattgaccacagagtaccgcagtcactgatattccttagaaatgctgtaaaaagagccagaaaatatgaagcagccattgcaataatctcgcattcagtagtagatttccttgatcctagtgttaaaatgtacggacaggcgttacttgatataccctgcataaaaatcctgatgggtactgacggtaaaaaccttcaggaaaccaaggaactgtacaaacttacggaagccgaagaagaacttttagcagcaaaacgaagaaaaatagcactattaatcattggttcaaaacgccttcagatagaatttgacttgccggaatataaaatgaaatatttcggaaaagccggaggaaagtagaggtgaattatattggccataaatcctgcacttataaaagcagcagtacagatagtatcgacagaaaaaggacgaaagggacttttgattgccatatttgtaccaataggtatattaatgctgataatatgcgttattttctacatacttacggcaccgtttcaatttcttaccgacacatatagtttatctgctgatgaacaaactgcaatacaaaatgcccaaacagattacggtttttatttgataccggaaaataaagtactggacaggggaggcctatttacgtatccaacggaaggaacaaccggaaccagaggattcagcccaacccctgtacaccaccctgttctcggaatatcaaggccacactggggacaggattttaatacacaatggcattcaaatgtctatgctattgcggatggtcaggtatacaacatgggtataagtgatgaagccggaatgtttttagtcctgtaccacgatgtgaacggaaaacaattctttacccggtatctccatttgtcagctatacatgtacatcagaacagccggataagacagggagatgcagtggcttcggaaggcggtgaaccgggaaaggatatgtatccgggaacatcaacgggacaccatttgcactttgaagtaagggtaggcagtacttacagcagtgccgtaccagtagatcccaaattgtacatagaccctgtaccgattgagatatcttgttcatctggtaaaggcagtataaaagtcaatatcgcaggaggtaaggataggggatacgaagtaagcattgatggcggtataacttggattggtacatttgaaaagacatatactttcagtagtcttaattcaggcagctacagtatagtggccagagattggtcatatcaggataatatctcaaaggtgtccatcgtaagcttaaattaggagggagaaacttgaaaaatagcacaaacaaagtgcttgagttgctgttctacgcagcacttagcattatatttatagtcctgtattttataaataaaccctatgataaaaagccggtacacgtagatagtccggcaaaaacaacaatagaaagtcaggtgagtccatatgatgctttacctatgcagccataataatgttaatctctttgattggctcaatgaatccagtttggtagctcaacccttcatgctaaaaaaaatatcttcaacccagttggatttatcggcatttgccaaaaaagaagcaataggcattaactactataaataccttgcaatagatctaagtgcagttgtaaatgatacagaaacctttaagcttgcgatacaaagtatacatataatgaaccccaagataaagtttctttatattgacatagggaataagacaaatgtattgcaggaggttcttaaaacttttggagatataccggtaataacagaaaatccggaagaagatatgtcacgatttaaaacacaggtaacagccggattacaatatacacagcaaatcttagataccgaaaaagaaagccgaggtaacacagtaattgcttcaaatactacaacaggtaaaaacgaagcttccaagaaatgcgaagctaaaaaggaatatatattcaaaaatcaaaaagtcatggtggctgtaataaatgcctacccgagagcaggatcaacaacactcagtataaatatggctgcttatctcaattctatcggtgcaacggtatcctgcgtagaattaaacggtgaactggggcatttggataagataataaactcaacacccggctttacagccgttaccgaaaaccgctttgagcgtgagggtgtagtgtatttgaaaggtgaaatacctgaagaagtaaactttgtaataaatgatatgagcagggttatccaagatgaaagcagcgaaggagcattagaatttgcaaagaactgcaatgtagcaatactctgtgggacaagcaagccatatgagctacaggagataaagaaaaagatagagctacttcaaaagtacggttgttacaaaataaatctttgcctggcatttacaccggaacatgaaaaagctcacttagcggacttattcggagacaagcatattagcgtatattttaccgaatatacccctgatatgtttgcagaggatgtaaatagcgatgtattccaaagaatatttcaggaatacatcaaagagaaaacaaatgataatatggttaaacttttttaaattatcaaggctccatgagtaaaacttcatggggccttatcaattactacagaaaaaaatggaggcttatataaatatgtacatgaatgaggcttttgacagtatttgttttaaaggaagtatcgtatcccaaagtgcaaggttcgtatatctttgtctgtgcaaacatgcagataacactaatcaaacctgttttccatcgctaaacagaatcgctcagatagtgggcaaatcaatctcaacaataaaaagagccatgagagaactgtgtaaatacggagcagtagaacggactccacgattcaggaaggacggaggtcaaacctcaaatttatataagataatgccctgcaattttgaagaaatatcaaaatatgaagctgaaaacgaagtggatcaagcccaatttgaaatgtctggttcactccaggaggatatttctttttcagaatctgaatacaatgaaccagctcgtccatgtacgacatccgtgtataaaaacgagcaggataatagagagcaaaaaaacgatgaaaataattcatttgaagaaccaggggcaaatactattgataacttgggagaagtacatatttttaatgaaactacaagcagtgcgaaacctcaatttgaaaagattaaaataactgccaatcgcttcaagcttagtaaatatataaattgttcaaaaagcagagtgttatactggtttaagtctcttaatcaaaaaatccactaccaaaatttaaatatatttaagaaaatgaaccggggggaggtcatgggcgaccccccaggaacttatccatttaactagggttactgaaaaagaaagtatgtatatttatgcagtaatggttaggtgactatgttggagatcctttgtcgtagtttcggaaaacatgggtaagtcttgccggtaaataaaaggatacagcattagggtgattgacaatattcgctatggttaaattatatcagggatgaacttttatattttacgaattaattttggtagaatataactggggtacctccaacatttccgacaaataccacgttttgtccatcagattcaattcgatatttggtgcaatgtcctcaaacacttcaaattccacagtgtaagggtctgaccatttacccaatgtgttttgacatttaagagtgagggaatgggtaccagattctttgtactgtaatggttcattaagcggaactggtttaccattctcatctgtcaaaataaagctacttgttttaattggatatttagccaaaacgagagctatattaccactgtcactggtattctcaatatttataattctgttctgtttccaggagtctgatgaaagtttaaattgcgcaatcggctttgtttactagcaccaaaattttcattggttattgaattgaatatattgacaaatatatttaaatatgtaaatatatgtatatgtgaaaatcaataaaaaccaatgtaaaggagattaattatgttaagatttaagaaagttacttcacttgttttggttctatgtattttatttgcttttagtgttcaaagttttgcagcttctaatgaggatagctctgtaaccactattactcagaacaaagtagcagattctactcagattgatgaagaaaaagttaaagatgtattagaacagttagttaaggataaatcaataacaatggattattccgaacaagtaacggcaattgtagaaaaatatgctgacagttcttcctccaattctaacgctgggacaatacatactaactattataatcaatctactggtgctgttattgtttatagcagcatgccttctccccttcatgggcaacttatgtttaataaagcaggttggaatattataaaagaagtattgaatttaggtggaggttctgctactgtaggttttgcaattgcagcaattgccggtattactgtaactgcacctgtagctgctattatcggtggtgcacttgttatagaaaatgctttagtaaatttacaattttcacttggatctgaatttgcaaccataacattctaaaaattcatactaaaaaggtctaccataaggattacttatggtagacctttttagtttattaattttaataaattgaataatatttcataaccccatcgtataaagcaataataacaatattcctgatattcctataaaagtcgaagaatgatatttgtctgcactcttgttgtaacccaagtaatgtggggcgaaattcatacataggcctaataatatagtcattattcctgtgcttagtaaaaaataatctatactttgtgtaaaaatagaaacaaagagtataggaaacaaatatataattattgctaaaacctttaatttgttaacaatcttttgcattaaaaaactcccccttatttgttacttaataacatctattatatgtgatttattggaaacagtaaagtttgtggaaattgaagtgaaaaatgggttctatactcaatttatccttaaacgagggtgtcggaaatgttggcggtaccccagttaatggttagtatggtataatgggaggctagagggtattatgtatatggaattgtatgcatattgctgaagatacaaataaaatactagatgataatgactgctaactaatttttcaaaatgtagaaaatcgattattgcttctttgaaatttttcgattatttgtttgacaatgctaaacatagctgtacatggagttcattatgatcaagtaaaaaatatggcagtgccagtaaacactaagaatcttgatgggtacacttatcttggcttttaataactaaaatatatctaggagtgatattagatggttataaaattttaggctcaggatgtaaaatttgtgtcgctttgaaagaactcgctgaagtttatgttttcgatgatgccgttcagggactaaaaagtacatataaatccattgaaaatagtttttatataaactataaaatggaaagtaaatcaatatgtaacagaccctgcaacatggattgattggattcgaatatttaggtaaaattcagtatagtgggcaaaaagtattttccaatttattagtaacaattaaagaatcaactaatagtgttatgtattgattaatagcaagaagccaaatattgtgaaattagccctacctagcaagatttcaatttccaatcataacatagtttagcagctatagaattagcaaaaaaacataaaggttattcttgcaaaaaatgaacttcgaagctatttaagtactatttgagggtcgtagtttgtggatataatttcttatgaacgtaggtattgtaatgttacttttatgtgatataatataactattatagtaaattatggcatatcggagcctgaattgttgctataataaggtgctgggtttagcccagaccgccaagttaaccccggcatttattgctggggtatcttgtttttatgacatttttcggaggtaaattatatatgaaatatacattaggtcttgatgttggaattgcttctgtaggttgggcggtaattgataaggataataataaaattattgacttaggagttagatgttttgataaagcagaggaatctaaaacgggtgagtcacttgcaacagctagaaggatagctagaggtatgagaagaagaatttcgagaagatcccaaaggctacgtttagttaaaaaactgtttgttcaatatgaaattattaaagattcaagtgaatttaaccggatatttgacacttcgcgggatgggtggaaagatccttgggaattaaggtataatgctttatcaagaatacttaaaccttatgaacttgttcaggtacttacacatattactaagagaagaggctttaaaagtaacagaaaggaagacttgtctactacaaaagaaggtgtagttataactagtattaaaaacaattctgagatgcttcgtacgaaaaattaccgtactattggagaaatgatttttatggagactcctgaaaatagtaacaaaaggaataaggtagacgagtatattcacactattgccagagaagatcttctcaatgaaataaaatatatatttagtatacaaagaaagcttggaagcccctttgtaactgaaaaattagaacatgactttttgaatatatgggaatttcaacgtccttttgccagtggtgatagtatactttcaaaagtgggaaagtgtaccctgctaaaggaggagttgagagcaccgacttcctgttacacatcagaatattttggattacttcaatcgattaacaatctagttttggttgaagataacaatacattaacattaaataatgatcaaagagcaaaaataatagaatatgctcatttcaagaatgaaatcaagtattctgaaataagaaaattattagatattgaacctgaaattttattcaaagcacataatttgacacacaaaaatccctcaggaaacaatgagagcaaaaagttttatgaaatgaagtcttatcataaactgaaaagcacattacctacagacatctgggggaaattgcattctaacaaggaatctcttgataatcttttttactgccttacggtctataaaaacgataacgaaataaaggactatttacaagcgaataatcttgattatttaattgaatatatagcaaaattgccaactttcaacaaatttaaacatctatctttagttgccatgaaaaggattattccgtttatggaaaaagggtataaatatagtgatgcctgtaatatggcggaattagattttacaggttccagcaaacttgaaaagtgtaataagttaactgttgaaccaattattgagaatgtaactaatccagttgtaataagggctctgacgcaagcaaggaaagttataaatgcgattatacagaagtatggtctcccgtatatggtaaatatagaacttgcacgtgaagcgggaatgacacgtcaggatagagataatttaaaaaaagaacatgaaaacaaccgaaaagcaagggaaaaaatatcagacctaatacgccaaaatggtagagttgcaagtggtctggatatactgaaatggcgtctttgggaagaccagggcggaagatgtgcttattccggcaaaccaattcctgtttgtgatttattgaatgactcactgactcagatagatcacatttatccgtatagtagaagtatggacgattcatatatgaataaagttttagttttaaccgacgaaaatcaaaataaaagaagttatacgccatatgaagtatgggggtcaactgaaaaatgggaggattttgaggcaagaatatattctatgcatttacctcaaagtaaagaaaaaaggcttttgaacagaaactttattacaaaagatttggactcatttatttcaagaaatcttaacgatactaggtatatatcaaggtttttaaaaaactatatagaatcgtatctgcagtttagtaatgattcacctaagtcttgtgtggtctgcgttaatggtcagtgtaccgctcagcttagaagtagatgggggttaaataaaaatcgagaagagtcagacctgcatcatgcccttgatgcagcagtaattgcgtgtgcagatagaaaaataattaaagaaataacaaactattataatgaaagagaaaaccataattataaagttaaatatcctttgccttggcattcgtttaggcaagatttaatggaaacgttagcaggtgttttcatatcccgggcacccagaagaaaaattaccgggccagcccatgatgagacaatcagatctcccaagcattttaacaaaggtttaacttcggtaaaaataccgttaacaacagtgacgttggaaaaacttgagacaatggtaaaaaatacaaaagggggaatttcagataaggcagtatataacgttctaaaaaatagattaatagagcataataataagccattaaaagcttttgctgaaaaaatatataaaccactaaaaaatggtacaaacggtgcaataattaggagtattcgagttgagacaccatcatatacaggagtattcagaaatgaaggaaaggggatatctgataattccttaatggttagggttgatgtatttaagaaaaaagataagtattaccttgtgccaatatatgtagcacatatgataaaaaaagagttaccttcgaaagctatagttcctctgaaacctgaatctcaatgggagttaattgatagtactcatgaatttcttttttcactataccaaaatgattaccttgttataaaaactaaaaagggtataactgagggctattatagatcttgccacaggggtaccggtagcctgagcctaatgcctcattttgctaataataagaatgttaaaatagatattggagttaggacagcaataagtattgaaaaatataatgtggatatacttggtaataaaagcatagtaaaaggagaaccaagacgtgggatggagaaatataatagtttcaaatccaactaaactgaaattaaaacagaataacttatgggttgaacaatcagatggctttagtataccgattgatgatataaatacaatagtacttgatagtgcggatgttacgattacatccgcactattatcaaaattggcagaagaagacattgctttgtattcttgtgatgggaagcacacaccgaatggagtacttcttccattcagttgtcatagtagacaatacaaaattgtaaaaactcaaataaatctttcagcaccttttaaaaaaaggtgctggcaaagagttgttcaacagaaaatagaaaatcaggccttttgcttaaatattctagaattaaaaggaagagatgaattaataaatctatctaagagtgttctatctggtgattcaactaatgtagaggctcatgctgcaaaatattatttctctgttctattcacaaacttcaaaaggggtatgcaggataacacaaactatgcattaaactatggctattcaatattaaggggagctgtagccagaaccatagcatcgtatggatttatcccttctattggaatacatcatagaagcgaattgaataattttaatcttgctgatgactttatcgaaccgttcagaccaattgttgatatgtgggtaaaacaaaatataaatgaggatacacttttaacacctaaacataagttaaatcttataagtttgttgggttacgaatgtgtctttgagggaaaaataatatctataaggtctgcaatcgaaaaggtgatttcaagtttttcaagttcttgtgcaaagaacgattatagtttattgaaattacctgaaataataccattagaggtacatgcaaatgagtgatattttagggagaaataggtttatgagaattcttgtattttttgatttacctgttaagaaaaaaatggaccgagacaactacacaaagttcagaagaaatttaataaaagatggattttgcatgatccagtattcggtatactgcagggtttgctcctgcccggaaatggccgaaaaacatgtaaataaagttaagacttttttacctgcaaaaggatctgtgagagttttgacagtaacggacaggcagtattcatcaatgattatacttcttggtaaaaaaacttcgaatgaatggattgataaaaaaatgattgaagggcaaggaatgttaatatgaaacatttatttttttgcacaataaaagctttaaaatcctgtgaaatcaaagcttttattgaatggtattatagcatatcggagcctgaattggagctataactttctgccatttaacggcttataataattgattatagcatatcggagcctgaattggagctataactaaactaatcactgttagcaacgtgttaccattatagcatatcggagcctgaattggagctataacatatatgataatttataatatagataatagattatagcatatcggagcctgaattggagctataacatatatgataatttataatatagataatagattatagcatatcggagcctgaattggagctataaccttattggtgaatatgatgcttacaaatataattatagcatatcggagcctgaattggagctataaccttattggtgaatatgatgcttacaaatataattatagcatatcggagcctgaattggagctataaccttattggtgaatatgatgcttacaaatataattatagcatatcggagcctgaattggagctataacgcattcatatcatcgcttgcttattttttaattatagcatatcggagcttgaatcggagctataactaaacattaggactataaattttataacaagactttaataagactctaacgaataaaatattatcgacaaagagagaaaaaagggatataatggtgtaaaatgtaaacagtggtgattggttgtatgctaaaacccaaatcggatgtttaatttcccactttacattcatatttgctaccatatgactagcactgattattaatatgaaattcctaaatatagttttattcgctttatctgcaattttgacatttctatatgcacctgcagatcgggtgtcaaaacctatagttactgaaaaaagaaaacgggagttaaggataaagggtagtatattattagttatatgctttacagttacattaataggtcctaatatttactcaaatatcatttcggtgataaaaaataatataaactgttaacattacaccaatagtgtataaaataacaaaaaaagaggggtgggataattacatgaagggaaaaatcaaattactggtattgactgttctatctctagttggagtatttgcagctactgcatctgcaggtgcatgttggctctggtcttattatcaaaaagaatgccctaaatctttactcaagtaagtaaaaagaggctgttaagcctcttttgctattgttagtacctgagagaatatcatactactttcatcaaaaaaagttgaacttagaatgtttttatatgaacttataattttatttgcaatatttaacccgtctcctcgatcttttccctttgatgatttttttatattaggaaatttatcgcattgattatctactctaatcgtaaggttactgtctgtacttattatttgcatatcaaattttagttttccgttaattaaaacttcttccagtgcattgtcaagatatattcctattacctcgcacaactccgatatttttatatatggaatagaatcaacaataccaataattttcaaattaatttttactccattgcttttggcaaagtttattttagctgatattaatccaaaaagccccgcattcttgatattatagattgcagtatttccaacacttgagcttgtatctaacatttctttaagatatgaagtagtttcatcaaaccttttcattttctgcattgaatataaaactgatatgtggttcatttgatcatgttttatacgtcttaaatcatgaagtgtattagcaagagattcgttataaaattcttgctggtttcgttcctccctttgcatttcatatttatgatatatacttatataccagactgagaaaaagaaatatgcaatagatgaaagaagtacaagaataaatgaaacagggtcaaaatgaacaacgaaatgaacccccagaaaagacgccattatcaatatggtaataactagtaaaaaccctataggagtgaggttttttatattaccaattattttagcataaggggaaagcttaataagaagcaatgttactgcataaataactatattcatcagaacaaacaaagggatattattgtttataatatccggggtagcattaattccacaaatataaaaaactaatggcactgtgaaattactaataccaataaaaagtgtcatcaaacaaaaagccaaaacagctttagcccattcaatatgtagaaagtatcttaacattataatatttattataattaatattattgtttttagaaattgtaaattgccgggtataggaagtacgctcatccacaaagttgatacaatcccgcttagcataccattgaaaataacaaatacaactaaggattttagttgtatttgtatattaaaattattcttaataaatatgtaagttaaataggcagtaatcatagcaaatacggtgttaatcaataattgaccgattataagcactacaaatccctccaagtttggaatactggataatattttggccctattttatattgtgacccgtctgtaagcattatttctctatttttaatatcaattttttgcaaataattaatatttataaatactgaacggtgacatcttataaatcttttatcattaattctattaattaagtcttcaagtccctcataagtgtcatacctgccagttgttgtatgtatcgtagttttagtacctacatgttcaatgcatagtatggtatcaaaattaataaaaattacatcaaagccacatttaattcctacagttttcttagaaatccgttttaaatcctcatttgatagttttaatatattacgttcaagttcatcccaaccaggtttttgtataaaattaaatgcttgtacattaaaggcttccttaatatactcataatgcccagtcataaaaataatctcgcagggataatcttcttggcgtaattgattagcaatattcatgccggttatatcggattttaaatcaatatccaatatacaaacattcactttattacttttgactgtatcaataaactttgatgttgaattagtcgcaattattaggctgccttcaatactattctttttcagtatttcaggaattttattttcgtaatcataaataaatttgagttcgtcatccaaaacagcgatattaatcattctatacctaccttaatttacattataatacgcattttccctaaaatatatctttaaatataaaaaaataatgatttttggagaattttataatattttgttaatttctttgtatggaattaattcaaaaatttgttataataatcacattataacattaaattatatatcaattgaacatgaatttgtttgatctcttatcgaaatggatgttttctttatcgaaatatatattttgaagggaactttaaacatgaaaaatgaaacagagaatttacactataaaaaacaattattgtagactgaataaaaaaggattatttcaacattttaaaaggttcttctagtgctgacggatatgcaaataaacagagttgtttcataatttattctgtaagtctaataatgactttatttgatttaatgcgtaccgttgaaaatcagaatttaacatttgaaatattttaaatgcttctgaatatgttttgctattacaggtattattattattgctatcatcaaagtcattaagactgcaatccaaaactttagccaaagctttcaatgtttctaactttggatctttggttacaccagataaaattttatttaatgtcccaataggtacaccagattgattagataattgctccgatgttaaaccttttaattttcttaattcattgattacttcaagtcccataaatttcacctcacattagtataaatatatcttgtgtacttgtaatctgtcaacacaaattgaccgttaacggataaaagtggctaataaagcattgacattttccgttaacggtaatataatattatttaagtaaccgtcaacggaaaggtgtggggaatatatgttttataatttgttagccgaaatggcaaggcatagaccaagaataacaaaactgaacattgctgaatgtttagaaataagtgaaaaaactgcaagaaattatctaaatggaacttctaaaataccatggtcagatgccttaaaaataaaaaatacttatttttcagagcttgaaatggagtacctttttgaaaccgatgaaaataataattgaatttactgataaaagaattgttataagacccgcaaaacgaaaaatacccagtgttgcgaccactgagtatcggatagttcttacaaaaactattaagtttaggtgactctctcaaaagtaacctttgatatttttaattatagggcgtttccctctaaattgcaatagcagtttatgaaaataaaaaaggcgacaaccaacacactgttaacatacgttgtgctgccgcccaccctttgaaccttgataacataactctgtcatcaaattatactgtataggtatcttaattgtatcggtgtctcaggcgtccgtcaacagcaaaggaaataaatagttaaatgtgagatgggtttgcttgaacatttgacagcagatgaggagtggaatataaacgccaattgtacagcagtgcaattaatttgtgttccatgtataaaaagaactgcattcggcggctcacatggataatggtaatatgccaagcacaaatagctgctgataataccggagcggagccaagaggttaaaccctgcgaggaagttacaattgaagtttgaattggcgaaattgattattatttttatcacaatagactatgtactgaatacttttcagtacatagatgtgttgtgacatttatttttatagtcatagccgtaacaggaaatacatacatatcttataaataaattattttgtaggagggaatataaatgattaaaaggattgaatttgtagatcccaatttaccatctgacattgaaaaaatcttaccatcaatactggcacaagctcttattaataagcttcagaacgaaaatattactgataataaaaataaatctgcctaaaagaagtattgaggaggtaactcttttgactgaaataaggacaagttataaaagaatcagagttgccgcttattgtagggtatcaacggaaaaggatgagcagcttttatcactaaaagctcaaaaagagttttttgaagaatatgctgacaaaatgggctttgaattggtggccctctacgcagatgaaggtataagtggtacaaagctaaagaacagaaaacaattcaataaaatgatgcaggatgcagaaagaggactttttgagagggtatacgtaaaagatgtatcccgtctggcaagaaatgttgttgattttttgcaaagtataagaaagctcaaatcattgaatatagattgtcagtttatcacagcaaatatgtctgcaaatgatggggagcttacactgacaattttggcggcggtagcccaggaagaaagctcaaacctgtcaaaaagagttaaattcgggaaaaagaaaaatgcagagatgggaaaagtaccaaaccttgtatttggctatgacaagacagtgggagactattttaatcttaagataaatgttcgtgaagcagaaatagtcaagcgtatatttgatatgtatattaacaagggatttggtacaaataagatttctcaaatactgaataaggaatgcataaaaacaaagaggaactgtaattggagccaaaacgctatatgcagaatactttcaaatgaactctatacaggcaaagtaataaattgtaaagagagagttgaagattttttaacaggcaaacgggttaaagtggaggaaagcgggcaatccattgtggacaagccggaaatagcaatcataagtagaagtgaatttgagcaggctcagtcgctattaggccaaagggttgatacatttaaaataaagaaggaaagacattcaaataaatatgctttaagtacactcatcaagtgcggttgttgtgatagaagtttccgaagaatctacaggaagagagaaaacagtgaatatatcaaatggggctgtagcacccgaaattcagacggagctacccaatgcagtaatacaacacttgttgatgaagtagaactattagatgaaataaaggaatatttaaacactgtagtttcatcaaaggaaaagcttcttgaaaagaccataaatgaattcaagaaaaagtacaagctgggacatggcgaaacaaatgaaagcgatttgacaagtgaactggaaagattaaaaaagttaaagttaaagcaaacaaaaatgtacgaggcagatataatttctatagaagaacttaaagagagaaccgctgatataaacgaagctataagaaaagctgaagctgaattgtcaatccttcaggggaatacatcaacctttgacagattagaagcaatagtcaaaaagtactgcggaagtataaatgatgttttaaacactgatacgattgataacagtatgcttaaaaaggttattgataaaattgttgtaaataccgatggtggtattaaagtttaccttaaattgtttaaagacttggaacttgtaaattaaaatatatgcaaatacatcaaagggaatatatattgtttatattccttttactatgtcaaaaatatgatataatacatttgaattataagtagttagccgttccattttgttacgtccttgtggacggtgctcttgcttattccaaactttttagcggcgtatcgtactgttgtccttttgtcgatgatataatttgcgagttctaagacccgttcttctatgtactccttcaaccatataccccccttttgataaggcattattcactgcaacgtagatatattatcctttaagcaagttaaaactcgctaaaaagctgtatggcatcgtctacagtgtatatatatgcctttgtggaagggcttatgaatgatagctgcaaaatttagtcaaataataagaagttgacattttcaccttcaacatgttaatgatttttctttaagcagttcgtattacgatggcagctttcaaattatacaaattatgcagttacgcttatttttgcaatccgactttgtacagtaccactaaatcaaacttagagttagaagaaataaagaatattgatggtttgtgtgaataaatgcatggtttatagaacaatcgaaatatgcctttctaatttacaactaatgtaaaaatagatttagtgaaataaacgttgatttattgtgataataatagataattaatattaaatttgaaatttgaaataatatattgaaaattgtgtataagtaagctaaaataaaaaagataaataatatctgattcttatctttaaaaaatggtgatgcatattttgattgccgtttgattgtcgtttgattgtcatttttataagttttatgttaagaagcaacaagataacaactgaataagcagcgatgaaaattcggcggaattttcgaggtctaccagtcttataatcaattgagattggcatgaaaagaccatttgatttgtactatattgcaattatattcagccatacggcttttactaaaaagccatgggtttttgtgacttacccttatgagtagtttaaaaatttataaaaaaccctacaggaagaaaagagtcatacactaggagtgaaaaccctgtcacaatttctaataaaggtcttaaaagaggtgaggaggtgcacaaagtttacaggtagcaatgctgaaatagaaggaatcagagttgtttattagaattagtttgcatagtatatgtaagataggaaagaatacattatattcacgtatagcagactgccgcctaagaagaggttttggcagacgtacaaaaagagtgagaatttcggagggaatactgtgatagtcagagaaattgatttaccgggaatcggaaggaaatttgaaatagaaatcggcggtggcgataaaattgtagttattgttcacgacgatggacgccgggagctgtaccatttttgtaatggagaagatgacagtgtatccgtgatcagccttgaggataccgaagcaaggctgctggcaagtattattgggggaatggcatatagtcccaagtcaatggataatgtagaggtagtaataggtggtcttgttattgagtggtatagggtagaggaaggttctgcctgtattgggaaaaccatagaggaaatgaatatacgacaggctaccggagtcaccatacttgcagtggttgaaaaaaatcgtgaaaagaatatcaatcccagacctgactatcagttcaagcctaattccacattaattgttacgggggaaagaaagaatttgaatacattcaaaaattatattagagatggaaggtaatgatgggcaatttaattttcgagattggtttggcggttgcattaatagccatagtggggctgatatcaaaaaagctccgtttctcagtcattccgttttatattctgatcgggatggctgtgggaccgcatgcaccgcattttggtatatttgatttaagatttattgaaagctccacatttattgagtttatgggccgcttgggtatgcttttccttctttttag
